United States Patent Application Publication US 2011/0183924 A1 - sequence listing, part 175

SEQ ID NO: 436302 - DNA, 1490 bp, Homo sapiens
gtgtgcgcgcagggcgcaggcgcgcgggtcccggcagcccgtgagacgcccgctgctggacgcgggtagccgtctgaggtgccggagctgcgggaggatggagccgctgaaggtggaaaagttcgcaaccgccaacaggggaaacgggctgcgcgccgtgaccccgctgcgccccggagagctactcttccgctcggatcccttggcgtacacggtgtgcaaggggagtcgtggcgtcgtctgcgaccgctgccttctcgggaaggaaaagctgatgcgatgctctcagtgccgcgtcgccaaatactgtagtgctaagtgtcagaaaaaagcttggccagaccacaagcgggaatgcaaatgccttaaaagctgcaaacccagatatcctccagactccgttcgacttcttggcagagttgtcttcaaacttatggatggagcaccttcagaatcagagaagctttactcattttatgatctggagtcaaatattaacaaactgactgaagataagaaagagggcctcaggcaactcgtaatgacatttcaacatttcatgagagaagaaatacaggatgcctctcagctgccacctgcctttgacctttttgaagcctttgcaaaagtgatctgcaactctttcaccatctgtaatgcggagatgcaggaagttggtgttggcctatatcccagtatctctttgctcaatcacagctgtgaccccaactgttcgattgtgttcaatgggccccacctcttactgcgagcagtccgagacatcgaggtgggagaggagctcaccatctgctacctggatatgctgatgaccagtgaggagcgccggaagcagctgagggaccagtactgctttgaatgtgactgtttccgttgccaaacccaggacaaggatgctgatatgctaactggtgatgagcaagtatggaaggaagttcaagaatccctgaaaaaaattgaagaactgaaggcacactggaagtgggagcaggttctggccatgtgccaggcaatcataagcagcaattctgaacggcttcccgatatcaacatctaccagctgaaggtgctcgactgcgccatggatgcctgcatcaacctcggcctgttggaggaagccttgttctatggtactcggaccatggagccatacaggcttttgatattatgagagtgacacatggcagagaacacagcctgattgaagatttgattctacttttagaagaatgcgacgccaacatcagagcatcctaagggaacgcagtcagagggaaatacggcgtgtgtctttgttgaatgccttattgaggtcacacactctatgctttgttagctgtgtgaacctctcctattggaaattctgttccgtgtttgtgtaggtaaataaaggcagacatggtttgcaaaccacaagaatcattagttgtagagaagcacgattataataaattcaaaacatttggttgagg

SEQ ID NO: 436303 - DNA, 1463 bp, Homo sapiens
gtgtgcgcgcagggcgcaggcgcgcgggtcccggcagcccgtgagacgcccgctgctggacgcgggtagccgtctgaggtgccggagctgcgggaggatggagccgctgaaggtggaaaagttcgcaaccgccaacaggggaaacgggctgcgcgccgtgaccccgctgcgccccggagagctactcttccgctcggatcccttggcgtacacggtgtgcaaggggagtcgtggcgtcgtctgcgaccgctgccttctcgggaaggaaaagctgatgcgatgctctcagtgccgcgtcgccaaatactgtagtgctaagtgtcagaaaaaagcttggccagaccacaagcgggaatgcaaatgccttaaaagctgcaaacccagatatcctccagactccgttcgacttcttggcagagttgtcttcaaacttatggatggagcaccttcagaatcagagaagctttactcattttatgatctggagtcaaatattaacaaactgactgaagataagaaagagggcctcaggcaactcgtaatgacatttcaacatttcatgagagaagaaatacaggatgcctctcagctgccacctgcctttgacctttttgaagcctttgcaaaagtgatctgcaactctttcaccatctgtaatgcggagatgcaggaagttggtgttggcctatatcccagtatctctttgctcaatcacagctgtgaccccaactgttcgattgtgttcaatgggccccacctcttactgcgagcagtccgagacatcgaggtgggagaggagctcaccatctgctacctggatatgctgatgaccagtgaggagcgccggaagcagctgagggaccagtactgctttgaatgtgactgtttccgttgccaaacccaggacaaggatgctgatatgctaactggtgatgagcaagtatggaaggaagttcaagaatccctgaaaaaaattgaagaactgaaggcacactggaagtgggagcaggttctggccatgtgccaggcaatcataagcagcaattctgaacggcttcccgatatcaacatctaccagctgaaggtgctcgactgcgccatggatgcctgcatcaacctcggcctgttggaggaagccttgttctatggtactcggaccatggagccatacaggatttttttcccaggaagccatcccgtcagaggggttcaagtgatgaaagttggcaaactgcagctacatcaaggcatgtttccccaagcaatgaagaatctgagactggcttttgatattatgagagtgacacatggcagagaacacagcctgattgaagatttgattctacttttagaagaatgcgacgccaacatcagagcatcctaagggaacgcagtcagagggcgacactcgagtgtctcccacattaggcttaaaacagatgcaattcccggacgtctaacct

SEQ ID NO: 436304 - DNA, 1430 bp, Homo sapiens
gtgtgcgcgcagggcgcaggcgcgcgggtcccggcagcccgtgagacgcccgctgctggacgcgggtagccgtctgaggtgccggagctgcgggaggatggagccgctgaaggtggaaaagttcgcaaccgccaacaggggaaacgggctgcgcgccgtgaccccgctgcgccccggagagctactcttccgctcggatcccttggcgtacacggtgtgcaaggggagtcgtggcgtcgtctgcgaccgctgccttctcgggaaggaaaagctgatgcgatgctctcagtgccgcgtcgccaaatactgtagtgctaagtgtcagaaaaaagcttggccagaccacaagcgggaatgcaaatgccttaaaagctgcaaacccagatatcctccagactccgttcgacttcttggcagagttgtcttcaaacttatggatggagcaccttcagaatcagagaagctttactcattttatgatctggagtcaaatattaacaaactgactgaagataagaaagagggcctcaggcaactcgtaatgacatttcaacatttcatgagagaagaaatacaggatgcctctcagctgccacctgcctttgacctttttgaagcctttgcaaaagtgatctgcaactctttcaccatctgtaatgcggagatgcaggaagttggtgttggcctatatcccagtatctctttgctcaatcacagctgtgaccccaactgttcgattgtgttcaatgggccccacctcttactgcgagcagtccgagacatcgaggtgggagaggagctcaccatctgctacctggatatgctgatgaccagtgaggagcgccggaagcagctgagggaccagtactgctttgaatgtgactgtttccgttgccaaacccaggacaaggatgctgatatgctaactggtgatgagcaagtatggaaggaagttcaagaatccctgaaaaaaattgaagaactgaaggcacactggaagtgggagcaggttctggccatgtgccaggcaatcataagcagcaattctgaacggcttcccgatatcaacatctaccagctgaaggtgctcgactgcgccatggatgcctgcatgcttttgatattatgagagtgacacatggcagagaacacagcctgattgaagatttgattctacttttagaagaatgcgacgccaacatcagagcatcctaagggaacgcagtcagagggaaatacggcgtgtgtctttgttgaatgccttattgaggtcacacactctatgctttgttagctgtgtgaacctctcctattggaaattctgttccgtgtttgtgtaggtaaataaaggcagacatggtttgcaaaccacaagaatcattagttgtagagaagcacgattataataaattcaaaacatttggttgagg

SEQ ID NO: 436305 - DNA, 1449 bp, Homo sapiens
gtgtgcgcgcagggcgcaggcgcgcgggtcccggcagcccgtgagacgcccgctgctggacgcgggtagccgtctgaggtgccggagctgcgggaggatggagccgctgaaggtggaaaagttcgcaaccgccaacaggggaaacgggctgcgcgccgtgaccccgctgcgccccggagagctactcttccgctcggatcccttggcgtacacggtgtgcaaggggagtcgtggcgtcgtctgcgaccgctgccttctcgggaaggaaaagctgatgcgatgctctcagtgccgcgtcgccaaatactgtagtgctaagtgtcagaaaaaagcttggccagaccacaagcgggaatgcaaatgccttaaaagctgcaaacccagatatcctccagactccgttcgacttcttggcagagttgtcttcaaacttatggatggagcaccttcagaatcagagaagctttactcattttatgatctggagtcaaatattaacaaactgactgaagataagaaagagggcctcaggcaactcgtaatgacatttcaacatttcatgagagaagaaatacaggatgcctctcagctgccacctgcctttgacctttttgaagcctttgcaaaagtgatctgcaactctttcaccatctgtaatgcggagatgcaggaagttggtgttggcctatatcccagtatctctttgctcaatcacagctgtgaccccaactgttcgattgtgttcaatgggccccacctcttactgcgagcagtccgagacatcgaggtgggagaggagctcaccatctgctacctggatatgctgatgaccagtgaggagcgccggaagcagctgagggaccagtactgctttgaatgtgactgtttccgttgccaaacccaggacaaggatgctgatatgctaactggtgatgagcaagtatggaaggaagttcaagaatccctgaaaaaaattgaagaactgaaggcacactggaagtgggagcaggttctggccatgtgccaggcaatcataagcagcaattctgaacggcttcccgatatcaacatctaccagctgaaggtgctcgactgcgccatggatgcctgcatcaacctcggcctgttggaggaagccttgttctatggtactcggaccatggagccatacagttgaagaagaccaggaaagaatcttcttttaaaaaactgagctctatctgtcctgattcctggtgctgcttcaggtatctaccttaattttcttatattcctatgaagacagtggtttggataattggaggtagctatacactgaaattattaaattgtttaccttcaaaacaggagtagaccagaaatgcaggtccttgtcctcagaactgcagttcacatcatattcagtaattaatttaatagtcacgttttcctcccaggctagacaggaag

SEQ ID NO: 436306 - DNA, 561 bp, Homo sapiens
  misc_feature (41)..(41): n is a, c, g, or t
gctccctcacccccagggattacaacaaaatttgaaatacnatggcccgttggattggaaattgaagaagaccaggaaagaatcttcttttaaaaaactgagctctatctgtcctgattcctggtgctgcttcaggatttttttcccaggaagccatcccgtcagaggggttcaagtgatgaaagttggcaaactgcagctacatcaaggcatgtttccccaagcaatgaagaatctgagactggcttttgatattatgagagtgacacatggcagagaacacagcctgattgaagatttgattctacttttagaagaatgcgacgccaacatcagagcatcctaagggaacgcagtcagagggaaatacggcgtgtgtctttgttgaatgccttattgaggtcacacactctatgctttgttagctgtgtgaacctctcctattggaaattctgttccgtgtttgtgtaggtaaataaaggcagacatggtttgcaaaccacaagaatcattagttgtagagaagcacgattataataaattcaaaacatttggttgagg

SEQ ID NO: 436307 - DNA, 796 bp, Homo sapiens
agctcggtacctacttttcacagggcagtgatattttctcccctcagtccaataattctccaggagttgcaaaatgatttttctaattccgtcatcattccacatttatcagctaaaattcatacaactggagctatttagttactctaagatacaatttaaataggcaggttaagttctcctttcaggttcagtaatatgttttgcatcagtttttaaaaaataattgtattaacttagtttgtgctgctacaccaaaataccatagacggtaattcaccaagaacagaatttttttttttctcacagttccggaggctgggaagttcaagtcatgaaatccaagatgaaggtgccagcaggttgtctggatttttttcccaggaagccatcccgtcagaggggttcaagtgatgaaagttggcaaactgcagctacatcaaggcatgtttccccaagcaatgaagaatctgagactggcttttgatattatgagagtgacacatggcagagaacacagcctgattgaagatttgattctacttttagaagaatgcgacgccaacatcagagcatcctaagggaacgcagtcagagggaaatacggcgtgtgtctttgttgaatgccttattgaggtcacacactctatgctttgttagctgtgtgaacctctcctattggaaattctgttccgtgtttgtgtaggtaaataaaggcagacatggtttgcaaaccacaagaatcattagttgtagagaagcacgattataataaattcaaaacatttggttgagg

SEQ ID NO: 436308 - DNA, 490 bp, Homo sapiens
  misc_feature (18)..(18): n is a, c, g, or t
atatactgactaccagantctacacgaccacgctggccaccaccataggcgaattctggctaccgatttttttcccaggaagccatcccgtcagaggggttcaagtgatgaaagttggcaaactgcagctacatcaaggcatgtttccccaagcaatgaagaatctgagactggcttttgatattatgagagtgacacatggcagagaacacagcctgattgaagatttgattctacttttagaagaatgcgacgccaacatcagagcatcctaagggaacgcagtcagagggaaatacggcgtgtgtctttgttgaatgccttattgaggtcacacactctatgctttgttagctgtgtgaacctctcctattggaaattctgttccgtgtttgtgtaggtaaataaaggcagacatggtttgcaaaccacaagaatcattagttgtagagaagcacgattataataaattcaaaacatttggttgagg

SEQ ID NO: 436309 - DNA, 1012 bp, Homo sapiens
actggtgaccaggccccatccgcccaggaacctgcctgcctcctgctgctgttcatggtgcccggactcagccctgactttgctcccaggtcggagtgggcatcgatagcagagagaagccaggcagctgaagcaggcatttctgagactgtgatctgcaactctttcaccatctgtaatgcggagatgcaggaagttggtgttggcctatatcccagtatctctttgctcaatcacagctgtgaccccaactgttcgattgtgttcaatgggccccacctcttactgcgagcagtccgagacatcgaggtgggagaggagctcaccatctgctacctggatatgctgatgaccagtgaggagcgccggaagcagctgagggaccagtactgctttgaatgtgactgtttccgttgccaaacccaggacaaggatgctgatatgctaactggtgatgagcaagtatggaaggaagttcaagaatccctgaaaaaaattgaagaactgaaggcacactggaagtgggagcaggttctggccatgtgccaggcaatcataagcagcaattctgaacggcttcccgatatcaacatctaccagctgaaggtgctcgactgcgccatggatgcctgcatcaacctcggcctgttggaggaagccttgttctatggtactcggaccatggagccatacaggcttttgatattatgagagtgacacatggcagagaacacagcctgattgaagatttgattctacttttagaagaatgcgacgccaacatcagagcatcctaagggaacgcagtcagagggaaatacggcgtgtgtctttgttgaatgccttattgaggtcacacactctatgctttgttagctgtgtgaacctctcctattggaaattctgttccgtgtttgtgtaggtaaataaaggcagacatggtttgcaaaccacaagaatcattagttgtagagaagcacgattataataaattcaaaacatttggttgagg

SEQ ID NO: 436310 - DNA, 817 bp, Homo sapiens
  misc_feature (800)..(800): n is a, c, g, or t
  misc_feature (806)..(806): n is a, c, g, or t
  misc_feature (817)..(817): n is a, c, g, or t
agctcggtacctacttttcacagggcagtgatattttctcccctcagtccaataattctccaggagttgcaaaatgatttttctaattccgtcatcattccacatttatcagctaaaattcatacaactggagctatttagttactctaagatacaatttaaataggcaggttaagttctcctttcaggttcagtaatatgttttgcatcagtttttaaaaaataattgtattaacttagtttgtgctgctacaccaaaataccatagacggtaattcaccaagaacagaatttttttttttctcacagttccggaggctgggaagttcaagtcatgaaatccaagatgaaggtgccagcaggttgtctggatttttttcccaggaagccatcccgtcagaggggttcaagtgatgaaagttggcaaactgcagctacatcaaggcatgtttccccaagcaatgaagaatctgagactggcttttgatattatgagagtgacacatggcagagaacacagcctgattgaagatttgattctacttttagaagaatgcgacgccaacatcagagcatcctaagggaacgcagtcagagggaaatacggcgtgtgtctttgttgaatgccttattgaggtcacacactctatgctttgttagctgtgtgaacctctcctattggaaattctgttccgtgtttgtgtaggtaaataaaggcagacatggtttgcaaaccacaagaatcattagttgtagagaagcacgattataataaattcaaaacatttggttgaggccgncgatgncgcccggaaan

SEQ ID NO: 436311 - DNA, 368 bp, Homo sapiens
  misc_feature (46)..(46): n is a, c, g, or t
atattatcattaacactcaattcatagccgaacaaatgaaaaaatngtcaggcttttgatattatgagagtgacacatggcagagaacacagcctgattgaagatttgattctacttttagaagaatgcgacgccaacatcagagcatcctaagggaacgcagtcagagggaaatacggcgtgtgtctttgttgaatgccttattgaggtcacacactctatgctttgttagctgtgtgaacctctcctattggaaattctgttccgtgtttgtgtaggtaaataaaggcagacatggtttgcaaaccacaagaatcattagttgtagagaagcacgattataataaattcaaaacatttggttgagg

SEQ ID NO: 436312 - DNA, 566 bp, Homo sapiens
gtgtgcgcgcagggcgcaggcgcgcgggtcccggcagcccgtgagacgcccgctgctggacgcgggtagccgtctgaggtgccggagctgcgggaggatggagccgctgaaggtggaaaagttcgcaaccgccaacaggggaaacgggctgcgcgccgtgaccccgctgcgccccggagagctactcttccgctcggatcccttggcgtacacggtgtgcaaggggagtcgtggcgtcgtctgcgaccgctgccttctcgggaaggaaaagctgatgcgatgctctcagtgccgcgtcgccaaatactgtagtgctaagtgtcagaaaaaagcttggccagaccacaagcgggaatgcaaatgccttaaaagctgcaaacccagatatcctccagactccgttcgacttcttggcagagttgtcttcaaacttatggatggagcaccttcagaatcagacaatacttgcaaaagtcctcagcacttattcccaacacttttgaaccttacaataaaccatgtttatcataagaaggtgcaacctgtcaatgggtcccgcctgcgta

SEQ ID NO: 436313 - DNA, 1452 bp, Homo sapiens
gtggattttagagatacctcccctccttctgctcagctgccttgcagtaattaaactctttctctgctgcaacacccctactgttctccgtgtattggcttttctgggcagcaggaaggaaaagctgatgcgatgctctcagtgccgcgtcgccaaatactgtagtgctaagtgtcagaaaaaagcttggccagaccacaagcgggaatgcaaatgccttaaaagctgcaaacccagatatcctccagactccgttcgacttcttggcagagttgtcttcaaacttatggatggagcaccttcagaatcagagaagctttactcattttatgatctggagtcaaatattaacaaactgactgaagataagaaagagggcctcaggcaactcgtaatgacatttcaacatttcatgagagaagaaatacaggatgcctctcagctgccacctgcctttgacctttttgaagcctttgcaaaagtgatctgcaactctttcaccatctgtaatgcggagatgcaggaagttggtgttggcctatatcccagtatctctttgctcaatcacagctgtgaccccaactgttcgattgtgttcaatgggccccacctcttactgcgagcagtccgagacatcgaggtgggagaggagctcaccatctgctacctggatatgctgatgaccagtgaggagcgccggaagcagctgagggaccagtactgctttgaatgtgactgtttccgttgccaaacccaggacaaggatgctgatatgctaactggtgatgagcaagtatggaaggaagttcaagaatccctgaaaaaaattgaagaactgaaggcacactggaagtgggagcaggttctggccatgtgccaggcaatcataagcagcaattctgaacggcttcccgatatcaacatctaccagctgaaggtgctcgactgcgccatggatgcctgcatcaacctcggcctgttggaggaagccttgttctatggtactcggaccatggagccatacaggatttttttcccaggaagccatcccgtcagaggggttcaagtgatgaaagttggcaaactgcagctacatcaaggcatgtttccccaagcaatgaagaatctgagactggcttttgatattatgagagtgacacatggcagagaacacagcctgattgaagatttgattctacttttagaagaatgcgacgccaacatcagagcatcctaagggaacgcagtcagagggaaatacggcgtgtgtctttgttgaatgccttattgaggtcacacactctatgctttgttagctgtgtgaacctctcctattggaaattctgttccgtgtttgtgtaggtaaataaaggcagacatggtttgcaaaccacaagaatcattagttgtagagaagcacgattataataaattcaaaacatttggttgagg

SEQ ID NO: 436314 - DNA, 464 bp, Homo sapiens
ccttgcgtgaacgactctcttaatatccaccgctacacgatttttttcccaggaagccatcccgtcagaggggttcaagtgatgaaagttggcaaactgcagctacatcaaggcatgtttccccaagcaatgaagaatctgagactggcttttgatattatgagagtgacacatggcagagaacacagcctgattgaagatttgattctacttttagaagaatgcgacgccaacatcagagcatcctaagggaacgcagtcagagggaaatacggcgtgtgtctttgttgaatgccttattgaggtcacacactctatgctttgttagctgtgtgaacctctcctattggaaattctgttccgtgtttgtgtaggtaaataaaggcagacatggtttgcaaaccacaagaatcattagttgtagagaagcacgattataataaattcaaaacatttggttgagg

SEQ ID NO: 436315 - DNA, 998 bp, Homo sapiens
tgccagcaaagaggcctgaacaagtaggtaatgagactgtctacacagaggttctgcgagcccacagctgcccactggaagacccgtttaggattaatatttcagatcatctattctgcttgctctgagattgatgcgcaagacacaaagcaacctctagacacttcagctaagaatgtgatctgcaactctttcaccatctgtaatgcggagatgcaggaagttggtgttggcctatatcccagtatctctttgctcaatcacagctgtgaccccaactgttcgattgtgttcaatgggccccacctcttactgcgagcagtccgagacatcgaggtgggagaggagctcaccatctgctacctggatatgctgatgaccagtgaggagcgccggaagcagctgagggaccagtactgctttgaatgtgactgtttccgttgccaaacccaggacaaggatgctgatatgctaactggtgatgagcaagtatggaaggaagttcaagaatccctgaaaaaaattgaagaactgaaggcacactggaagtgggagcaggttctggccatgtgccaggcaatcataagcagcaattctgaacggcttcccgatatcaacatctaccagctgaaggtgctcgactgcgccatggatgcctgcatcaacctcggcctgttggaggaagccttgttctatggtactcggaccatggagccatacagttgaagaagaccaggaaagaatcttcttttaaaaaactgagctctatctgtcctgattcctggtgctgcttcaggtatctaccttaattttcttatattcctatgaagacagtggtttggataattggaggtagctatacactgaaattattaaattgtttaccttcaaaacaggagtagaccagaaatgcaggtccttgtcctcagaactgcagttcacatcatattcagtaattaatttaatagtcacgttttcctcccaggctagacaggaag

SEQ ID NO: 436316 - DNA, 1599 bp, Homo sapiens
gtgtgcgcgcagggcgcaggcgcgcgggtcccggcagcccgtgagacgcccgctgctggacgcgggtagccgtctgaggtgccggagctgcgggaggatggagccgctgaaggtggaaaagttcgcaaccgccaacaggggaaacgggctgcgcgccgtgaccccgctgcgccccggagagctactcttccgctcggatcccttggcgtacacggtgtgcaaggggagtcgtggcgtcgtctgcgaccgctgccttctcgggaaggaaaagctgatgcgatgctctcagtgccgcgtcgccaaatactgtagtgctaagtgtcagaaaaaagcttggccagaccacaagcgggaatgcaaatgccttaaaagctgcaaacccagatatcctccagactccgttcgacttcttggcagagttgtcttcaaacttatggatggagcaccttcagaatcagagaagctttactcattttatgatctggagtcaaatattaacaaactgactgaagataagaaagagggcctcaggcaactcgtaatgacatttcaacatttcatgagagaagaaatacaggatgcctctcagctgccacctgcctttgacctttttgaagcctttgcaaaagtgatctgcaactctttcaccatctgtaatgcggagatgcaggaagttggtgttggcctatatcccagtatctctttgctcaatcacagctgtgaccccaactgttcgattgtgttcaatgggccccacctcttactgcgagcagtccgagacatcgaggtgggagaggagctcaccatctgctacctggatatgctgatgaccagtgaggagcgccggaagcagctgagggaccagtactgctttgaatgtgactgtttccgttgccaaacccaggacaaggatgctgatatgctaactggtgatgagcaagtatggaaggaagttcaagaatccctgaaaaaaattgaagaactgaaggcacactggaagtgggagcaggttctggccatgtgccaggcaatcataagcagcaattctgaacggcttcccgatatcaacatctaccagctgaaggtgctcgactgcgccatggatgcctgcatcaacctcggcctgttggaggaagccttgttctatggtactcggaccatggagccatacaggatttttttcccaggaagccatcccgtcagaggggttcaagtgatgaaagttggcaaactgcagctacatcaaggcatgtttccccaagcaatgaagaatctgagactggcttttgatattatgagagtgacacatggcagagaacacagcctgattgaagatttgattctacttttagaagaatgcgacgccaacatcagagcatcctaagggaacgcagtcagagggaaatacggcgtgtgtctttgttgaatgccttattgaggtcacacactctatgctttgttagctgtgtgaacctctcctattggaaattctgttccgtgtttgtgtaggtaaataaaggcagacatggtttgcaaaccacaagaatcattagttgtagagaagcacgattataataaattcaaaacatttggttgagg

SEQ ID NO: 436317 - DNA, 1673 bp, Homo sapiens
gtgtgcgcgcagggcgcaggcgcgcgggtcccggcagcccgtgagacgcccgctgctggacgcgggtagccgtctgaggtgccggagctgcgggaggatggagccgctgaaggtggaaaagttcgcaaccgccaacaggggaaacgggctgcgcgccgtgaccccgctgcgccccggagagctactcttccgctcggatcccttggcgtacacggtgtgcaaggggagtcgtggcgtcgtctgcgaccgctgccttctcgggaaggaaaagctgatgcgatgctctcagtgccgcgtcgccaaatactgtagtgctaagtgtcagaaaaaagcttggccagaccacaagcgggaatgcaaatgccttaaaagctgcaaacccagatatcctccagactccgttcgacttcttggcagagttgtcttcaaacttatggatggagcaccttcagaatcagagaagctttactcattttatgatctggagtcaaatattaacaaactgactgaagataagaaagagggcctcaggcaactcgtaatgacatttcaacatttcatgagagaagaaatacaggatgcctctcagctgccacctgcctttgacctttttgaagcctttgcaaaagtgatctgcaactctttcaccatctgtaatgcggagatgcaggaagttggtgttggcctatatcccagtatctctttgctcaatcacagctgtgaccccaactgttcgattgtgttcaatgggccccacctcttactgcgagcagtccgagacatcgaggtgggagaggagctcaccatctgctacctggatatgctgatgaccagtgaggagcgccggaagcagctgagggaccagtactgctttgaatgtgactgtttccgttgccaaacccaggacaaggatgctgatatgctaactggtgatgagcaagtatggaaggaagttcaagaatccctgaaaaaaattgaagaactgaaggcacactggaagtgggagcaggttctggccatgtgccaggcaatcataagcagcaattctgaacggcttcccgatatcaacatctaccagctgaaggtgctcgactgcgccatggatgcctgcatcaacctcggcctgttggaggaagccttgttctatggtactcggaccatggagccatacagttgaagaagaccaggaaagaatcttcttttaaaaaactgagctctatctgtcctgattcctggtgctgcttcaggatttttttcccaggaagccatcccgtcagaggggttcaagtgatgaaagttggcaaactgcagctacatcaaggcatgtttccccaagcaatgaagaatctgagactggcttttgatattatgagagtgacacatggcagagaacacagcctgattgaagatttgattctacttttagaagaatgcgacgccaacatcagagcatcctaagggaacgcagtcagagggaaatacggcgtgtgtctttgttgaatgccttattgaggtcacacactctatgctttgttagctgtgtgaacctctcctattggaaattctgttccgtgtttgtgtaggtaaataaaggcagacatggtttgcaaaccacaagaatcattagttgtagagaagcacgattataataaattcaaaacatttggttgagg

SEQ ID NO: 436318 - DNA, 1677 bp, Homo sapiens
gtgtgcgcgcagggcgcaggcgcgcgggtcccggcagcccgtgagacgcccgctgctggacgcgggtagccgtctgaggtgccggagctgcgggaggatggagccgctgaaggtggaaaagttcgcaaccgccaacaggggaaacgggctgcgcgccgtgaccccgctgcgccccggagagctactcttccgctcggatcccttggcgtacacggtgtgcaaggggagtcgtggcgtcgtctgcgaccgctgccttctcgggaaggaaaagctgatgcgatgctctcagtgccgcgtcgccaaatactgtagtgctaagtgtcagaaaaaagcttggccagaccacaagcgggaatgcaaatgccttaaaagctgcaaacccagatatcctccagactccgttcgacttcttggcagagttgtcttcaaacttatggatggagcaccttcagaatcagagaagctttactcattttatgatctggagtcaaatattaacaaactgactgaagataagaaagagggcctcaggcaactcgtaatgacatttcaacatttcatgagagaagaaatacaggatgcctctcagctgccacctgcctttgacctttttgaagcctttgcaaaaagatggggtcttgccatgttgcccagactggtcttcaactcctggtatcaagcgatcttcctgcctcagcctcacaaagtgatctgcaactctttcaccatctgtaatgcggagatgcaggaagttggtgttggcctatatcccagtatctctttgctcaatcacagctgtgaccccaactgttcgattgtgttcaatgggccccacctcttactgcgagcagtccgagacatcgaggtgggagaggagctcaccatctgctacctggatatgctgatgaccagtgaggagcgccggaagcagctgagggaccagtactgctttgaatgtgactgtttccgttgccaaacccaggacaaggatgctgatatgctaactggtgatgagcaagtatggaaggaagttcaagaatccctgaaaaaaattgaagaactgaaggcacactggaagtgggagcaggttctggccatgtgccaggcaatcataagcagcaattctgaacggcttcccgatatcaacatctaccagctgaaggtgctcgactgcgccatggatgcctgcatcaacctcggcctgttggaggaagccttgttctatggtactcggaccatggagccatacaggatttttttcccaggaagccatcccgtcagaggggttcaagtgatgaaagttggcaaactgcagctacatcaaggcatgtttccccaagcaatgaagaatctgagactggcttttgatattatgagagtgacacatggcagagaacacagcctgattgaagatttgattctacttttagaagaatgcgacgccaacatcagagcatcctaagggaacgcagtcagagggaaatacggcgtgtgtctttgttgaatgccttattgaggtcacacactctatgctttgttagctgtgtgaacctctcctattggaaattctgttccgtgtttgtgtaggtaaataaaggcagacatggtttgcaaaccacaagaatcattagttgtagagaagcacgattataataaattcaaaacatttggttgagg

SEQ ID NO: 436319 - DNA, 1142 bp, Homo sapiens
gcagaggcggcccacgctgtccacatgcagaggctcgctacagaagctacagaagaagatggttacatttcaagtgggcaggtgccgtttgcttatgagcaccatcagccacatcagccacggttctttgaattttacctaattgtctctaattcttaacaattctttgaggtgatctgcaactctttcaccatctgtaatgcggagatgcaggaagttggtgttggcctatatcccagtatctctttgctcaatcacagctgtgaccccaactgttcgattgtgttcaatgggccccacctcttactgcgagcagtccgagacatcgaggtgggagaggagctcaccatctgctacctggatatgctgatgaccagtgaggagcgccggaagcagctgagggaccagtactgctttgaatgtgactgtttccgttgccaaacccaggacaaggatgctgatatgctaactggtgatgagcaagtatggaaggaagttcaagaatccctgaaaaaaattgaagaactgaaggcacactggaagtgggagcaggttctggccatgtgccaggcaatcataagcagcaattctgaacggcttcccgatatcaacatctaccagctgaaggtgctcgactgcgccatggatgcctgcatcaacctcggcctgttggaggaagccttgttctatggtactcggaccatggagccatacaggatttttttcccaggaagccatcccgtcagaggggttcaagtgatgaaagttggcaaactgcagctacatcaaggcatgtttccccaagcaatgaagaatctgagactggcttttgatattatgagagtgacacatggcagagaacacagcctgattgaagatttgattctacttttagaagaatgcgacgccaacatcagagcatcctaagggaacgcagtcagagggaaatacggcgtgtgtctttgttgaatgccttattgaggtcacacactctatgctttgttagctgtgtgaacctctcctattggaaattctgttccgtgtttgtgtaggtaaataaaggcagacatggtttgcaaaccacaagaatcattagttgtagagaagcacgattataataaattcaaaacatttggttgagg

SEQ ID NO: 436320 - DNA, 1625 bp, Homo sapiens
gtgtgcgcgcagggcgcaggcgcgcgggtcccggcagcccgtgagacgcccgctgctggacgcgggtagccgtctgaggtgccggagctgcgggaggatggagccgctgaaggtggaaaagttcgcaaccgccaacaggggaaacgggctgcgcgccgtgaccccgctgcgccccggagagctactcttccgctcggatcccttggcgtacacggtgtgcaaggggagtcgtggcgtcgtctgcgaccgctgccttctcgggaaggaaaagctgatgcgatgctctcagtgccgcgtcgccaaatactgtagtgctaagtgtcagaaaaaagcttggccagaccacaagcgggaatgcaaatgccttaaaagctgcaaacccagatatcctccagactccgttcgacttcttggcagagttgtcttcaaacttatggatggagcaccttcagaatcagagaagctttactcattttatgatctggagtcaaatattaacaaactgactgaagataagaaagagggcctcaggcaactcgtaatgacatttcaacatttcatgagagaagaaatacaggatgcctctcagctgccacctgcctttgacctttttgaagcctttgcaaaagtgatctgcaactctttcaccatctgtaatgcggagatgcaggaagttggtgttggcctatatcccagtatctctttgctcaatcacagctgtgaccccaactgttcgattgtgttcaatgggccccacctcttactgcgagcagtccgagacatcgaggtgggagaggagctcaccatctgctacctggatatgctgatgaccagtgaggagcgccggaagcagctgagggaccagtactgctttgaatgtgactgtttccgttgccaaacccaggacaaggatgctgatatgctaactggtgatgagcaagtatggaaggaagttcaagaatccctgaaaaaaattgaagaactgaaggcacactggaagtgggagcaggttctggccatgtgccaggcaatcataagcagcaattctgaacggcttcccgatatcaacatctaccagctgaaggtgctcgactgcgccatggatgcctgcatcaacctcggcctgttggaggaagccttgttctatggtactcggaccatggagccatacaggatttttttcccaggaagccatcccgtcagaggggttcaagtgatgaaagttggcaaactgcagctacatcaaggcatgtttccccaagcaatgaagaatctgagactggcttttgatattatgagagtgacacatggcagagaacacagcctgattgaagatttgattctacttttagaagaatgcgacgccaacatcagagcatcctaagggaacgcagtcagagggaaatacggcgtgtgtctttgttgaatgccttattgaggtcacacactctatgctttgttagctgtgtgaacctctcctattggaaattctgttccgtgtttgtgtaggtaaataaaggcagacatggtttgcaaaccacaagaatcattagttgtagagaagcacgattataataaattcaaaacatttggttgaggatttggttgaggatgccatcaaaaaa

SEQ ID NO: 436321 - DNA, 1654 bp, Homo sapiens
gtgtgcgcgcagggcgcaggcgcgcgggtcccggcagcccgtgagacgcccgctgctggacgcgggtagccgtctgaggtgccggagctgcgggaggatggagccgctgaaggtggaaaagttcgcaaccgccaacaggggaaacgggctgcgcgccgtgaccccgctgcgccccggagagctactcttccgctcggatcccttggcgtacacggtgtgcaaggggagtcgtggcgtcgtctgcgaccgctgccttctcgggaaggaaaagctgatgcgatgctctcagtgccgcgtcgccaaatactgtagtgctaagtgtcagaaaaaagcttggccagaccacaagcgggaatgcaaatgccttaaaagctgcaaacccagatatcctccagactccgttcgacttcttggcagagttgtcttcaaacttatggatggagcaccttcagaatcagagaagctttactcattttatgatctggagtcaaatattaacaaactgactgaagataagaaagagggcctcaggcaactcgtaatgacatttcaacatttcatgagagaagaaatacaggatgcctctcagctgccacctgcctttgacctttttgaagcctttgcaaaagtgatctgcaactctttcaccatctgtaatgcggagatgcaggaagttggtgttggcctatatcccagtatctctttgctcaatcacagctgtgaccccaactgttcgattgtgttcaatgggccccacctcttactgcgagcagtccgagacatcgaggtgggagaggagctcaccatctgctacctggatatgctgatgaccagtgaggagcgccggaagcagctgagggaccagtactgctttgaatgtgactgtttccgttgccaaacccaggacaaggatgctgatatgctaactggtgatgagcaagtatggaaggaagttcaagaatccctgaaaaaaattgaagaactgaaggcacactggaagtgggagcaggttctggccatgtgccaggcaatcataagcagcaattctgaacggcttcccgatatcaacatctaccagctgaaggtgctcgactgcgccatggatgcctgcatcaacctcggcctgttggaggaagccttgttctatggtactcggaccatggagccatacaggatttttttcccaggaagccatcccgtcagaggggttcaagtgatgaaagttggcaaactgcagctacatcaaggcatgtttccccaagcaatgaagaatctgagactggcttttgatattatgagagtgacacatggcagagaacacagcctgattgaagatttgattctacttttagaagaatgcgacgccaacatcagagcatcctaagggaacgcagtcagagggaaatacggcgtgtgtctttgttgaatgccttattgaggtcacacactctatgctttgttagctgtgtgaacctctcctattggaaattctgttccgtgtttgtgtaggtaaataaaggcagacatggtttgcaaaccacaagaatcattagttgtagagaagcacgattataataaattcaaaacatttggttgaggtcaagaggccggccgaccccgctcccccggcatggcgcactctcgtaccctgaag

SEQ ID NO: 436322 - DNA, 1530 bp, Homo sapiens
gtggattttagagatacctcccctccttctgctcagctgccttgcagtaattaaactctttctctgctgcaacacccctactgttctccgtgtattggcttttctgggcagcaggaaggaaaagctgatgcgatgctctcagtgccgcgtcgccaaatactgtagtgctaagtgtcagaaaaaagcttggccagaccacaagcgggaatgcaaatgccttaaaagctgcaaacccagatatcctccagactccgttcgacttcttggcagagttgtcttcaaacttatggatggagcaccttcagaatcagagaagctttactcattttatgatctggagtcaaatattaacaaactgactgaagataagaaagagggcctcaggcaactcgtaatgacatttcaacatttcatgagagaagaaatacaggatgcctctcagctgccacctgcctttgacctttttgaagcctttgcaaaaagatggggtcttgccatgttgcccagactggtcttcaactcctggtatcaagcgatcttcctgcctcagcctcacaaagtgatctgcaactctttcaccatctgtaatgcggagatgcaggaagttggtgttggcctatatcccagtatctctttgctcaatcacagctgtgaccccaactgttcgattgtgttcaatgggccccacctcttactgcgagcagtccgagacatcgaggtgggagaggagctcaccatctgctacctggatatgctgatgaccagtgaggagcgccggaagcagctgagggaccagtactgctttgaatgtgactgtttccgttgccaaacccaggacaaggatgctgatatgctaactggtgatgagcaagtatggaaggaagttcaagaatccctgaaaaaaattgaagaactgaaggcacactggaagtgggagcaggttctggccatgtgccaggcaatcataagcagcaattctgaacggcttcccgatatcaacatctaccagctgaaggtgctcgactgcgccatggatgcctgcatcaacctcggcctgttggaggaagccttgttctatggtactcggaccatggagccatacaggatttttttcccaggaagccatcccgtcagaggggttcaagtgatgaaagttggcaaactgcagctacatcaaggcatgtttccccaagcaatgaagaatctgagactggcttttgatattatgagagtgacacatggcagagaacacagcctgattgaagatttgattctacttttagaagaatgcgacgccaacatcagagcatcctaagggaacgcagtcagagggaaatacggcgtgtgtctttgttgaatgccttattgaggtcacacactctatgctttgttagctgtgtgaacctctcctattggaaattctgttccgtgtttgtgtaggtaaataaaggcagacatggtttgcaaaccacaagaatcattagttgtagagaagcacgattataataaattcaaaacatttggttgagg

SEQ ID NO: 436323 - DNA, 1030 bp, Homo sapiens
  misc_feature (59)..(59): n is a, c, g, or t
cactggccctcttgtatgcccggccagtccgcccgccactccaccctaaaccagttcgngtgatctgcaactctttcaccatctgtaatgcggagatgcaggaagttggtgttggcctatatcccagtatctctttgctcaatcacagctgtgaccccaactgttcgattgtgttcaatgggccccacctcttactgcgagcagtccgagacatcgaggtgggagaggagctcaccatctgctacctggatatgctgatgaccagtgaggagcgccggaagcagctgagggaccagtactgctttgaatgtgactgtttccgttgccaaacccaggacaaggatgctgatatgctaactggtgatgagcaagtatggaaggaagttcaagaatccctgaaaaaaattgaagaactgaaggcacactggaagtgggagcaggttctggccatgtgccaggcaatcataagcagcaattctgaacggcttcccgatatcaacatctaccagctgaaggtgctcgactgcgccatggatgcctgcatcaacctcggcctgttggaggaagccttgttctatggtactcggaccatggagccatacaggatttttttcccaggaagccatcccgtcagaggggttcaagtgatgaaagttggcaaactgcagctacatcaaggcatgtttccccaagcaatgaagaatctgagactggcttttgatattatgagagtgacacatggcagagaacacagcctgattgaagatttgattctacttttagaagaatgcgacgccaacatcagagcatcctaagggaacgcagtcagagggaaatacggcgtgtgtctttgttgaatgccttattgaggtcacacactctatgctttgttagctgtgtgaacctctcctattggaaattctgttccgtgtttgtgtaggtaaataaaggcagacatggtttgcaaaccacaagaatcattagttgtagagaagcacgattataataaattcaaaacatttggttgagg

SEQ ID NO: 436324 - DNA, 1025 bp, Homo sapiens
  misc_feature (26)..(27): n is a, c, g, or t
aaaataacttaaatcataaaaaaaannattgtgcacaggacgtgggcacattttgtgatctgcaactctttcaccatctgtaatgcggagatgcaggaagttggtgttggcctatatcccagtatctctttgctcaatcacagctgtgaccccaactgttcgattgtgttcaatgggccccacctcttactgcgagcagtccgagacatcgaggtgggagaggagctcaccatctgctacctggatatgctgatgaccagtgaggagcgccggaagcagctgagggaccagtactgctttgaatgtgactgtttccgttgccaaacccaggacaaggatgctgatatgctaactggtgatgagcaagtatggaaggaagttcaagaatccctgaaaaaaattgaagaactgaaggcacactggaagtgggagcaggttctggccatgtgccaggcaatcataagcagcaattctgaacggcttcccgatatcaacatctaccagctgaaggtgctcgactgcgccatggatgcctgcatcaacctcggcctgttggaggaagccttgttctatggtactcggaccatggagccatacaggatttttttcccaggaagccatcccgtcagaggggttcaagtgatgaaagttggcaaactgcagctacatcaaggcatgtttccccaagcaatgaagaatctgagactggcttttgatattatgagagtgacacatggcagagaacacagcctgattgaagatttgattctacttttagaagaatgcgacgccaacatcagagcatcctaagggaacgcagtcagagggaaatacggcgtgtgtctttgttgaatgccttattgaggtcacacactctatgctttgttagctgtgtgaacctctcctattggaaattctgttccgtgtttgtgtaggtaaataaaggcagacatggtttgcaaaccacaagaatcattagttgtagagaagcacgattataataaattcaaaacatttggttgagg

SEQ ID NO: 436325 - DNA, 1564 bp, Homo sapiens
gtgtgcgcgcagggcgcaggcgcgcgggtcccggcagcccgtgagacgcccgctgctggacgcgggtagccgtctgaggtgccggagctgcgggaggatggagccgctgaaggtggaaaagttcgcaaccgccaacaggggaaacgggctgcgcgccgtgaccccgctgcgccccggagagctactcttccgctcggatcccttggcgtacacggtgtgcaaggggagtcgtggcgtcgtctgcgaccgctgccttctcgggaaggaaaagctgatgcgatgctctcagtgccgcgtcgccaaatactgtagtgctaagtgtcagaaaaaagcttggccagaccacaagcgggaatgcaaatgccttaaaagctgcaaacccagatatcctccagactccgttcgacttcttggcagagttgtcttcaaacttatggatggagcaccttcagaatcagagaagctttactcattttatgatctggagtcaaatattaacaaactgactgaagataagaaagagggcctcaggcaactcgtaatgacatttcaacatttcatgagagaagaaatacaggatgcctctcagctgccacctgcctttgacctttttgaagcctttgcaaaagtgatctgcaactctttcaccatctgtaatgcggagatgcaggaagttggtgttggcctatatcccagtatctctttgctcaatcacagctgtgaccccaactgttcgattgtgttcaatgggccccacctcttactgcgagcagtccgagacatcgaggtgggagaggagctcaccatctgctacctggatatgctgatgaccagtgaggagcgccggaagcagctgagggaccagtactgctttgaatgtgactgtttccgttgccaaacccaggacaaggatgctgatatgctaactggtgatgagcaagtatggaaggaagttcaagaatccctgaaaaaaattgaagaactgaaggcacactggaagtgggagcaggttctggccatgtgccaggcaatcataagcagcaattctgaacggcttcccgatatcaacatctaccagctgaaggtgctcgactgcgccatggatgcctgcatcaacctcggcctgttggaggaagccttgttctatggtactcggaccatggagccatacagttgaagaagaccaggaaagaatcttcttttaaaaaactgagctctatctgtcctgattcctggtgctgcttcaggcttttgatattatgagagtgacacatggcagagaacacagcctgattgaagatttgattctacttttagaagaatgcgacgccaacatcagagcatcctaagggaacgcagtcagagggaaatacggcgtgtgtctttgttgaatgccttattgaggtcacacactctatgctttgttagctgtgtgaacctctcctattggaaattctgttccgtgtttgtgtaggtaaataaaggcagacatggtttgcaaaccacaagaatcattagttgtagagaagcacgattataataaattcaaaacatttggttgagg

SEQ ID NO: 436326 - DNA, 1279 bp, Homo sapiens
  misc_feature (1272)..(1272): n is a, c, g, or t
  misc_feature (1275)..(1275): n is a, c, g, or t
gtgtgcgcgcagggcgcaggcgcgcgggtcccggcagcccgtgagacgcccgctgctggacgcgggtagccgtctgaggtgccggagctgcgggaggatggagccgctgaaggtggaaaagttcgcaaccgccaacaggggaaacgggctgcgcgccgtgaccccgctgcgccccggagagctactcttccgctcggatcccttggcgtacacggtgtgcaaggggagtcgtggcgtcgtctgcgaccgctgccttctcgggaaggaaaagctgatgcgatgctctcagtgccgcgtcgccaaatactgtagtgctaagtgtcagaaaaaagcttggccagaccacaagcgggaatgcaaatgccttaaaagctgcaaacccagatatcctccagactccgttcgacttcttggcagagttgtcttcaaacttatggatggagcaccttcagaatcagagaagctttactcattttatgatctggagtcaaatattaacaaactgactgaagataagaaagagggcctcaggcaactcgtaatgacatttcaacatttcatgagagaagaaatacaggatgcctctcagctgccacctgcctttgacctttttgaagcctttgcaaaagtgatctgcaactctttcaccatctgtaatgcggagatgcaggaagttggtgttggcctatatcccagtatctctttgctcaatcacagctgtgaccccaactgttcgattgtgttcaatgggccccacctcttactgcgagcagtccgagacatcgaggtgggagaggagctcaccatctgctacctggatatgctgatgaccagtgaggagcgccggaagcagctgagggaccagtactgctttgaatgtgactgtttccgttgccaaacccaggacaaggatgctgatatgctaactggtgatgagcaagtatggaaggaagttcaagaatccctgaaaaaaattgaagaactgaaggcacactggaagtgggagcaggttctggccatgtgccaggcaatcataagcagcaattctgaacggcttcccgatatcaacatctaccagctgaaggtgctcgactgcgccatggatgcctgcatcaacctcggcctgttggaggaagccttgttctatggtactcggaccatggagccatacaggatttttttcccaggaagccatcccgtcagaggggttcaagtgatgaaagaatcttgagaactggctttttgataattattgagagtgaccaccatggncanagaa

SEQ ID NO: 436327 - DNA, 1105 bp, Homo sapiens
gcagaggcggcccacgctgtccacatgcagaggctcgctacagaagctacagaagaagatggttacatttcaagtgggcaggtgccgtttgcttatgagcaccatcagccacatcagccacggttctttgaattttacctaattgtctctaattcttaacaattctttgaggtgatctgcaactctttcaccatctgtaatgcggagatgcaggaagttggtgttggcctatatcccagtatctctttgctcaatcacagctgtgaccccaactgttcgattgtgttcaatgggccccacctcttactgcgagcagtccgagacatcgaggtgggagaggaggatgctgatatgctaactggtgatgagcaagtatggaaggaagttcaagaatccctgaaaaaaattgaagaactgaaggcacactggaagtgggagcaggttctggccatgtgccaggcaatcataagcagcaattctgaacggcttcccgatatcaacatctaccagctgaaggtgctcgactgcgccatggatgcctgcatcaacctcggcctgttggaggaagccttgttctatggtactcggaccatggagccatacagttgaagaagaccaggaaagaatcttcttttaaaaaactgagctctatctgtcctgattcctggtgctgcttcaggatttttttcccaggaagccatcccgtcagaggggttcaagtgatgaaagttggcaaactgcagctacatcaaggcatgtttccccaagcaatgaagaatctgagactggcttttgatattatgagagtgacacatggcagagaacacagcctgattgaagatttgattctacttttagaagaatgcgacgccaacatcagagcatcctaagggaacgcagtcagagggaaatacggcgtgtgtctttgttgaatgccttattgaggtcacacactctatgctttgttagctgtgtgaacctctcctattggaaattctgttccgtgtttgtgtaggtaaataaaggcagacatggtttgcaaaccacaagaatcattagttgtagagaagcacgattataataaattcaaaacatttggttgagg

SEQ ID NO: 436328 - DNA, 472 bp, Homo sapiens
ctcttattcacactcttcttcccccaccccccaaacaaaaatcttggatttttttcccaggaagccatcccgtcagaggggttcaagtgatgaaagttggcaaactgcagctacatcaaggcatgtttccccaagcaatgaagaatctgagactggcttttgatattatgagagtgacacatggcagagaacacagcctgattgaagatttgattctacttttagaagaatgcgacgccaacatcagagcatcctaagggaacgcagtcagagggaaatacggcgtgtgtctttgttgaatgccttattgaggtcacacactctatgctttgttagctgtgtgaacctctcctattggaaattctgttccgtgtttgtgtaggtaaataaaggcagacatggtttgcaaaccacaagaatcattagttgtagagaagcacgattataataaattcaaaacatttggttgagg

SEQ ID NO: 436329 - DNA, 996 bp, Homo sapiens
gcagaggcggcccacgctgtccacatgcagaggctcgctacagaagctacagaagaagatggttacatttcaagtgggcaggtgccgtttgcttatgagcaccatcagccacatcagccacggttctttgaattttacctaattgtctctaattcttaacaattctttgaggtgatctgcaactctttcaccatctgtaatgcggagatgcaggaagttggtgttggcctatatcccagtatctctttgctcaatcacagctgtgaccccaactgttcgattgtgttcaatgggccccacctcttactgcgagcagtccgagacatcgaggtgggagaggaggatgctgatatgctaactggtgatgagcaagtatggaaggaagttcaagaatccctgaaaaaaattgaagaactgaaggcacactggaagtgggagcaggttctggccatgtgccaggcaatcataagcagcaattctgaacggcttcccgatatcaacatctaccagctgaaggtgctcgactgcgccatggatgcctgcatcaacctcggcctgttggaggaagccttgttctatggtactcggaccatggagccatacagttgaagaagaccaggaaagaatcttcttttaaaaaactgagctctatctgtcctgattcctggtgctgcttcaggcttttgatattatgagagtgacacatggcagagaacacagcctgattgaagatttgattctacttttagaagaatgcgacgccaacatcagagcatcctaagggaacgcagtcagagggaaatacggcgtgtgtctttgttgaatgccttattgaggtcacacactctatgctttgttagctgtgtgaacctctcctattggaaattctgttccgtgtttgtgtaggtaaataaaggcagacatggtttgcaaaccacaagaatcattagttgtagagaagcacgattataataaattcaaaacatttggttgagg

SEQ ID NO: 436330 - DNA, 3864 bp, Homo sapiens
tgtcccctttgtttgaagctccagtgagggagcagtggctggggtggcccagcttcaaagtctctgtcctcttgaaaaaaggtggtcgggggacattgacccaccagccccgcaggctactgcctgcaaacaagaacccctcatctgccacgcacgttcttaatgtatctatagtctgcctgatgccacaaaggagtccagggtctcgctctgtcacacaggctggagtgcagtggtgtgatcttggctcatcgtaacctccacctcccgggttcaagtgattctcatgcctcagcctcccgagtagctgggattacaggtggtgacttccaagagtgactccgtcggaggaaaatgactccccagtcgctgctgcagacgacactgttcctgctgagtctgctcttcctggtccaaggtgcccacggcaggggccacagggaagactttcgcttctgcagccagcggaaccagacacacaggagcagcctccactacaaacccacaccagacctgcgcatctccatcgagaactccgaagaggccctcacagtccatgcccctttccctgcagcccaccctgcttcccgatccttccctgaccccaggggcctctaccacttctgcctctactggaaccgacatgctgggagattacatcttctctatggcaagcgtgacttcttgctgagtgacaaagcctctagcctcctctgcttccagcaccaggaggagagcctggctcagggccccccgctgttagccacttctgtcacctcctggtggagccctcagaacatcagcctgcccagtgccgccagcttcaccttctccttccacagtcctccccacacggccgctcacaatgcctcggtggacatgtgcgagctcaaaagggacctccagctgctcagccagttcctgaagcatccccagaaggcctcaaggaggccctcggctgcccccgccagccagcagttgcagagcctggagtcgaaactgacctctgtgagattcatgggggacatggtgtccttcgaggaggaccggatcaacgccacggtgtggaagctccagcccacagccggcctccaggacctgcacatccactcccggcaggaggaggagcagagcgagatcatggagtactcggtgctgctgcctcgaacactcttccagaggacgaaaggccggagcggggaggctgagaagagactcctcctggtggacttcagcagccaagccctgttccaggacaagaattccagccaagtcctgggtgagaaggtcttggggattgtggtacagaacaccaaagtagccaacctcacggagcccgtggtgctcaccttccagcaccagctacagccgaagaatgtgactctgcaatgtgtgttctgggttgaagaccccacattgagcagcccggggcattggagcagtgctgggtgtgagaccgtcaggagagaaacccaaacatcctgcttctgcaaccacttgacctactttgcagtgctgatggtctcctcggtggaggtggacgccgtgcacaagcactacctgagcctcctctcctacgtgggctgtgtcgtctctgccctggcctgccttgtcaccattgccgcctacctctgctccaggaggaaacctcgggactacaccatcaaggtgcacatgaacctgctgctggccgtcttcctgctggacacgagcttcctgctcagcgagccggtggccctgacaggctctgaggctggctgccgagccagtgccatcttcctgcacttctccctgctcacctgcctttcctggatgggcctcgaggggtacaacctctaccgactcgtggtggaggtctttggcacctatgtccctggctacctactcaagctgagcgccatgggctggggcttccccatctttctggtgacgctggtggccctggtggatgtggacaactatggccccatcatcttggctgtgcataggactccagagggcgtcatctacccttccatgtgctggatccgggactccctggtcagctacatcaccaacctgggcctcttcagcctggtgtttctgttcaacatggccatgctagccaccatggtggtgcagatcctgcggctgcgcccccacacccaaaagtggtcacatgtgctgacactgctgggcctcagcctggtccttggcctgccctgggccttgatcttcttctcctttgcttctggcaccttccagcttgtcgtcctctaccttttcagcatcatcacctccttccaaggcttcctcatcttcatctggtactggtccatgcggctgcaggcccggggtggcccctcccctctgaagagcaactcagacagcgccaggctccccatcagctcgggcagcacctcgtccagccgcatctaggcctccagcccacctgcccatgtgatgaagcagagatgcggcctcgtcgcacactgcctgtggcccccgagcccggcccagccccaggccagtcagccgcagactttggaaagcccaacgaccatggagagatgggccgttgccatggtggacggactcccgggctgggcttttgaattggccttggggactactcggctctcactcagctcccacgggactcagaagtgcgccgccatgctgcctagggtactgtccccacatctgtcccaacccagctggaggcctggtctctccttacaacccctgggcccagccctcattgctgggggccaggccttggatcttgagggtctggcacatccttaatcctgtgcccctgcctgggacagaaatgtggctccagttgctctgtctctcgtggtcaccctgagggcactctgcatcctctgtcattttaacctcaggtggcacccagggcgaatggggcccagggcagaccttcagggccagagccctggcggaggagaggccctttgccaggagcacagcagcagctcgcctacctctgagcccaggccccctccctccctcagccccccagtcctccctccatcttccctggggttctcctcctctcccagggcctccttgctccttcgttcacagctgggggtccccgattccaatgctgttttttggggagtggtttccaggagctgcctggtgtctgctgtaaatgtttgtctactgcacaagcctcggcctgcccctgagccaggctcggtaccgatgcgtgggctgggctaggtccctctgtccatctgggcctttgtatgagctgcattgcccttgctcaccctgaccaagcacacgcctcagaggggccctcagcctctcctgaagccctcttgtggcaagaactgtggaccatgccagtcccgtctggtttccatcccaccactccaaggactgagactgacctcctctggtgacactggcctagagcctgacactctcctaagaggttctctccaagcccccaaatagctccaggcgccctcggccgcccatcatggttaattctgtccaacaaacacacacgggtagattgctggcctgttgtaggtggtagggacacagatgaccgacctggtcactcctcctgccaacattcagtctggtatgtgaggcgtgcgtgaagcaagaactcctggagctacagggacagggagccatcattcctgcctgggaatcctggaagacttcctgcaggagtcagcgttcaatcttgaccttgaagatgggaaggatgttctttttacgtaccaattcttttgtcttttgatattaaaaagaagtacatgttcattgtagagaatttggaaactgtagaagagaatcaagaagaaaaataaaaatcagctgttgtaatcacctagcaaa

SEQ ID NO: 436331 - DNA, 3826 bp, Homo sapiens
gggtaccgggccccccctcgactctagcatgcgcacagcgggcgcagcaacaggctggcaggttaagcctctgggggtggatcctgaaaggtggtccagccgcctggccctgcgtgggaccctccacctggcagcaggtacccaaacaagggctggacagcagggtctcgctctgtcacacaggctggagtgcagtggtgtgatcttggctcatcgtaacctccacctcccgggttcaagtgattctcatgcctcagcctcccgagtagctgggattacaggtggtgacttccaagagtgactccgtcggaggaaaatgactccccagtcgctgctgcagacgacactgttcctgctgagtctgctcttcctggtccaaggtgcccacggcaggggccacagggaagactttcgcttctgcagccagcggaaccagacacacaggagcagcctccactacaaacccacaccagacctgcgcatctccatcgagaactccgaagaggccctcacagtccatgcccctttccctgcagcccaccctgcttcccgatccttccctgaccccaggggcctctaccacttctgcctctactggaaccgacatgctgggagattacatcttctctatggcaagcgtgacttcttgctgagtgacaaagcctctagcctcctctgcttccagcaccaggaggagagcctggctcagggccccccgctgttagccacttctgtcacctcctggtggagccctcagaacatcagcctgcccagtgccgccagcttcaccttctccttccacagtcctccccacacggccgctcacaatgcctcggtggacatgtgcgagctcaaaagggacctccagctgctcagccagttcctgaagcatccccagaaggcctcaaggaggccctcggctgcccccgccagccagcagttgcagagcctggagtcgaaactgacctctgtgagattcatgggggacatggtgtccttcgaggaggaccggatcaacgccacggtgtggaagctccagcccacagccggcctccaggacctgcacatccactcccggcaggaggaggagcagagcgagatcatggagtactcggtgctgctgcctcgaacactcttccagaggacgaaaggccggagcggggaggctgagaagagactcctcctggtggacttcagcagccaagccctgttccaggacaagaattccagccaagtcctgggtgagaaggtcttggggattgtggtacagaacaccaaagtagccaacctcacggagcccgtggtgctcaccttccagcaccagctacagccgaagaatgtgactctgcaatgtgtgttctgggttgaagaccccacattgagcagcccggggcattggagcagtgctgggtgtgagaccgtcaggagagaaacccaaacatcctgcttctgcaaccacttgacctactttgcagtgctgatggtctcctcggtggaggtggacgccgtgcacaagcactacctgagcctcctctcctacgtgggctgtgtcgtctctgccctggcctgccttgtcaccattgccgcctacctctgctccaggaggaaacctcgggactacaccatcaaggtgcacatgaacctgctgctggccgtcttcctgctggacacgagcttcctgctcagcgagccggtggccctgacaggctctgaggctggctgccgagccagtgccatcttcctgcacttctccctgctcacctgcctttcctggatgggcctcgaggggtacaacctctaccgactcgtggtggaggtctttggcacctatgtccctggctacctactcaagctgagcgccatgggctggggcttccccatctttctggtgacgctggtggccctggtggatgtggacaactatggccccatcatcttggctgtgcataggactccagagggcgtcatctacccttccatgtgctggatccgggactccctggtcagctacatcaccaacctgggcctcttcagcctggtgtttctgttcaacatggccatgctagccaccatggtggtgcagatcctgcggctgcgcccccacacccaaaagtggtcacatgtgctgacactgctgggcctcagcctggtccttggcctgccctgggccttgatcttcttctcctttgcttctggcaccttccagcttgtcgtcctctaccttttcagcatcatcacctccttccaaggcttcctcatcttcatctggtactggtccatgcggctgcaggcccggggtggcccctcccctctgaagagcaactcagacagcgccaggctccccatcagctcgggcagcacctcgtccagccgcatctaggcctccagcccacctgcccatgtgatgaagcagagatgcggcctcgtcgcacactgcctgtggcccccgagcccggcccagccccaggccagtcagccgcagactttggaaagcccaacgaccatggagagatgggccgttgccatggtggacggactcccgggctgggcttttgaattggccttggggactactcggctctcactcagctcccacgggactcagaagtgcgccgccatgctgcctagggtactgtccccacatctgtcccaacccagctggaggcctggtctctccttacaacccctgggcccagccctcattgctgggggccaggccttggatcttgagggtctggcacatccttaatcctgtgcccctgcctgggacagaaatgtggctccagttgctctgtctctcgtggtcaccctgagggcactctgcatcctctgtcattttaacctcaggtggcacccagggcgaatggggcccagggcagaccttcagggccagagccctggcggaggagaggccctttgccaggagcacagcagcagctcgcctacctctgagcccaggccccctccctccctcagccccccagtcctccctccatcttccctggggttctcctcctctcccagggcctccttgctccttcgttcacagctgggggtccccgattccaatgctgttttttggggagtggtttccaggagctgcctggtgtctgctgtaaatgtttgtctactgcacaagcctcggcctgcccctgagccaggctcggtaccgatgcgtgggctgggctaggtccctctgtccatctgggcctttgtatgagctgcattgcccttgctcaccctgaccaagcacacgcctcagaggggccctcagcctctcctgaagccctcttgtggcaagaactgtggaccatgccagtcccgtctggtttccatcccaccactccaaggactgagactgacctcctctggtgacactggcctagagcctgacactctcctaagaggttctctccaagcccccaaatagctccaggcgccctcggccgcccatcatggttaattctgtccaacaaacacacacgggtagattgctggcctgttgtaggtggtagggacacagatgaccgacctggtcactcctcctgccaacattcagtctggtatgtgaggcgtgcgtgaagcaagaactcctggagctacagggacagggagccatcattcctgcctgggaatcctggaagacttcctgcaggagtcagcgttcaatcttgaccttgaagatgggaaggatgttctttttacgtaccaattcttttgtcttttgatattaaaaagaagtacatgttcattgtagagaatttggaaactgtagaagagaatcaagaagaaaaataaaaatcagctgttgtaatcacctagcaaa

SEQ ID NO: 436332 - DNA, 350 bp, Homo sapiens
ggacgcgtgggtcgacggacgcgtgggtcgacccacgcgtccgccagatgaccgacctggtcactcctcctgccaacattcagtctggtatgtgaggcgtgcgtgaagcaagaactcctggagctacagggacagggagccatcattcctgcctgggaatcctggaagacttcctgcaggagtcagcgttcaatcttgaccttgaagatgggaaggatgttctttttacgtaccaattcttttgtcttttgatattaaaaagaagtacatgttcattgtagagaatttggaaactgtagaagagaatcaagaagaaaaataaaaatcagctgttgtaatcacctagcaaa

SEQ ID NO: 436333 - DNA, 334 bp, Homo sapiens
tcggctaggtacgaggcctgggtggttgcagatgaccgacctggtcactcctcctgccaacattcagtctggtatgtgaggcgtgcgtgaagcaagaactcctggagctacagggacagggagccatcattcctgcctgggaatcctggaagacttcctgcaggagtcagcgttcaatcttgaccttgaagatgggaaggatgttctttttacgtaccaattcttttgtcttttgatattaaaaagaagtacatgttcattgtagagaatttggaaactgtagaagagaatcaagaagaaaaataaaaatcagctgttgtaatcacctagcaaa

SEQ ID NO: 436334 - DNA, 348 bp, Homo sapiens
ccaagggccctgttgccgtggcaaccccggcctctctgtgggaactttggggagactggccctgggaggcgacagatggaggctgaggaagcagagtgatccccggccccttcctgtccctgaacactgtctgcctggatgagggctgtctgccctgccctgccgtaggagatgggctgggagcctcccacgctctccagctcactcggcaggcagcggggaccagggctggcaggttaagcctctgggggtggatcctgaaaggtggtccagccgcctggccctgcgtgggaccctccacctggcagcagtcgctctagcctgggccacagagcgagactccgtctc

SEQ ID NO: 436335 - DNA, 3785 bp, Homo sapiens
aagctggtactgggccgggccctcgaggctcaggcccttatggccggatcctgaaaggtggtccagccgcctggccctgcgtgggaccctccacctggcagcagggtctcgctctgtcacacaggctggagtgcagtggtgtgatcttggctcatcgtaacctccacctcccgggttcaagtgattctcatgcctcagcctcccgagtagctgggattacaggtggtgacttccaagagtgactccgtcggaggaaaatgactccccagtcgctgctgcagacgacactgttcctgctgagtctgctcttcctggtccaaggtgcccacggcaggggccacagggaagactttcgcttctgcagccagcggaaccagacacacaggagcagcctccactacaaacccacaccagacctgcgcatctccatcgagaactccgaagaggccctcacagtccatgcccctttccctgcagcccaccctgcttcccgatccttccctgaccccaggggcctctaccacttctgcctctactggaaccgacatgctgggagattacatcttctctatggcaagcgtgacttcttgctgagtgacaaagcctctagcctcctctgcttccagcaccaggaggagagcctggctcagggccccccgctgttagccacttctgtcacctcctggtggagccctcagaacatcagcctgcccagtgccgccagcttcaccttctccttccacagtcctccccacacggccgctcacaatgcctcggtggacatgtgcgagctcaaaagggacctccagctgctcagccagttcctgaagcatccccagaaggcctcaaggaggccctcggctgcccccgccagccagcagttgcagagcctggagtcgaaactgacctctgtgagattcatgggggacatggtgtccttcgaggaggaccggatcaacgccacggtgtggaagctccagcccacagccggcctccaggacctgcacatccactcccggcaggaggaggagcagagcgagatcatggagtactcggtgctgctgcctcgaacactcttccagaggacgaaaggccggagcggggaggctgagaagagactcctcctggtggacttcagcagccaagccctgttccaggacaagaattccagccaagtcctgggtgagaaggtcttggggattgtggtacagaacaccaaagtagccaacctcacggagcccgtggtgctcaccttccagcaccagctacagccgaagaatgtgactctgcaatgtgtgttctgggttgaagaccccacattgagcagcccggggcattggagcagtgctgggtgtgagaccgtcaggagagaaacccaaacatcctgcttctgcaaccacttgacctactttgcagtgctgatggtctcctcggtggaggtggacgccgtgcacaagcactacctgagcctcctctcctacgtgggctgtgtcgtctctgccctggcctgccttgtcaccattgccgcctacctctgctccagggtgcccctgccgtgcaggaggaaacctcgggactacaccatcaaggtgcacatgaacctgctgctggccgtcttcctgctggacacgagcttcctgctcagcgagccggtggccctgacaggctctgaggctggctgccgagccagtgccatcttcctgcacttctccctgctcacctgcctttcctggatgggcctcgaggggtacaacctctaccgactcgtggtggaggtctttggcacctatgtccctggctacctactcaagctgagcgccatgggctggggcttccccatctttctggtgacgctggtggccctggtggatgtggacaactatggccccatcatcttggctgtgcataggactccagagggcgtcatctacccttccatgtgctggatccgggactccctggtcagctacatcaccaacctgggcctcttcagcctggtgtttctgttcaacatggccatgctagccaccatggtggtgcagatcctgcggctgcgcccccacacccaaaagtggtcacatgtgctgacactgctgggcctcagcctggtccttggcctgccctgggccttgatcttcttctcctttgcttctggcaccttccagcttgtcgtcctctaccttttcagcatcatcacctccttccaaggcttcctcatcttcatctggtactggtccatgcggctgcaggcccggggtggcccctcccctctgaagagcaactcagacagcgccaggctccccatcagctcgggcagcacctcgtccagccgcatctaggcctccagcccacctgcccatgtgatgaagcagagatgcggcctcgtcgcacactgcctgtggcccccgagcccggcccagccccaggccagtcagccgcagactttggaaagcccaacgaccatggagagatgggccgttgccatggtggacggactcccgggctgggcttttgaattggccttggggactactcggctctcactcagctcccacgggactcagaagtgcgccgccatgctgcctagggtactgtccccacatctgtcccaacccagctggaggcctggtctctccttacaacccctgggcccagccctcattgctgggggccaggccttggatcttgagggtctggcacatccttaatcctgtgcccctgcctgggacagaaatgtggctccagttgctctgtctctcgtggtcaccctgagggcactctgcatcctctgtcattttaacctcaggtggcacccagggcgaatggggcccagggcagaccttcagggccagagccctggcggaggagaggccctttgccaggagcacagcagcagctcgcctacctctgagcccaggccccctccctccctcagccccccagtcctccctccatcttccctggggttctcctcctctcccagggcctccttgctccttcgttcacagctgggggtccccgattccaatgctgttttttggggagtggtttccaggagctgcctggtgtctgctgtaaatgtttgtctactgcacaagcctcggcctgcccctgagccaggctcggtaccgatgcgtgggctgggctaggtccctctgtccatctgggcctttgtatgagctgcattgcccttgctcaccctgaccaagcacacgcctcagaggggccctcagcctctcctgaagccctcttgtggcaagaactgtggaccatgccagtcccgtctggtttccatcccaccactccaaggactgagactgacctcctctggtgacactggcctagagcctgacactctcctaagaggttctctccaagcccccaaatagctccaggcgccctcggccgcccatcatggttaattctgtccaacaaacacacacgggtagattgctggcctgttgtaggtggtagggacacagatgaccgacctggtcactcctcctgccaacattcagtctggtatgtgaggcgtgcgtgaagcaagaactcctggagctacagggacagggagccatcattcctgcctgggaatcctggaagacttcctgcaggagtcagcgttcaatcttgaccttgaagatgggaaggatgttctttttacgtaccaattcttttgtcttttgatattaaaaagaagtacatgttcattgtagagaatttggaaactgtagaagagaatcaagaagaaaaataaaaatcagctgttgtaatcacctagcaaa

SEQ ID NO: 436336 - DNA, 3919 bp, Homo sapiens
gcccggcgctgagtcatgggcatcccccaggatcactgcctcagcgctctcagccctgccccctcctggtctccctctgagaaatccatgactcacatatatcgtccgtcatccccagtcaagctcagggaggagggaggagcccagctggggcaggagaggggtgtctccccaccaaacaaacccggtccctccctctccgcactagctgtctgccctgccctgccgtaggagatgggctgggagcctcccacgctctccagctcactcggcaggcagcggggaccagggctggcaggttaagcctctgggggtggatcctgaaaggtggtccagccgcctggccctgcgtgggaccctccacctggcagcaggtggtgacttccaagagtgactccgtcggaggaaaatgactccccagtcgctgctgcagacgacactgttcctgctgagtctgctcttcctggtccaaggtgcccacggcaggggccacagggaagactttcgcttctgcagccagcggaaccagacacacaggagcagcctccactacaaacccacaccagacctgcgcatctccatcgagaactccgaagaggccctcacagtccatgcccctttccctgcagcccaccctgcttcccgatccttccctgaccccaggggcctctaccacttctgcctctactggaaccgacatgctgggagattacatcttctctatggcaagcgtgacttcttgctgagtgacaaagcctctagcctcctctgcttccagcaccaggaggagagcctggctcagggccccccgctgttagccacttctgtcacctcctggtggagccctcagaacatcagcctgcccagtgccgccagcttcaccttctccttccacagtcctccccacacggccgctcacaatgcctcggtggacatgtgcgagctcaaaagggacctccagctgctcagccagttcctgaagcatccccagaaggcctcaaggaggccctcggctgcccccgccagccagcagttgcagagcctggagtcgaaactgacctctgtgagattcatgggggacatggtgtccttcgaggaggaccggatcaacgccacggtgtggaagctccagcccacagccggcctccaggacctgcacatccactcccggcaggaggaggagcagagcgagatcatggagtactcggtgctgctgcctcgaacactcttccagaggacgaaaggccggagcggggaggctgagaagagactcctcctggtggacttcagcagccaagccctgttccaggacaagaattccagccaagtcctgggtgagaaggtcttggggattgtggtacagaacaccaaagtagccaacctcacggagcccgtggtgctcaccttccagcaccagctacagccgaagaatgtgactctgcaatgtgtgttctgggttgaagaccccacattgagcagcccggggcattggagcagtgctgggtgtgagaccgtcaggagagaaacccaaacatcctgcttctgcaaccacttgacctactttgcagtgctgatggtctcctcggtggaggtggacgccgtgcacaagcactacctgagcctcctctcctacgtgggctgtgtcgtctctgccctggcctgccttgtcaccattgccgcctacctctgctccaggaggaaacctcgggactacaccatcaaggtgcacatgaacctgctgctggccgtcttcctgctggacacgagcttcctgctcagcgagccggtggccctgacaggctctgaggctggctgccgagccagtgccatcttcctgcacttctccctgctcacctgcctttcctggatgggcctcgaggggtacaacctctaccgactcgtggtggaggtctttggcacctatgtccctggctacctactcaagctgagcgccatgggctggggcttccccatctttctggtgacgctggtggccctggtggatgtggacaactatggccccatcatcttggctgtgcataggactccagagggcgtcatctacccttccatgtgctggatccgggactccctggtcagctacatcaccaacctgggcctcttcagcctggtgtttctgttcaacatggccatgctagccaccatggtggtgcagatcctgcggctgcgcccccacacccaaaagtggtcacatgtgctgacactgctgggcctcagcctggtccttggcctgccctgggccttgatcttcttctcctttgcttctggcaccttccagcttgtcgtcctctaccttttcagcatcatcacctccttccaaggcttcctcatcttcatctggtactggtccatgcggctgcaggcccggggtggcccctcccctctgaagagcaactcagacagcgccaggctccccatcagctcgggcagcacctcgtccagccgcatctaggcctccagcccacctgcccatgtgatgaagcagagatgcggcctcgtcgcacactgcctgtggcccccgagcccggcccagccccaggccagtcagccgcagactttggaaagcccaacgaccatggagagatgggccgttgccatggtggacggactcccgggctgggcttttgaattggccttggggactactcggctctcactcagctcccacgggactcagaagtgcgccgccatgctgcctagggtactgtccccacatctgtcccaacccagctggaggcctggtctctccttacaacccctgggcccagccctcattgctgggggccaggccttggatcttgagggtctggcacatccttaatcctgtgcccctgcctgggacagaaatgtggctccagttgctctgtctctcgtggtcaccctgagggcactctgcatcctctgtcattttaacctcaggtggcacccagggcgaatggggcccagggcagaccttcagggccagagccctggcggaggagaggccctttgccaggagcacagcagcagctcgcctacctctgagcccaggccccctccctccctcagccccccagtcctccctccatcttccctggggttctcctcctctcccagggcctccttgctccttcgttcacagctgggggtccccgattccaatgctgttttttggggagtggtttccaggagctgcctggtgtctgctgtaaatgtttgtctactgcacaagcctcggcctgcccctgagccaggctcggtaccgatgcgtgggctgggctaggtccctctgtccatctgggcctttgtatgagctgcattgcccttgctcaccctgaccaagcacacgcctcagaggggccctcagcctctcctgaagccctcttgtggcaagaactgtggaccatgccagtcccgtctggtttccatcccaccactccaaggactgagactgacctcctctggtgacactggcctagagcctgacactctcctaagaggttctctccaagcccccaaatagctccaggcgccctcggccgcccatcatggttaattctgtccaacaaacacacacgggtagattgctggcctgttgtaggtggtagggacacagatgaccgacctggtcactcctcctgccaacattcagtctggtatgtgaggcgtgcgtgaagcaagaactcctggagctacagggacagggagccatcattcctgcctgggaatcctggaagacttcctgcaggagtcagcgttcaatcttgaccttgaagatgggaaggatgttctttttacgtaccaattcttttgtcttttgatattaaaaagaagtacatgttcattgtagagaatttggaaactgtagaagagaatcaagaagaaaaataaaaatcagctgttgtaatcacctagcaaa

SEQ ID NO: 436337 - DNA, 3692 bp, Homo sapiens
ctcacaaagagttggcagatcacggatggagggcagcatctcccaacagcctgggcggccgctgagacccagagaacccaaggactcccctgggctcatccagcagcctctgcttcccaggagagaggtgctgaagtccacgaagaggtggtgacttccaagagtgactccgtcggaggaaaatgactccccagtcgctgctgcagacgacactgttcctgctgagtctgctcttcctggtccaaggtgcccacggcaggggccacagggaagactttcgcttctgcagccagcggaaccagacacacaggagcagcctccactacaaacccacaccagacctgcgcatctccatcgagaactccgaagaggccctcacagtccatgcccctttccctgcagcccaccctgcttcccgatccttccctgaccccaggggcctctaccacttctgcctctactggaaccgacatgctgggagattacatcttctctatggcaagcgtgacttcttgctgagtgacaaagcctctagcctcctctgcttccagcaccaggaggagagcctggctcagggccccccgctgttagccacttctgtcacctcctggtggagccctcagaacatcagcctgcccagtgccgccagcttcaccttctccttccacagtcctccccacacggccgctcacaatgcctcggtggacatgtgcgagctcaaaagggacctccagctgctcagccagttcctgaagcatccccagaaggcctcaaggaggccctcggctgcccccgccagccagcagttgcagagcctggagtcgaaactgacctctgtgagattcatgggggacatggtgtccttcgaggaggaccggatcaacgccacggtgtggaagctccagcccacagccggcctccaggacctgcacatccactcccggcaggaggaggagcagagcgagatcatggagtactcggtgctgctgcctcgaacactcttccagaggacgaaaggccggagcggggaggctgagaagagactcctcctggtggacttcagcagccaagccctgttccaggacaagaattccagccaagtcctgggtgagaaggtcttggggattgtggtacagaacaccaaagtagccaacctcacggagcccgtggtgctcaccttccagcaccagctacagccgaagaatgtgactctgcaatgtgtgttctgggttgaagaccccacattgagcagcccggggcattggagcagtgctgggtgtgagaccgtcaggagagaaacccaaacatcctgcttctgcaaccacttgacctactttgcagtgctgatggtctcctcggtggaggtggacgccgtgcacaagcactacctgagcctcctctcctacgtgggctgtgtcgtctctgccctggcctgccttgtcaccattgccgcctacctctgctccaggaggaaacctcgggactacaccatcaaggtgcacatgaacctgctgctggccgtcttcctgctggacacgagcttcctgctcagcgagccggtggccctgacaggctctgaggctggctgccgagccagtgccatcttcctgcacttctccctgctcacctgcctttcctggatgggcctcgaggggtacaacctctaccgactcgtggtggaggtctttggcacctatgtccctggctacctactcaagctgagcgccatgggctggggcttccccatctttctggtgacgctggtggccctggtggatgtggacaactatggccccatcatcttggctgtgcataggactccagagggcgtcatctacccttccatgtgctggatccgggactccctggtcagctacatcaccaacctgggcctcttcagcctggtgtttctgttcaacatggccatgctagccaccatggtggtgcagatcctgcggctgcgcccccacacccaaaagtggtcacatgtgctgacactgctgggcctcagcctggtccttggcctgccctgggccttgatcttcttctcctttgcttctggcaccttccagcttgtcgtcctctaccttttcagcatcatcacctccttccaaggcttcctcatcttcatctggtactggtccatgcggctgcaggcccggggtggcccctcccctctgaagagcaactcagacagcgccaggctccccatcagctcgggcagcacctcgtccagccgcatctaggcctccagcccacctgcccatgtgatgaagcagagatgcggcctcgtcgcacactgcctgtggcccccgagcccggcccagccccaggccagtcagccgcagactttggaaagcccaacgaccatggagagatgggccgttgccatggtggacggactcccgggctgggcttttgaattggccttggggactactcggctctcactcagctcccacgggactcagaagtgcgccgccatgctgcctagggtactgtccccacatctgtcccaacccagctggaggcctggtctctccttacaacccctgggcccagccctcattgctgggggccaggccttggatcttgagggtctggcacatccttaatcctgtgcccctgcctgggacagaaatgtggctccagttgctctgtctctcgtggtcaccctgagggcactctgcatcctctgtcattttaacctcaggtggcacccagggcgaatggggcccagggcagaccttcagggccagagccctggcggaggagaggccctttgccaggagcacagcagcagctcgcctacctctgagcccaggccccctccctccctcagccccccagtcctccctccatcttccctggggttctcctcctctcccagggcctccttgctccttcgttcacagctgggggtccccgattccaatgctgttttttggggagtggtttccaggagctgcctggtgtctgctgtaaatgtttgtctactgcacaagcctcggcctgcccctgagccaggctcggtaccgatgcgtgggctgggctaggtccctctgtccatctgggcctttgtatgagctgcattgcccttgctcaccctgaccaagcacacgcctcagaggggccctcagcctctcctgaagccctcttgtggcaagaactgtggaccatgccagtcccgtctggtttccatcccaccactccaaggactgagactgacctcctctggtgacactggcctagagcctgacactctcctaagaggttctctccaagcccccaaatagctccaggcgccctcggccgcccatcatggttaattctgtccaacaaacacacacgggtagattgctggcctgttgtaggtggtagggacacagatgaccgacctggtcactcctcctgccaacattcagtctggtatgtgaggcgtgcgtgaagcaagaactcctggagctacagggacagggagccatcattcctgcctgggaatcctggaagacttcctgcaggagtcagcgttcaatcttgaccttgaagatgggaaggatgttctttttacgtaccaattcttttgtcttttgatattaaaaagaagtacatgttcattgtagagaatttggaaactgtagaagagaatcaagaagaaaaataaaaatcagctgttgtaatcacctagcaaa

SEQ ID NO: 436338 - DNA, 3746 bp, Homo sapiens
tgtcccctttgtttgaagctccagtgagggagcagtggctggggtggcccagcttcaaagtctctgtcctcttgaaaaaaggtggtcgggggacattgacccaccagccccgcaggctactgcctgcaaacaagaacccctcatctgccacgcacgttcttaatgtatctatagtctgcctgatgccacaaaggagtccaggtggtgacttccaagagtgactccgtcggaggaaaatgactccccagtcgctgctgcagacgacactgttcctgctgagtctgctcttcctggtccaaggtgcccacggcaggggccacagggaagactttcgcttctgcagccagcggaaccagacacacaggagcagcctccactacaaacccacaccagacctgcgcatctccatcgagaactccgaagaggccctcacagtccatgcccctttccctgcagcccaccctgcttcccgatccttccctgaccccaggggcctctaccacttctgcctctactggaaccgacatgctgggagattacatcttctctatggcaagcgtgacttcttgctgagtgacaaagcctctagcctcctctgcttccagcaccaggaggagagcctggctcagggccccccgctgttagccacttctgtcacctcctggtggagccctcagaacatcagcctgcccagtgccgccagcttcaccttctccttccacagtcctccccacacggccgctcacaatgcctcggtggacatgtgcgagctcaaaagggacctccagctgctcagccagttcctgaagcatccccagaaggcctcaaggaggccctcggctgcccccgccagccagcagttgcagagcctggagtcgaaactgacctctgtgagattcatgggggacatggtgtccttcgaggaggaccggatcaacgccacggtgtggaagctccagcccacagccggcctccaggacctgcacatccactcccggcaggaggaggagcagagcgagatcatggagtactcggtgctgctgcctcgaacactcttccagaggacgaaaggccggagcggggaggctgagaagagactcctcctggtggacttcagcagccaagccctgttccaggacaagaattccagccaagtcctgggtgagaaggtcttggggattgtggtacagaacaccaaagtagccaacctcacggagcccgtggtgctcaccttccagcaccagctacagccgaagaatgtgactctgcaatgtgtgttctgggttgaagaccccacattgagcagcccggggcattggagcagtgctgggtgtgagaccgtcaggagagaaacccaaacatcctgcttctgcaaccacttgacctactttgcagtgctgatggtctcctcggtggaggtggacgccgtgcacaagcactacctgagcctcctctcctacgtgggctgtgtcgtctctgccctggcctgccttgtcaccattgccgcctacctctgctccaggaggaaacctcgggactacaccatcaaggtgcacatgaacctgctgctggccgtcttcctgctggacacgagcttcctgctcagcgagccggtggccctgacaggctctgaggctggctgccgagccagtgccatcttcctgcacttctccctgctcacctgcctttcctggatgggcctcgaggggtacaacctctaccgactcgtggtggaggtctttggcacctatgtccctggctacctactcaagctgagcgccatgggctggggcttccccatctttctggtgacgctggtggccctggtggatgtggacaactatggccccatcatcttggctgtgcataggactccagagggcgtcatctacccttccatgtgctggatccgggactccctggtcagctacatcaccaacctgggcctcttcagcctggtgtttctgttcaacatggccatgctagccaccatggtggtgcagatcctgcggctgcgcccccacacccaaaagtggtcacatgtgctgacactgctgggcctcagcctggtccttggcctgccctgggccttgatcttcttctcctttgcttctggcaccttccagcttgtcgtcctctaccttttcagcatcatcacctccttccaaggcttcctcatcttcatctggtactggtccatgcggctgcaggcccggggtggcccctcccctctgaagagcaactcagacagcgccaggctccccatcagctcgggcagcacctcgtccagccgcatctaggcctccagcccacctgcccatgtgatgaagcagagatgcggcctcgtcgcacactgcctgtggcccccgagcccggcccagccccaggccagtcagccgcagactttggaaagcccaacgaccatggagagatgggccgttgccatggtggacggactcccgggctgggcttttgaattggccttggggactactcggctctcactcagctcccacgggactcagaagtgcgccgccatgctgcctagggtactgtccccacatctgtcccaacccagctggaggcctggtctctccttacaacccctgggcccagccctcattgctgggggccaggccttggatcttgagggtctggcacatccttaatcctgtgcccctgcctgggacagaaatgtggctccagttgctctgtctctcgtggtcaccctgagggcactctgcatcctctgtcattttaacctcaggtggcacccagggcgaatggggcccagggcagaccttcagggccagagccctggcggaggagaggccctttgccaggagcacagcagcagctcgcctacctctgagcccaggccccctccctccctcagccccccagtcctccctccatcttccctggggttctcctcctctcccagggcctccttgctccttcgttcacagctgggggtccccgattccaatgctgttttttggggagtggtttccaggagctgcctggtgtctgctgtaaatgtttgtctactgcacaagcctcggcctgcccctgagccaggctcggtaccgatgcgtgggctgggctaggtccctctgtccatctgggcctttgtatgagctgcattgcccttgctcaccctgaccaagcacacgcctcagaggggccctcagcctctcctgaagccctcttgtggcaagaactgtggaccatgccagtcccgtctggtttccatcccaccactccaaggactgagactgacctcctctggtgacactggcctagagcctgacactctcctaagaggttctctccaagcccccaaatagctccaggcgccctcggccgcccatcatggttaattctgtccaacaaacacacacgggtagattgctggcctgttgtaggtggtagggacacagatgaccgacctggtcactcctcctgccaacattcagtctggtatgtgaggcgtgcgtgaagcaagaactcctggagctacagggacagggagccatcattcctgcctgggaatcctggaagacttcctgcaggagtcagcgttcaatcttgaccttgaagatgggaaggatgttctttttacgtaccaattcttttgtcttttgatattaaaaagaagtacatgttcattgtagagaatttggaaactgtagaagagaatcaagaagaaaaataaaaatcagctgttgtaatcacctagcaaa

SEQ ID NO: 436339 - DNA, 3876 bp, Homo sapiens
gcccggcgctgagtcatgggcatcccccaggatcactgcctcagcgctctcagccctgccccctcctggtctccctctgagaaatccatgactcacatatatcgtccgtcatccccagtcaagctcagggaggagggaggagcccagctggggcaggagaggggtgtctccccaccaaacaaacccggtccctccctctccgcactagctgtctgccctgccctgccgtaggagatgggctgggagcctcccacgctctccagctcactcggcaggcagcggggaccagggctggcaggttaagcctctgggggtggatcctgaaaggtggtccagccgcctggccctgcgtgggaccctccacctggcagcaggtggtgacttccaagagtgactccgtcggaggaaaatgactccccagtcgctgctgcagacgacactgttcctgctgagtctgctcttcctggtccaagccagcggaaccagacacacaggagcagcctccactacaaacccacaccagacctgcgcatctccatcgagaactccgaagaggccctcacagtccatgcccctttccctgcagcccaccctgcttcccgatccttccctgaccccaggggcctctaccacttctgcctctactggaaccgacatgctgggagattacatcttctctatggcaagcgtgacttcttgctgagtgacaaagcctctagcctcctctgcttccagcaccaggaggagagcctggctcagggccccccgctgttagccacttctgtcacctcctggtggagccctcagaacatcagcctgcccagtgccgccagcttcaccttctccttccacagtcctccccacacggccgctcacaatgcctcggtggacatgtgcgagctcaaaagggacctccagctgctcagccagttcctgaagcatccccagaaggcctcaaggaggccctcggctgcccccgccagccagcagttgcagagcctggagtcgaaactgacctctgtgagattcatgggggacatggtgtccttcgaggaggaccggatcaacgccacggtgtggaagctccagcccacagccggcctccaggacctgcacatccactcccggcaggaggaggagcagagcgagatcatggagtactcggtgctgctgcctcgaacactcttccagaggacgaaaggccggagcggggaggctgagaagagactcctcctggtggacttcagcagccaagccctgttccaggacaagaattccagccaagtcctgggtgagaaggtcttggggattgtggtacagaacaccaaagtagccaacctcacggagcccgtggtgctcaccttccagcaccagctacagccgaagaatgtgactctgcaatgtgtgttctgggttgaagaccccacattgagcagcccggggcattggagcagtgctgggtgtgagaccgtcaggagagaaacccaaacatcctgcttctgcaaccacttgacctactttgcagtgctgatggtctcctcggtggaggtggacgccgtgcacaagcactacctgagcctcctctcctacgtgggctgtgtcgtctctgccctggcctgccttgtcaccattgccgcctacctctgctccaggaggaaacctcgggactacaccatcaaggtgcacatgaacctgctgctggccgtcttcctgctggacacgagcttcctgctcagcgagccggtggccctgacaggctctgaggctggctgccgagccagtgccatcttcctgcacttctccctgctcacctgcctttcctggatgggcctcgaggggtacaacctctaccgactcgtggtggaggtctttggcacctatgtccctggctacctactcaagctgagcgccatgggctggggcttccccatctttctggtgacgctggtggccctggtggatgtggacaactatggccccatcatcttggctgtgcataggactccagagggcgtcatctacccttccatgtgctggatccgggactccctggtcagctacatcaccaacctgggcctcttcagcctggtgtttctgttcaacatggccatgctagccaccatggtggtgcagatcctgcggctgcgcccccacacccaaaagtggtcacatgtgctgacactgctgggcctcagcctggtccttggcctgccctgggccttgatcttcttctcctttgcttctggcaccttccagcttgtcgtcctctaccttttcagcatcatcacctccttccaaggcttcctcatcttcatctggtactggtccatgcggctgcaggcccggggtggcccctcccctctgaagagcaactcagacagcgccaggctccccatcagctcgggcagcacctcgtccagccgcatctaggcctccagcccacctgcccatgtgatgaagcagagatgcggcctcgtcgcacactgcctgtggcccccgagcccggcccagccccaggccagtcagccgcagactttggaaagcccaacgaccatggagagatgggccgttgccatggtggacggactcccgggctgggcttttgaattggccttggggactactcggctctcactcagctcccacgggactcagaagtgcgccgccatgctgcctagggtactgtccccacatctgtcccaacccagctggaggcctggtctctccttacaacccctgggcccagccctcattgctgggggccaggccttggatcttgagggtctggcacatccttaatcctgtgcccctgcctgggacagaaatgtggctccagttgctctgtctctcgtggtcaccctgagggcactctgcatcctctgtcattttaacctcaggtggcacccagggcgaatggggcccagggcagaccttcagggccagagccctggcggaggagaggccctttgccaggagcacagcagcagctcgcctacctctgagcccaggccccctccctccctcagccccccagtcctccctccatcttccctggggttctcctcctctcccagggcctccttgctccttcgttcacagctgggggtccccgattccaatgctgttttttggggagtggtttccaggagctgcctggtgtctgctgtaaatgtttgtctactgcacaagcctcggcctgcccctgagccaggctcggtaccgatgcgtgggctgggctaggtccctctgtccatctgggcctttgtatgagctgcattgcccttgctcaccctgaccaagcacacgcctcagaggggccctcagcctctcctgaagccctcttgtggcaagaactgtggaccatgccagtcccgtctggtttccatcccaccactccaaggactgagactgacctcctctggtgacactggcctagagcctgacactctcctaagaggttctctccaagcccccaaatagctccaggcgccctcggccgcccatcatggttaattctgtccaacaaacacacacgggtagattgctggcctgttgtaggtggtagggacacagatgaccgacctggtcactcctcctgccaacattcagtctggtatgtgaggcgtgcgtgaagcaagaactcctggagctacagggacagggagccatcattcctgcctgggaatcctggaagacttcctgcaggagtcagcgttcaatcttgaccttgaagatgggaaggatgttctttttacgtaccaattcttttgtcttttgatattaaaaagaagtacatgttcattgtagagaatttggaaactgtagaagagaatcaagaagaaaaataaaaatcagctgttgtaatcacctagcaaa

SEQ ID NO: 436340 - DNA, 4206 bp, Homo sapiens
gtttatttcctttcacagaggaggaaactggggcacagagaggatgcccaaagctgcacagctagccaatgggagagccaggatttgaacccagcagctgattggagtggggtaggggtgaggggcggagtatgagaggtcaaaggtcaggaaagcagtggggttgactctgaggtccagaagctgcatcttcccccttgagtgtgacaggtacatgtggccactgccattcagcaccattaaatgctgaatggtggccaggaagggaggagcatcagaaggagcttgaaggtttactggggggttttcatgtctttccagcacctcaagtttgaggcagggctttcaggggtggggggcacagcactttgattgtgtcagtgtaacaggctaatgattatgtccagtgcaacaggcaggcccaggcccgtcagtggtggggggttccccacaccccaggctgggattctgccccgcaacctgggaggatttagggcaaagttgatcctagttgcaaattggcattctgaagaccagactgaacttggtcttgtttggcctgtagagggtttttaaaaaacatggaccagggatttcaaatcacctaaaacccaggctttctcggttatgcattcaaaagatggagctacccagggcctgccttcctcagtggcacagaaagtataccctccaacccccactgtttgtcttcctcatctgagtcccagctaatccctggagacaccttagtcggccgccttagtaggccgcccacgctactgggcagaggggcccgagcctggagtcagggaggctggtgggtgtggagtcccaggaaccaccaccaagccccgcacatccctcctaaggaggcctggctgggccctctctgctccgtgtgtgtagccgaaggtgtctgcggagggtgctgagcaaggcacatcccaccccatcccgctggggctggcattgctggcgggttctgtaagacacaacccccacgggttggcctcatctgagtggccttggcagagtccactctgcttcttgaagcctcagtttcccctttgtaaagtaaagatcgaggcattcagagtcatgtcagggtggtagggggcagaatgggagggtcctgggacctgaatcggcagcctcggcgggggcctgtccacccctcccccaggtcctccccacacggccgctcacaatgcctcggtggacatgtgcgagctcaaaagggacctccagctgctcagccagttcctgaagcatccccagaaggcctcaaggaggccctcggctgcccccgccagccagcagttgcagagcctggagtcgaaactgacctctgtgagattcatgggggacatggtgtccttcgaggaggaccggatcaacgccacggtgtggaagctccagcccacagccggcctccaggacctgcacatccactcccggcaggaggaggagcagagcgagatcatggagtactcggtgctgctgcctcgaacactcttccagaggacgaaaggccggagcggggaggctgagaagagactcctcctggtggacttcagcagccaagccctgttccaggacaagaattccagccaagtcctgggtgagaaggtcttggggattgtggtacagaacaccaaagtagccaacctcacggagcccgtggtgctcaccttccagcaccagctacagccgaagaatgtgactctgcaatgtgtgttctgggttgaagaccccacattgagcagcccggggcattggagcagtgctgggtgtgagaccgtcaggagagaaacccaaacatcctgcttctgcaaccacttgacctactttgcagtgctgatggtctcctcggtggaggtggacgccgtgcacaagcactacctgagcctcctctcctacgtgggctgtgtcgtctctgccctggcctgccttgtcaccattgccgcctacctctgctccaggaggaaacctcgggactacaccatcaaggtgcacatgaacctgctgctggccgtcttcctgctggacacgagcttcctgctcagcgagccggtggccctgacaggctctgaggctggctgccgagccagtgccatcttcctgcacttctccctgctcacctgcctttcctggatgggcctcgaggggtacaacctctaccgactcgtggtggaggtctttggcacctatgtccctggctacctactcaagctgagcgccatgggctggggcttccccatctttctggtgacgctggtggccctggtggatgtggacaactatggccccatcatcttggctgtgcataggactccagagggcgtcatctacccttccatgtgctggatccgggactccctggtcagctacatcaccaacctgggcctcttcagcctggtgtttctgttcaacatggccatgctagccaccatggtggtgcagatcctgcggctgcgcccccacacccaaaagtggtcacatgtgctgacactgctgggcctcagcctggtccttggcctgccctgggccttgatcttcttctcctttgcttctggcaccttccagcttgtcgtcctctaccttttcagcatcatcacctccttccaaggcttcctcatcttcatctggtactggtccatgcggctgcaggcccggggtggcccctcccctctgaagagcaactcagacagcgccaggctccccatcagctcgggcagcacctcgtccagccgcatctaggcctccagcccacctgcccatgtgatgaagcagagatgcggcctcgtcgcacactgcctgtggcccccgagcccggcccagccccaggccagtcagccgcagactttggaaagcccaacgaccatggagagatgggccgttgccatggtggacggactcccgggctgggcttttgaattggccttggggactactcggctctcactcagctcccacgggactcagaagtgcgccgccatgctgcctagggtactgtccccacatctgtcccaacccagctggaggcctggtctctccttacaacccctgggcccagccctcattgctgggggccaggccttggatcttgagggtctggcacatccttaatcctgtgcccctgcctgggacagaaatgtggctccagttgctctgtctctcgtggtcaccctgagggcactctgcatcctctgtcattttaacctcaggtggcacccagggcgaatggggcccagggcagaccttcagggccagagccctggcggaggagaggccctttgccaggagcacagcagcagctcgcctacctctgagcccaggccccctccctccctcagccccccagtcctccctccatcttccctggggttctcctcctctcccagggcctccttgctccttcgttcacagctgggggtccccgattccaatgctgttttttggggagtggtttccaggagctgcctggtgtctgctgtaaatgtttgtctactgcacaagcctcggcctgcccctgagccaggctcggtaccgatgcgtgggctgggctaggtccctctgtccatctgggcctttgtatgagctgcattgcccttgctcaccctgaccaagcacacgcctcagaggggccctcagcctctcctgaagccctcttgtggcaagaactgtggaccatgccagtcccgtctggtttccatcccaccactccaaggactgagactgacctcctctggtgacactggcctagagcctgacactctcctaagaggttctctccaagcccccaaatagctccaggcgccctcggccgcccatcatggttaattctgtccaacaaacacacacgggtagattgctggcctgttgtaggtggtagggacacagatgaccgacctggtcactcctcctgccaacattcagtctggtatgtgaggcgtgcgtgaagcaagaactcctggagctacagggacagggagccatcattcctgcctgggaatcctggaagacttcctgcaggagtcagcgttcaatcttgaccttgaagatgggaaggatgttctttttacgtaccaattcttttgtcttttgatattaaaaagaagtacatgttcattgtagagaatttggaaactgtagaagagaatcaagaagaaaaataaaaatcagctgttgtaatcacctagcaaa

SEQ ID NO: 436341 - DNA, 2607 bp, Homo sapiens
ggacgcgtgggtcgacggacgcgtgggtcgacccacgcgtccgcggtacagaacaccaaagtagccaacctcacggagcccgtggtgctcaccttccagcaccagctacagccgaagaatgtgactctgcaatgtgtgttctgggttgaagaccccacattgagcagcccggggcattggagcagtgctgggtgtgagaccgtcaggagagaaacccaaacatcctgcttctgcaaccacttgacctactttgcagtgctgatggtctcctcggtggaggtggacgccgtgcacaagcactacctgagcctcctctcctacgtgggctgtgtcgtctctgccctggcctgccttgtcaccattgccgcctacctctgctccaggaggaaacctcgggactacaccatcaaggtgcacatgaacctgctgctggccgtcttcctgctggacacgagcttcctgctcagcgagccggtggccctgacaggctctgaggctggctgccgagccagtgccatcttcctgcacttctccctgctcacctgcctttcctggatgggcctcgaggggtacaacctctaccgactcgtggtggaggtctttggcacctatgtccctggctacctactcaagctgagcgccatgggctggggcttccccatctttctggtgacgctggtggccctggtggatgtggacaactatggccccatcatcttggctgtgcataggactccagagggcgtcatctacccttccatgtgctggatccgggactccctggtcagctacatcaccaacctgggcctcttcagcctggtgtttctgttcaacatggccatgctagccaccatggtggtgcagatcctgcggctgcgcccccacacccaaaagtggtcacatgtgctgacactgctgggcctcagcctggtccttggcctgccctgggccttgatcttcttctcctttgcttctggcaccttccagcttgtcgtcctctaccttttcagcatcatcacctccttccaaggcttcctcatcttcatctggtactggtccatgcggctgcaggcccggggtggcccctcccctctgaagagcaactcagacagcgccaggctccccatcagctcgggcagcacctcgtccagccgcatctaggcctccagcccacctgcccatgtgatgaagcagagatgcggcctcgtcgcacactgcctgtggcccccgagcccggcccagccccaggccagtcagccgcagactttggaaagcccaacgaccatggagagatgggccgttgccatggtggacggactcccgggctgggcttttgaattggccttggggactactcggctctcactcagctcccacgggactcagaagtgcgccgccatgctgcctagggtactgtccccacatctgtcccaacccagctggaggcctggtctctccttacaacccctgggcccagccctcattgctgggggccaggccttggatcttgagggtctggcacatccttaatcctgtgcccctgcctgggacagaaatgtggctccagttgctctgtctctcgtggtcaccctgagggcactctgcatcctctgtcattttaacctcaggtggcacccagggcgaatggggcccagggcagaccttcagggccagagccctggcggaggagaggccctttgccaggagcacagcagcagctcgcctacctctgagcccaggccccctccctccctcagccccccagtcctccctccatcttccctggggttctcctcctctcccagggcctccttgctccttcgttcacagctgggggtccccgattccaatgctgttttttggggagtggtttccaggagctgcctggtgtctgctgtaaatgtttgtctactgcacaagcctcggcctgcccctgagccaggctcggtaccgatgcgtgggctgggctaggtccctctgtccatctgggcctttgtatgagctgcattgcccttgctcaccctgaccaagcacacgcctcagaggggccctcagcctctcctgaagccctcttgtggcaagaactgtggaccatgccagtcccgtctggtttccatcccaccactccaaggactgagactgacctcctctggtgacactggcctagagcctgacactctcctaagaggttctctccaagcccccaaatagctccaggcgccctcggccgcccatcatggttaattctgtccaacaaacacacacgggtagattgctggcctgttgtaggtggtagggacacagatgaccgacctggtcactcctcctgccaacattcagtctggtatgtgaggcgtgcgtgaagcaagaactcctggagctacagggacagggagccatcattcctgcctgggaatcctggaagacttcctgcaggagtcagcgttcaatcttgaccttgaagatgggaaggatgttctttttacgtaccaattcttttgtcttttgatattaaaaagaagtacatgttcattgtagagaatttggaaactgtagaagagaatcaagaagaaaaataaaaatcagctgttgtaatcacctagcaaa

SEQ ID NO: 436342 - DNA, 2681 bp, Homo sapiens
gcccggcgctgagtcatgggcatcccccaggatcactgcctcagcgctctcagccctgccccctcctggtctccctctgagaaatccatgactcacatatatcgtccgtcatccccagtcaagctcagggaggagggaggagcccagctggggcaggagaggggtgtctccccaccaaacaaacccggtccctccctctccgcactagctgtctgccctgccctgccgtaggagatgggctgggagcctcccacgctctccagctcactcggcaggcagcggggaccagggctggcaggttaagcctctgggggtggatcctgaaaggtggtccagccgcctggccctgcgtgggaccctccacctggcagcaggtacccaaacaagggctggacagcagggtctcgctctgtcacacaggctggagtgcagtggtgtgatcttggctcatcgtaacctccacctcccgggttcaagtgattctcatgcctcagcctcccgagtagctgggattacagctggacacgagcttcctgctcagcgagccggtggccctgacaggctctgaggctggctgccgagccagtgccatcttcctgcacttctccctgctcacctgcctttcctggatgggcctcgaggggtacaacctctaccgactcgtggtggaggtctttggcacctatgtccctggctacctactcaagctgagcgccatgggctggggcttccccatctttctggtgacgctggtggccctggtggatgtggacaactatggccccatcatcttggctgtgcataggactccagagggcgtcatctacccttccatgtgctggatccgggactccctggtcagctacatcaccaacctgggcctcttcagcctggtgtttctgttcaacatggccatgctagccaccatggtggtgcagatcctgcggctgcgcccccacacccaaaagtggtcacatgtgctgacactgctgggcctcagcctggtccttggcctgccctgggccttgatcttcttctcctttgcttctggcaccttccagcttgtcgtcctctaccttttcagcatcatcacctccttccaaggcttcctcatcttcatctggtactggtccatgcggctgcaggcccggggtggcccctcccctctgaagagcaactcagacagcgccaggctccccatcagctcgggcagcacctcgtccagccgcatctaggcctccagcccacctgcccatgtgatgaagcagagatgcggcctcgtcgcacactgcctgtggcccccgagcccggcccagccccaggccagtcagccgcagactttggaaagcccaacgaccatggagagatgggccgttgccatggtggacggactcccgggctgggcttttgaattggccttggggactactcggctctcactcagctcccacgggactcagaagtgcgccgccatgctgcctagggtactgtccccacatctgtcccaacccagctggaggcctggtctctccttacaacccctgggcccagccctcattgctgggggccaggccttggatcttgagggtctggcacatccttaatcctgtgcccctgcctgggacagaaatgtggctccagttgctctgtctctcgtggtcaccctgagggcactctgcatcctctgtcattttaacctcaggtggcacccagggcgaatggggcccagggcagaccttcagggccagagccctggcggaggagaggccctttgccaggagcacagcagcagctcgcctacctctgagcccaggccccctccctccctcagccccccagtcctccctccatcttccctggggttctcctcctctcccagggcctccttgctccttcgttcacagctgggggtccccgattccaatgctgttttttggggagtggtttccaggagctgcctggtgtctgctgtaaatgtttgtctactgcacaagcctcggcctgcccctgagccaggctcggtaccgatgcgtgggctgggctaggtccctctgtccatctgggcctttgtatgagctgcattgcccttgctcaccctgaccaagcacacgcctcagaggggccctcagcctctcctgaagccctcttgtggcaagaactgtggaccatgccagtcccgtctggtttccatcccaccactccaaggactgagactgacctcctctggtgacactggcctagagcctgacactctcctaagaggttctctccaagcccccaaatagctccaggcgccctcggccgcccatcatggttaattctgtccaacaaacacacacgggtagattgctggcctgttgtaggtggtagggacacagatgaccgacctggtcactcctcctgccaacattcagtctggtatgtgaggcgtgcgtgaagcaagaactcctggagctacagggacagggagccatcattcctgcctgggaatcctggaagacttcctgcaggagtcagcgttcaatcttgaccttgaagatgggaaggatgttctttttacgtaccaattcttttgtcttttgatattaaaaagaagtacatgttcattgtagagaatttggaaactgtagaagagaatcaagaagaaaaataaaaatcagctgttgtaatcacctagcaaa

SEQ ID NO: 436343 - DNA, 3902 bp, Homo sapiens
gcccggcgctgagtcatgggcatcccccaggatcactgcctcagcgctctcagccctgccccctcctggtctccctctgagaaatccatgactcacatatatcgtccgtcatccccagtcaagctcagggaggagggaggagcccagctggggcaggagaggggtgtctccccaccaaacaaacccggtccctccctctccgcactagctgtctgccctgccctgccgtaggagatgggctgggagcctcccacgctctccagctcactcggcaggcagcggggaccagggctggcaggttaagcctctgggggtggatcctgaaaggtggtccagccgcctggccctgcgtgggaccctccacctggcagcagggtctcgctctgtcacacaggctggagtgcagtggtgtgatcttggctcatcgtaacctccacctcccgggttcaagtgattctcatgcctcagcctcccgagtagctgggattacaggtggtgacttccaagagtgactccgtcggaggaaaatgactccccagtcgctgctgcagacgacactgttcctgctgagtctgctcttcctggtccaaggtgcccacggcaggggccacagggaagactttcgcttctgcagccagcggaaccagacacacaggagcagcctccactacaaacccacaccagacctgcgcatctccatcgagaactccgaagaggccctcacagtccatgcccctttccctgcagcccaccctgcttcccgatccttccctgaccccaggggcctctaccacttctgcctctactggaaccgacatgctgggagattacatcttctctatggcaagcgtgacttcttgctgagtgacaaagcctctagcctcctctgcttccagcaccaggaggagagcctggctcagggccccccgctgttagccacttctgtcacctcctggtggagccctcagaacatcagcctgcccagtgccgccagcttcaccttctccttccacagtcctccccacacggccgctcacaatgcctcggtggacatgtgcgagctcaaaagggacctccagctgctcagccagttcctgaagcatccccagaaggcctcaaggaggccctcggctgcccccgccagccagcagttgcagagcctggagtcgaaactgacctctgtgagattcatgggggacatggtgtccttcgaggaggaccggatcaacgccacggtgtggaagctccagcccacagccggcctccaggacctgcacatccactcccggcaggaggaggagcagagcgagatcatggagtactcggtgctgctgcctcgaacactcttccagaggacgaaaggccggagcggggaggctgagaagagactcctcctggtggacttcagcagccaagccctgttccaggacaagaattccagccaagtcctgggtgagaaggtcttggggattgtggtacagaacaccaaagtagccaacctcacggagcccgtggtgctcaccttccagcaccagctacagccgaagaatgtgactctgcaatgtgtgttctgggttgaagaccccacattgagcagcccggggcattggagcagtgctgggtgtgagaccgtcaggagagaaacccaaacatcctgcttctgcaaccacttgacctactttgcagtgctgatggtctcctcggtggaggtggacgccgtgcacaagcactacctgagcctcctctcctacgtgggctgtgtcgtctctgccctggcctgccttgtcaccattgccgcctacctctgctccagggtgcccctgccgtgcaggaggaaacctcgggactacaccatcaaggtgcacatgaacctgctgctggccgtcttcctgctggacacgagcttcctgctcagcgagccggtggccctgacaggctctgaggctggctgccgagccagtgccatcttcctgcacttctccctgctcacctgcctttcctggatgggcctcgaggggtacaacctctaccgactcgtggtggaggtctttggcacctatgtccctggctacctactcaagctgagcgccatgggctggggcttccccatctttctggtgacgctggtggccctggtggatgtggacaactatggccccatcatcttggctgtgcataggactccagagggcgtcatctacccttccatgtgctggatccgggactccctggtcagctacatcaccaacctgggcctcttcagcctggtgtttctgttcaacatggccatgctagccaccatggtggtgcagatcctgcggctgcgcccccacacccaaaagtggtcacatgtgctgacactgctgggcctcagcctggtccttggcctgccctgggccttgatcttcttctcctttgcttctggcaccttccagcttgtcgtcctctaccttttcagcatcatcacctccttccaaggcttcctcatcttcatctggtactggtccatgcggctgcaggcccggggtggcccctcccctctgaagagcaactcagacagcgccaggctccccatcagctcgggcagcacctcgtccagccgcatctaggcctccagcccacctgcccatgtgatgaagcagagatgcggcctcgtcgcacactgcctgtggcccccgagcccggcccagccccaggccagtcagccgcagactttggaaagcccaacgaccatggagagatgggccgttgccatggtggacggactcccgggctgggcttttgaattggccttggggactactcggctctcactcagctcccacgggactcagaagtgcgccgccatgctgcctagggtactgtccccacatctgtcccaacccagctggaggcctggtctctccttacaacccctgggcccagccctcattgctgggggccaggccttggatcttgagggtctggcacatccttaatcctgtgcccctgcctgggacagaaatgtggctccagttgctctgtctctcgtggtcaccctgagggcactctgcatcctctgtcattttaacctcaggtggcacccagggcgaatggggcccagggcagaccttcagggccagagccctggcggaggagaggccctttgccaggagcacagcagcagctcgcctacctctgagcccaggccccctccctccctcagccccccagtcctccctccatcttccctggggttctcctcctctcccagggcctccttgctccttcgttcacagctgggggtccccgattccaatgctgttttttggggagtggtttccaggagctgcctggtgtctgctgtaaatgtttgtctactgcacaagcctcggcctgcccctgagccaggctcggtaccgatgcgtgggctgggctaggtccctctgtccatctgggcctttgtatgagctgcattgcccttgctcaccctgaccaagcacacgcctcagaggggccctcagcctctcctgaagccctcttgtggcaagaactgtggaccatgccagtcccgtctggtttccatcccaccactccaaggactgagactgacctcctctggtgacactggcctagagcctgacactctcctaagaggttctctccaagcccccaaatagctccaggcgccctcggccgcccatcatggttaattctgtccaacaaacacacacgggtagattgctggcctgttgtaggtggtagggacacagatgaccgacctggtcactcctcctgccaacattcagtctggtatgtgaggcgtgcgtgaagcaagaactcctgcaggaagtcttccaggattcccaggcaggaatgatggctccctgtccctgtagctccgtcgacggcctgcgaattta

SEQ ID NO: 436344 - DNA, 3816 bp, Homo sapiens
gcccggcgctgagtcatgggcatcccccaggatcactgcctcagcgctctcagccctgccccctcctggtctccctctgagaaatccatgactcacatatatcgtccgtcatccccagtcaagctcagggaggagggaggagcccagctggggcaggagaggggtgtctccccaccaaacaaacccggtccctccctctccgcactagctgtctgccctgccctgccgtaggagatgggctgggagcctcccacgctctccagctcactcggcaggcagcggggaccagggctggcaggttaagcctctgggggtggatcctgaaaggtggtccagccgcctggccctgcgtgggaccctccacctggcagcagggtctcgctctgtcacacaggctggagtgcagtggtgtgatcttggctcatcgtaacctccacctcccgggttcaagtgattctcatgcctcagcctcccgagtagctgggattacaggtggtgacttccaagagtgactccgtcggaggaaaatgactccccagtcgctgctgcagacgacactgttcctgctgagtctgctcttcctggtccaaggtgcccacggcaggggccacagggaagactttcgcttctgcagccagcggaaccagacacacaggagcagcctccactacaaacccacaccagacctgcgcatctccatcgagaactccgaagaggccctcacagtccatgcccctttccctgcagcccaccctgcttcccgatccttccctgaccccaggggcctctaccacttctgcctctactggaaccgacatgctgggagattacatcttctctatggcaagcgtgacttcttgctgagtgacaaagcctctagcctcctctgcttccagcaccaggaggagagcctggctcagggccccccgctgttagccacttctgtcacctcctggtggagccctcagaacatcagcctgcccagtgccgccagcttcaccttctccttccacagtcctccccacacggccgctcacaatgcctcggtggacatgtgcgagctcaaaagggacctccagctgctcagccagttcctgaagcatccccagaaggcctcaaggaggccctcggctgcccccgccagccagcagttgcagagcctggagtcgaaactgacctctgtgagattcatgggggacatggtgtccttcgaggaggaccggatcaacgccacggtgtggaagctccagcccacagccggcctccaggacctgcacatccactcccggcaggaggaggagcagagcgagatcatggagtactcggtgctgctgcctcgaacactcttccagaggacgaaaggccggagcggggaggctgagaagagactcctcctggtggacttcagcagccaagccctgttccaggacaagaattccagccaagtcctgggtgagaaggtcttggggattgtggtacagaacaccaaagtagccaacctcacggagcccgtggtgctcaccttccagcaccagctacagccgaagaatgtgactctgcaatgtgtgttctgggttgaagaccccacattgagcagcccggggcattggagcagtgctgggtgtgagaccgtcaggagagaaacccaaacatcctgcttctgcaaccacttgacctactttgcagtgctgatggtctcctcggtggaggtggacgccgtgcacaagcactacctgagcctcctctcctacgtgggctgtgtcgtctctgccctggcctgccttgtcaccattgccgcctacctctgctccagggtgcccctgccgtgcaggaggaaacctcgggactacaccatcaaggtgcacatgaacctgctgctggccgtcttcctgctggacacgagcttcctgctcagcgagccggtggccctgacaggctctgaggctggctgccgagccagtgccatcttcctgcacttctccctgctcacctgcctttcctggatgggcctcgaggggtacaacctctaccgactcgtggtggaggtctttggcacctatgtccctggctacctactcaagctgagcgccatgggctggggcttccccatctttctggtgacgctggtggccctggtggatgtggacaactatggccccatcatcttggctgtgcataggactccagagggcgtcatctacccttccatgtgctggatccgggactccctggtcagctacatcaccaacctgggcctcttcagcctggtgtttctgttcaacatggccatgctagccaccatggtggtgcagatcctgcggctgcgcccccacacccaaaagtggtcacatgtgctgacactgctgggcctcagcctggtccttggcctgccctgggccttgatcttcttctcctttgcttctggcaccttccagcttgtcgtcctctaccttttcagcatcatcacctccttccaaggcttcctcatcttcatctggtactggtccatgcggctgcaggcccggggtggcccctcccctctgaagagcaactcagacagcgccaggctccccatcagctcgggcagcacctcgtccagccgcatctaggcctccagcccacctgcccatgtgatgaagcagagatgcggcctcgtcgcacactgcctgtggcccccgagcccggcccagccccaggccagtcagccgcagactttggaaagcccaacgaccatggagagatgggccgttgccatggtggacggactcccgggctgggcttttgaattggccttggggactactcggctctcactcagctcccacgggactcagaagtgcgccgccatgctgcctagggtactgtccccacatctgtcccaacccagctggaggcctggtctctccttacaacccctgggcccagccctcattgctgggggccaggccttggatcttgagggtctggcacatccttaatcctgtgcccctgcctgggacagaaatgtggctccagttgctctgtctctcgtggtcaccctgagggcactctgcatcctctgtcattttaacctcaggtggcacccagggcgaatggggcccagggcagaccttcagggccagagccctggcggaggagaggccctttgccaggagcacagcagcagctcgcctacctctgagcccaggccccctccctccctcagccccccagtcctccctccatcttccctggggttctcctcctctcccagggcctccttgctccttcgttcacagctgggggtccccgattccaatgctgttttttggggagtggtttccaggagctgcctggtgtctgctgtaaatgtttgtctactgcacaagcctcggcctgcccctgagccaggctcggtaccgatgcgtgggctgggctaggtccctctgtccatctgggcctttgtatgagctgcattgcccttgctcaccctgaccaagcacacgcctcagaggggccctcagcctctcctgaagccctcttgtggcaagaactgtggaccatgccagtcccgtctggtttccatcccaccactccaaggactgagactgacctcctctggtgacactggcctagagcctgacactctcctaagaggttctctccaagcccccaaatagctccaggcgccctcggccgcccatcatggttaattctgtccaacaaacatttatcagcagacaccaggcagtgtcctggaaaccactcccccaaaaaacagcattggaatcggggaccccccagcttgacgaagagcaagaggacctgggagaggat

SEQ ID NO: 436345 - DNA, 3777 bp, Homo sapiens
gcccggcgctgagtcatgggcatcccccaggatcactgcctcagcgctctcagccctgccccctcctggtctccctctgagaaatccatgactcacatatatcgtccgtcatccccagtcaagctcagggaggagggaggagcccagctggggcaggagaggggtgtctccccaccaaacaaacccggtccctccctctccgcactagctgtctgccctgccctgccgtaggagatgggctgggagcctcccacgctctccagctcactcggcaggcagcggggaccagggctggcaggttaagcctctgggggtggatcctgaaaggtggtccagccgcctggccctgcgtgggaccctccacctggcagcagggtctcgctctgtcacacaggctggagtgcagtggtgtgatcttggctcatcgtaacctccacctcccgggttcaagtgattctcatgcctcagcctcccgagtagctgggattacaggtggtgacttccaagagtgactccgtcggaggaaaatgactccccagtcgctgctgcagacgacactgttcctgctgagtctgctcttcctggtccaaggtgcccacggcaggggccacagggaagactttcgcttctgcagccagcggaaccagacacacaggagcagcctccactacaaacccacaccagacctgcgcatctccatcgagaactccgaagaggccctcacagtccatgcccctttccctgcagcccaccctgcttcccgatccttccctgaccccaggggcctctaccacttctgcctctactggaaccgacatgctgggagattacatcttctctatggcaagcgtgacttcttgctgagtgacaaagcctctagcctcctctgcttccagcaccaggaggagagcctggctcagggccccccgctgttagccacttctgtcacctcctggtggagccctcagaacatcagcctgcccagtgccgccagcttcaccttctccttccacagtcctccccacacggccgctcacaatgcctcggtggacatgtgcgagctcaaaagggacctccagctgctcagccagttcctgaagcatccccagaaggcctcaaggaggccctcggctgcccccgccagccagcagttgcagagcctggagtcgaaactgacctctgtgagattcatgggggacatggtgtccttcgaggaggaccggatcaacgccacggtgtggaagctccagcccacagccggcctccaggacctgcacatccactcccggcaggaggaggagcagagcgagatcatggagtactcggtgctgctgcctcgaacactcttccagaggacgaaaggccggagcggggaggctgagaagagactcctcctggtggacttcagcagccaagccctgttccaggacaagaattccagccaagtcctgggtgagaaggtcttggggattgtggtacagaacaccaaagtagccaacctcacggagcccgtggtgctcaccttccagcaccagctacagccgaagaatgtgactctgcaatgtgtgttctgggttgaagaccccacattgagcagcccggggcattggagcagtgctgggtgtgagaccgtcaggagagaaacccaaacatcctgcttctgcaaccacttgacctactttgcagtgctgatggtctcctcggtggaggtggacgccgtgcacaagcactacctgagcctcctctcctacgtgggctgtgtcgtctctgccctggcctgccttgtcaccattgccgcctacctctgctccagggtgcccctgccgtgcaggaggaaacctcgggactacaccatcaaggtgcacatgaacctgctgctggccgtcttcctgctggacacgagcttcctgctcagcgagccggtggccctgacaggctctgaggctggctgccgagccagtgccatcttcctgcacttctccctgctcacctgcctttcctggatgggcctcgaggggtacaacctctaccgactcgtggtggaggtctttggcacctatgtccctggctacctactcaagctgagcgccatgggctggggcttccccatctttctggtgacgctggtggccctggtggatgtggacaactatggccccatcatcttggctgtgcataggactccagagggcgtcatctacccttccatgtgctggatccgggactccctggtcagctacatcaccaacctgggcctcttcagcctggtgtttctgttcaacatggccatgctagccaccatggtggtgcagatcctgcggctgcgcccccacacccaaaagtggtcacatgtgctgacactgctgggcctcagcctggtccttggcctgccctgggccttgatcttcttctcctttgcttctggcaccttccagcttgtcgtcctctaccttttcagcatcatcacctccttccaaggcttcctcatcttcatctggtactggtccatgcggctgcaggcccggggtggcccctcccctctgaagagcaactcagacagcgccaggctccccatcagctcgggcagcacctcgtccagccgcatctaggcctccagcccacctgcccatgtgatgaagcagagatgcggcctcgtcgcacactgcctgtggcccccgagcccggcccagccccaggccagtcagccgcagactttggaaagcccaacgaccatggagagatgggccgttgccatggtggacggactcccgggctgggcttttgaattggccttggggactactcggctctcactcagctcccacgggactcagaagtgcgccgccatgctgcctagggtactgtccccacatctgtcccaacccagctggaggcctggtctctccttacaacccctgggcccagccctcattgctgggggccaggccttggatcttgagggtctggcacatccttaatcctgtgcccctgcctgggacagaaatgtggctccagttgctctgtctctcgtggtcaccctgagggcactctgcatcctctgtcattttaacctcaggtggcacccagggcgaatggggcccagggcagaccttcagggccagagccctggcggaggagaggccctttgccaggagcacagcagcagctcgcctacctctgagcccaggccccctccctccctcagccccccagtcctccctccatcttccctggggttctcctcctctcccagggcctccttgctccttcgttcacagctgggggtccccgattccaatgctgttttttggggagtggtttccaggagctgcctggtgtctgctgtaaatgtttgtctactgcacaagcctcggcctgcccctgagccaggctcggtaccgatgcgtgggctgggctaggtccctctgtccatctgggcctttgtatgagctgcattgcccttgctcaccctgaccaagcacacgcctcagaggggccctcagcctctcctgaagccctcttgtggcaagaactgtggaccatgccagtcccgtctggtttccatcccatcattcctgcctgggaatcctggaagacttcctgcaggagtcagcgttcaatcttgaccttgaagatgggaaggatgttctttttacgtaccaattcttttgtcttttgatattaaaaagaagtacatgttcattgtagagaatttggaaactgtagaagagaatcaagaagaaaaataaaaatcagctgttgtaatcacctagcaaa

SEQ ID NO: 436346 - DNA, 1224 bp, Homo sapiens
gtcccaacccagctgggacagatgtgggtactgtccccacatctgtcccaacccagctggaggcctggtctctccttacaacccctgggcccagccctcattgctgggggccaggccttggatcttgagggtctggcacatccttaatcctgtgcccctgcctgggacagaaatgtggctccagttgctctgtctctcgtggtcaccctgagggcactctgcatcctctgtcattttaacctcaggtggcacccagggcgaatggggcccagggcagaccttcagggccagagccctggcggaggagaggccctttgccaggagcacagcagcagctcgcctacctctgagcccaggccccctccctccctcagccccccagtcctccctccatcttccctggggttctcctcctctcccagggcctccttgctccttcgttcacagctgggggtccccgattccaatgctgttttttggggagtggtttccaggagctgcctggtgtctgctgtaaatgtttgtctactgcacaagcctcggcctgcccctgagccaggctcggtaccgatgcgtgggctgggctaggtccctctgtccatctgggcctttgtatgagctgcattgcccttgctcaccctgaccaagcacacgcctcagaggggccctcagcctctcctgaagccctcttgtggcaagaactgtggaccatgccagtcccgtctggtttccatcccaccactccaaggactgagactgacctcctctggtgacactggcctagagcctgacactctcctaagaggttctctccaagcccccaaatagctccaggcgccctcggccgcccatcatggttaattctgtccaacaaacacacacgggtagattgctggcctgttgtaggtggtagggacacagatgaccgacctggtcactcctcctgccaacattcagtctggtatgtgaggcgtgcgtgaagcaagaactcctggagctacagggacagggagccatcattcctgcctgggaatcctggaagacttcctgcaggagtcagcgttcaatcttgaccttgaagatgggaaggatgttctttttacgtaccaattcttttgtcttttgatattaaaaagaagtacatgttcattgtagagaatttggaaactgtagaagagaatcaagaagaaaaataaaaatcagctgttgtaatcacctagcaaa

SEQ ID NO: 436347 - DNA, 581 bp, Homo sapiens
  misc_feature (25)..(25): n is a, c, g, or t
  misc_feature (31)..(31): n is a, c, g, or t
ggagcccatggaatttacgaatatncgagcntcggtacccgccctcttgtggcaagaactgtggaccatgccagtcccgtctggtttccatcccaccactccaaggactgagactgacctcctctggtgacactggcctagagcctgacactctcctaagaggttctctccaagcccccaaatagctccaggcgccctcggccgcccatcatggttaattctgtccaacaaacacacacgggtagattgctggcctgttgtaggtggtagggacacagatgaccgacctggtcactcctcctgccaacattcagtctggtatgtgaggcgtgcgtgaagcaagaactcctggagctacagggacagggagccatcattcctgcctgggaatcctggaagacttcctgcaggagtcagcgttcaatcttgaccttgaagatgggaaggatgttctttttacgtaccaattcttttgtcttttgatattaaaaagaagtacatgttcattgtagagaatttggaaactgtagaagagaatcaagaagaaaaataaaaatcagctgttgtaatcacctagcaaa

SEQ ID NO: 436348 - DNA, 448 bp, Homo sapiens
actgacattactcccgtttggtttcatcccaccactccatgcccccaaatagctccaggcgccctcggccgcccatcatggttaattctgtccaacaaacacacacgggtagattgctggcctgttgtaggtggtagggacacagatgaccgacctggtcactcctcctgccaacattcagtctggtatgtgaggcgtgcgtgaagcaagaactcctggagctacagggacagggagccatcattcctgcctgggaatcctggaagacttcctgcaggagtcagcgttcaatcttgaccttgaagatgggaaggatgttctttttacgtaccaattcttttgtcttttgatattaaaaagaagtacatgttcattgtagagaatttggaaactgtagaagagaatcaagaagaaaaataaaaatcagctgttgtaatcacctagcaaa

SEQ ID NO: 436349 - DNA, 450 bp, Homo sapiens
gcggccgcctactactactaaattcgcggccgcgtcgaccaagcccccaaatagctccaggcgccctcggccgcccatcatggttaattctgtccaacaaacacacacgggtagattgctggcctgttgtaggtggtagggacacagatgaccgacctggtcactcctcctgccaacattcagtctggtatgtgaggcgtgcgtgaagcaagaactcctggagctacagggacagggagccatcattcctgcctgggaatcctggaagacttcctgcaggagtcagcgttcaatcttgaccttgaagatgggaaggatgttctttttacgtaccaattcttttgtcttttgatattaaaaagaagtacatgttcattgtagagaatttggaaactgtagaagagaatcaagaagaaaaataaaaatcagctgttgtaatcacctagcaaa

SEQ ID NO: 436350 - DNA, 1145 bp, Homo sapiens
gcccggcgctgagtcatgggcatcccccaggatcactgcctcagcgctctcagccctgccccctcctggtctccctctgagaaatccatgactcacatatatcgtccgtcatccccagtcaagctcagggaggagggaggagcccagctggggcaggagaggggtgtctccccaccaaacaaacccggtccctccctctccgcactagctgtctgccctgccctgccgtaggagatgggctgggagcctcccacgctctccagctcactcggcaggcagcggggaccagggctggcaggttaagcctctgggggtggatcctgaaaggtggtccagccgcctggccctgcgtgggaccctccacctggcagcagggtctcgctctgtcacacaggctggagtgcagtggtgtgatcttggctcatcgtaacctccacctcccgggttcaagtgattctcatgcctcagcctcccgagtagctgggattacaggtggtgacttccaagagtgactccgtcggaggaaaatgactccccagtcgctgctgcagacgacactgttcctgctgagtctgctcttcctggtccaaggtgcccacggcaggggccacagggaagactttcgcttctgcagccagcggaaccagacacacaggagcagcctccactacaaacccacaccagacctgcgcatctccatcgagaactccgaagaggccctcacagtccatgcccctttccctgcagcccaccctgcttcccgatccttccctgaccccaggggcctctaccacttctgcctctactggaaccgacatgctgggagattacatcttctctatggcaagcgtgacttcttgctgagtgacaaagcctctagcctcctctgcttccagcaccaggaggagagcctggctcagggccccccgctgttagccacttctgtcacctcctggtggagccctcagaacatcagcctgcccagtgccgccagcttcaccttctccttccacagtaaggcaacttccaggcggagggaacaactgggcagtggtctagaggcagggaaggcaaaatgcaaagtggactgggctcacaatatcagatcatgaagactgggctttgctcacaggcactggggagcc

SEQ ID NO: 436351 - DNA, 1087 bp, Homo sapiens
gcccggcgctgagtcatgggcatcccccaggatcactgcctcagcgctctcagccctgccccctcctggtctccctctgagaaatccatgactcacatatatcgtccgtcatccccagtcaagctcagggaggagggaggagcccagctggggcaggagaggggtgtctccccaccaaacaaacccggtccctccctctccgcactagctgtctgccctgccctgccgtaggagatgggctgggagcctcccacgctctccagctcactcggcaggcagcggggaccagggctggcaggttaagcctctgggggtggatcctgaaaggtggtccagccgcctggccctgcgtgggaccctccacctggcagcagggtctcgctctgtcacacaggctggagtgcagtggtgtgatcttggctcatcgtaacctccacctcccgggttcaagtgattctcatgcctcagcctcccgagtagctgggattacaggtggtgacttccaagagtgactccgtcggaggaaaatgactccccagtcgctgctgcagacgacactgttcctgctgagtctgctcttcctggtccaaggtgcccacggcaggggccacagggaagactttcgcttctgcagccagcggaaccagacacacaggagcagcctccactacaaacccacaccagacctgcgcatctccatcgagaactccgaagaggccctcacagtccatgcccctttccctgcagcccaccctgcttcccgatccttccctgaccccaggggcctctaccacttctgcctctactggaaccgacatgctgggagattacatcttctctatggcaagcaactcctggagctacagggacagggagccatcattcctgcctgggaatcctggaagacttcctgcaggagtcagcgttcaatcttgaccttgaagatgggaaggatgttctttttacgtaccaattcttttgtcttttgatattaaaaagaagtacatgttcattgtagagaatttggaaactgtagaagagaatcaagaagaaaaataaaaatcagctgttgtaatcacctagcaaa

SEQ ID NO: 436352 - DNA, 370 bp, Homo sapiens
ccggggtgtgacgtagtccctgcagctgccaacggttgccagggcaacggttgccaggggctgctgtcacctgcgccccttctcccgcgctggcggctggggcttctcagcctctattccctggctgtcccctttgtttgaagctccagtgagggagcagtggctggggtggcccagcttcaaagtctctgtcctcttgaaaaaaggtggtcgggggacattgacccaccagccccgcaggctactgcctgcaaacaagaacccctcatctgccacgcacgttcttaatgtatctatagtctgcctgatgccacaaaggagtccaggtacgattctcccgcctcctctcccctcctccccgtccctttca

SEQ ID NO: 436353 - DNA, 373 bp, Homo sapiens
agaactcctggagctacagggacagggagccatcattcctgcctgggaatcctggaagacttcctgcaggagtcagcgttcaatcttgaccttgaagatgggaaggatgttctttttacgtaccaattcttttgtcttttgatattaaaaagaagtacatgttcattgtagagaatttggaaactgtagaagagaatcaagaagaaaaataaaaatcagctgttgtaatcacctagcaaaaactggcgtaagcattttgggtcatttccttctgagctttttcctgtgcttctattgaaagagtcactgatactaatacaaataccttggggccaatcaggaaacatgaaagagagaagagggctgtgtgtga

SEQ ID NO: 436354 - DNA, 4055 bp, Homo sapiens
gcccggcgctgagtcatgggcatcccccaggatcactgcctcagcgctctcagccctgccccctcctggtctccctctgagaaatccatgactcacatatatcgtccgtcatccccagtcaagctcagggaggagggaggagcccagctggggcaggagaggggtgtctccccaccaaacaaacccggtccctccctctccgcactagctgtctgccctgccctgccgtaggagatgggctgggagcctcccacgctctccagctcactcggcaggcagcggggaccagggctggcaggttaagcctctgggggtggatcctgaaaggtggtccagccgcctggccctgcgtgggaccctccacctggcagcagggtctcgctctgtcacacaggctggagtgcagtggtgtgatcttggctcatcgtaacctccacctcccgggttcaagtgattctcatgcctcagcctcccgagtagctgggattacaggtggtgacttccaagagtgactccgtcggaggaaaatgactccccagtcgctgctgcagacgacactgttcctgctgagtctgctcttcctggtccaaggtgcccacggcaggggccacagggaagactttcgcttctgcagccagcggaaccagacacacaggagcagcctccactacaaacccacaccagacctgcgcatctccatcgagaactccgaagaggccctcacagtccatgcccctttccctgcagcccaccctgcttcccgatccttccctgaccccaggggcctctaccacttctgcctctactggaaccgacatgctgggagattacatcttctctatggcaagcgtgacttcttgctgagtgacaaagcctctagcctcctctgcttccagcaccaggaggagagcctggctcagggccccccgctgttagccacttctgtcacctcctggtggagccctcagaacatcagcctgcccagtgccgccagcttcaccttctccttccacagtcctccccacacggccgctcacaatgcctcggtggacatgtgcgagctcaaaagggacctccagctgctcagccagttcctgaagcatccccagaaggcctcaaggaggccctcggctgcccccgccagccagcagttgcagagcctggagtcgaaactgacctctgtgagattcatgggggacatggtgtccttcgaggaggaccggatcaacgccacggtgtggaagctccagcccacagccggcctccaggacctgcacatccactcccggcaggaggaggagcagagcgagatcatggagtactcggtgctgctgcctcgaacactcttccagaggacgaaaggccggagcggggaggctgagaagagactcctcctggtggacttcagcagccaagccctgttccaggacaagaattccagccaagtcctgggtgagaaggtcttggggattgtggtacagaacaccaaagtagccaacctcacggagcccgtggtgctcaccttccagcaccagctacagccgaagaatgtgactctgcaatgtgtgttctgggttgaagaccccacattgagcagcccggggcattggagcagtgctgggtgtgagaccgtcaggagagaaacccaaacatcctgcttctgcaaccacttgacctactttgcagtgctgatggtctcctcggtggaggtggacgccgtgcacaagcactacctgagcctcctctcctacgtgggctgtgtcgtctctgccctggcctgccttgtcaccattgccgcctacctctgctccagggtgcccctgccgtgcaggaggaaacctcgggactacaccatcaaggtgcacatgaacctgctgctggccgtcttcctgctggacacgagcttcctgctcagcgagccggtggccctgacaggctctgaggctggctgccgagccagtgccatcttcctgcacttctccctgctcacctgcctttcctggatgggcctcgaggggtacaacctctaccgactcgtggtggaggtctttggcacctatgtccctggctacctactcaagctgagcgccatgggctggggcttccccatctttctggtgacgctggtggccctggtggatgtggacaactatggccccatcatcttggctgtgcataggactccagagggcgtcatctacccttccatgtgctggatccgggactccctggtcagctacatcaccaacctgggcctcttcagcctggtgtttctgttcaacatggccatgctagccaccatggtggtgcagatcctgcggctgcgcccccacacccaaaagtggtcacatgtgctgacactgctgggcctcagcctggtccttggcctgccctgggccttgatcttcttctcctttgcttctggcaccttccagcttgtcgtcctctaccttttcagcatcatcacctccttccaaggcttcctcatcttcatctggtactggtccatgcggctgcaggcccggggtggcccctcccctctgaagagcaactcagacagcgccaggctccccatcagctcgggcagcacctcgtccagccgcatctaggcctccagcccacctgcccatgtgatgaagcagagatgcggcctcgtcgcacactgcctgtggcccccgagcccggcccagccccaggccagtcagccgcagactttggaaagcccaacgaccatggagagatgggccgttgccatggtggacggactcccgggctgggcttttgaattggccttggggactactcggctctcactcagctcccacgggactcagaagtgcgccgccatgctgcctagggtactgtccccacatctgtcccaacccagctggaggcctggtctctccttacaacccctgggcccagccctcattgctgggggccaggccttggatcttgagggtctggcacatccttaatcctgtgcccctgcctgggacagaaatgtggctccagttgctctgtctctcgtggtcaccctgagggcactctgcatcctctgtcattttaacctcaggtggcacccagggcgaatggggcccagggcagaccttcagggccagagccctggcggaggagaggccctttgccaggagcacagcagcagctcgcctacctctgagcccaggccccctccctccctcagccccccagtcctccctccatcttccctggggttctcctcctctcccagggcctccttgctccttcgttcacagctgggggtccccgattccaatgctgttttttggggagtggtttccaggagctgcctggtgtctgctgtaaatgtttgtctactgcacaagcctcggcctgcccctgagccaggctcggtaccgatgcgtgggctgggctaggtccctctgtccatctgggcctttgtatgagctgcattgcccttgctcaccctgaccaagcacacgcctcagaggggccctcagcctctcctgaagccctcttgtggcaagaactgtggaccatgccagtcccgtctggtttccatcccaccactccaaggactgagactgacctcctctggtgacactggcctagagcctgacactctcctaagaggttctctccaagcccccaaatagctccaggcgccctcggccgcccatcatggttaattctgtccaacaaacacacacgggtagattgctggcctgttgtaggtggtagggacacagatgaccgacctggtcactcctcctgccaacattcagtctggtatgtgaggcgtgcgtgaagcaagaactcctggagctacagggacagggagccatcattcctgcctgggaatcctggaagacttcctgcaggagtcagcgttcaatcttgaccttgaagatgggaaggatgttctttttacgtaccaattcttttgtcttttgatattaaaaagaagtacatgttcattgtagagaatttggaaactgtagaagagaatcaagaagaaaaataaaaatcagctgttgtaatcacctagcaaa

SEQ ID NO: 436355 - DNA, 3732 bp, Homo sapiens
ggaggaggtggaaggggaggagcaggccacacaggcacaggccggtgagggacctgcccagacctggagggtctcgctctgtcacacaggctggagtgcagtggtgtgatcttggctcatcgtaacctccacctcccgggttcaagtgattctcatgcctcagcctcccgagtagctgggattacaggtggtgacttccaagagtgactccgtcggaggaaaatgactccccagtcgctgctgcagacgacactgttcctgctgagtctgctcttcctggtccaaggtgcccacggcaggggccacagggaagactttcgcttctgcagccagcggaaccagacacacaggagcagcctccactacaaacccacaccagacctgcgcatctccatcgagaactccgaagaggccctcacagtccatgcccctttccctgcagcccaccctgcttcccgatccttccctgaccccaggggcctctaccacttctgcctctactggaaccgacatgctgggagattacatcttctctatggcaagcgtgacttcttgctgagtgacaaagcctctagcctcctctgcttccagcaccaggaggagagcctggctcagggccccccgctgttagccacttctgtcacctcctggtggagccctcagaacatcagcctgcccagtgccgccagcttcaccttctccttccacagtcctccccacacggccgctcacaatgcctcggtggacatgtgcgagctcaaaagggacctccagctgctcagccagttcctgaagcatccccagaaggcctcaaggaggccctcggctgcccccgccagccagcagttgcagagcctggagtcgaaactgacctctgtgagattcatgggggacatggtgtccttcgaggaggaccggatcaacgccacggtgtggaagctccagcccacagccggcctccaggacctgcacatccactcccggcaggaggaggagcagagcgagatcatggagtactcggtgctgctgcctcgaacactcttccagaggacgaaaggccggagcggggaggctgagaagagactcctcctggtggacttcagcagccaagccctgttccaggacaagaattccagccaagtcctgggtgagaaggtcttggggattgtggtacagaacaccaaagtagccaacctcacggagcccgtggtgctcaccttccagcaccagctacagccgaagaatgtgactctgcaatgtgtgttctgggttgaagaccccacattgagcagcccggggcattggagcagtgctgggtgtgagaccgtcaggagagaaacccaaacatcctgcttctgcaaccacttgacctactttgcagtgctgatggtctcctcggtggaggtggacgccgtgcacaagcactacctgagcctcctctcctacgtgggctgtgtcgtctctgccctggcctgccttgtcaccattgccgcctacctctgctccaggaggaaacctcgggactacaccatcaaggtgcacatgaacctgctgctggccgtcttcctgctggacacgagcttcctgctcagcgagccggtggccctgacaggctctgaggctggctgccgagccagtgccatcttcctgcacttctccctgctcacctgcctttcctggatgggcctcgaggggtacaacctctaccgactcgtggtggaggtctttggcacctatgtccctggctacctactcaagctgagcgccatgggctggggcttccccatctttctggtgacgctggtggccctggtggatgtggacaactatggccccatcatcttggctgtgcataggactccagagggcgtcatctacccttccatgtgctggatccgggactccctggtcagctacatcaccaacctgggcctcttcagcctggtgtttctgttcaacatggccatgctagccaccatggtggtgcagatcctgcggctgcgcccccacacccaaaagtggtcacatgtgctgacactgctgggcctcagcctggtccttggcctgccctgggccttgatcttcttctcctttgcttctggcaccttccagcttgtcgtcctctaccttttcagcatcatcacctccttccaaggcttcctcatcttcatctggtactggtccatgcggctgcaggcccggggtggcccctcccctctgaagagcaactcagacagcgccaggctccccatcagctcgggcagcacctcgtccagccgcatctaggcctccagcccacctgcccatgtgatgaagcagagatgcggcctcgtcgcacactgcctgtggcccccgagcccggcccagccccaggccagtcagccgcagactttggaaagcccaacgaccatggagagatgggccgttgccatggtggacggactcccgggctgggcttttgaattggccttggggactactcggctctcactcagctcccacgggactcagaagtgcgccgccatgctgcctagggtactgtccccacatctgtcccaacccagctggaggcctggtctctccttacaacccctgggcccagccctcattgctgggggccaggccttggatcttgagggtctggcacatccttaatcctgtgcccctgcctgggacagaaatgtggctccagttgctctgtctctcgtggtcaccctgagggcactctgcatcctctgtcattttaacctcaggtggcacccagggcgaatggggcccagggcagaccttcagggccagagccctggcggaggagaggccctttgccaggagcacagcagcagctcgcctacctctgagcccaggccccctccctccctcagccccccagtcctccctccatcttccctggggttctcctcctctcccagggcctccttgctccttcgttcacagctgggggtccccgattccaatgctgttttttggggagtggtttccaggagctgcctggtgtctgctgtaaatgtttgtctactgcacaagcctcggcctgcccctgagccaggctcggtaccgatgcgtgggctgggctaggtccctctgtccatctgggcctttgtatgagctgcattgcccttgctcaccctgaccaagcacacgcctcagaggggccctcagcctctcctgaagccctcttgtggcaagaactgtggaccatgccagtcccgtctggtttccatcccaccactccaaggactgagactgacctcctctggtgacactggcctagagcctgacactctcctaagaggttctctccaagcccccaaatagctccaggcgccctcggccgcccatcatggttaattctgtccaacaaacacacacgggtagattgctggcctgttgtaggtggtagggacacagatgaccgacctggtcactcctcctgccaacattcagtctggtatgtgaggcgtgcgtgaagcaagaactcctggagctacagggacagggagccatcattcctgcctgggaatcctggaagacttcctgcaggagtcagcgttcaatcttgaccttgaagatgggaaggatgttctttttacgtaccaattcttttgtcttttgatattaaaaagaagtacatgttcattgtagagaatttggaaactgtagaagagaatcaagaagaaaaataaaaatcagctgttgtaatcacctagcaaa

SEQ ID NO: 436356 - DNA, 3647 bp, Homo sapiens
gcagaggcagggcccttgcctgtggggccgtggttggtactgagcgcctgatggctgaggccctgtagcgctggggatctgcggctccagaggcagagacaggtggtgacttccaagagtgactccgtcggaggaaaatgactccccagtcgctgctgcagacgacactgttcctgctgagtctgctcttcctggtccaaggtgcccacggcaggggccacagggaagactttcgcttctgcagccagcggaaccagacacacaggagcagcctccactacaaacccacaccagacctgcgcatctccatcgagaactccgaagaggccctcacagtccatgcccctttccctgcagcccaccctgcttcccgatccttccctgaccccaggggcctctaccacttctgcctctactggaaccgacatgctgggagattacatcttctctatggcaagcgtgacttcttgctgagtgacaaagcctctagcctcctctgcttccagcaccaggaggagagcctggctcagggccccccgctgttagccacttctgtcacctcctggtggagccctcagaacatcagcctgcccagtgccgccagcttcaccttctccttccacagtcctccccacacggccgctcacaatgcctcggtggacatgtgcgagctcaaaagggacctccagctgctcagccagttcctgaagcatccccagaaggcctcaaggaggccctcggctgcccccgccagccagcagttgcagagcctggagtcgaaactgacctctgtgagattcatgggggacatggtgtccttcgaggaggaccggatcaacgccacggtgtggaagctccagcccacagccggcctccaggacctgcacatccactcccggcaggaggaggagcagagcgagatcatggagtactcggtgctgctgcctcgaacactcttccagaggacgaaaggccggagcggggaggctgagaagagactcctcctggtggacttcagcagccaagccctgttccaggacaagaattccagccaagtcctgggtgagaaggtcttggggattgtggtacagaacaccaaagtagccaacctcacggagcccgtggtgctcaccttccagcaccagctacagccgaagaatgtgactctgcaatgtgtgttctgggttgaagaccccacattgagcagcccggggcattggagcagtgctgggtgtgagaccgtcaggagagaaacccaaacatcctgcttctgcaaccacttgacctactttgcagtgctgatggtctcctcggtggaggtggacgccgtgcacaagcactacctgagcctcctctcctacgtgggctgtgtcgtctctgccctggcctgccttgtcaccattgccgcctacctctgctccaggaggaaacctcgggactacaccatcaaggtgcacatgaacctgctgctggccgtcttcctgctggacacgagcttcctgctcagcgagccggtggccctgacaggctctgaggctggctgccgagccagtgccatcttcctgcacttctccctgctcacctgcctttcctggatgggcctcgaggggtacaacctctaccgactcgtggtggaggtctttggcacctatgtccctggctacctactcaagctgagcgccatgggctggggcttccccatctttctggtgacgctggtggccctggtggatgtggacaactatggccccatcatcttggctgtgcataggactccagagggcgtcatctacccttccatgtgctggatccgggactccctggtcagctacatcaccaacctgggcctcttcagcctggtgtttctgttcaacatggccatgctagccaccatggtggtgcagatcctgcggctgcgcccccacacccaaaagtggtcacatgtgctgacactgctgggcctcagcctggtccttggcctgccctgggccttgatcttcttctcctttgcttctggcaccttccagcttgtcgtcctctaccttttcagcatcatcacctccttccaaggcttcctcatcttcatctggtactggtccatgcggctgcaggcccggggtggcccctcccctctgaagagcaactcagacagcgccaggctccccatcagctcgggcagcacctcgtccagccgcatctaggcctccagcccacctgcccatgtgatgaagcagagatgcggcctcgtcgcacactgcctgtggcccccgagcccggcccagccccaggccagtcagccgcagactttggaaagcccaacgaccatggagagatgggccgttgccatggtggacggactcccgggctgggcttttgaattggccttggggactactcggctctcactcagctcccacgggactcagaagtgcgccgccatgctgcctagggtactgtccccacatctgtcccaacccagctggaggcctggtctctccttacaacccctgggcccagccctcattgctgggggccaggccttggatcttgagggtctggcacatccttaatcctgtgcccctgcctgggacagaaatgtggctccagttgctctgtctctcgtggtcaccctgagggcactctgcatcctctgtcattttaacctcaggtggcacccagggcgaatggggcccagggcagaccttcagggccagagccctggcggaggagaggccctttgccaggagcacagcagcagctcgcctacctctgagcccaggccccctccctccctcagccccccagtcctccctccatcttccctggggttctcctcctctcccagggcctccttgctccttcgttcacagctgggggtccccgattccaatgctgttttttggggagtggtttccaggagctgcctggtgtctgctgtaaatgtttgtctactgcacaagcctcggcctgcccctgagccaggctcggtaccgatgcgtgggctgggctaggtccctctgtccatctgggcctttgtatgagctgcattgcccttgctcaccctgaccaagcacacgcctcagaggggccctcagcctctcctgaagccctcttgtggcaagaactgtggaccatgccagtcccgtctggtttccatcccaccactccaaggactgagactgacctcctctggtgacactggcctagagcctgacactctcctaagaggttctctccaagcccccaaatagctccaggcgccctcggccgcccatcatggttaattctgtccaacaaacacacacgggtagattgctggcctgttgtaggtggtagggacacagatgaccgacctggtcactcctcctgccaacattcagtctggtatgtgaggcgtgcgtgaagcaagaactcctggagctacagggacagggagccatcattcctgcctgggaatcctggaagacttcctgcaggagtcagcgttcaatcttgaccttgaagatgggaaggatgttctttttacgtaccaattcttttgtcttttgatattaaaaagaagtacatgttcattgtagagaatttggaaactgtagaagagaatcaagaagaaaaataaaaatcagctgttgtaatcacctagcaaa

SEQ ID NO: 436357 - DNA, 3614 bp, Homo sapiens
ggaggaggtggaaggggaggagcaggccacacaggcacaggccggtgagggacctgcccagacctggaggtggtgacttccaagagtgactccgtcggaggaaaatgactccccagtcgctgctgcagacgacactgttcctgctgagtctgctcttcctggtccaaggtgcccacggcaggggccacagggaagactttcgcttctgcagccagcggaaccagacacacaggagcagcctccactacaaacccacaccagacctgcgcatctccatcgagaactccgaagaggccctcacagtccatgcccctttccctgcagcccaccctgcttcccgatccttccctgaccccaggggcctctaccacttctgcctctactggaaccgacatgctgggagattacatcttctctatggcaagcgtgacttcttgctgagtgacaaagcctctagcctcctctgcttccagcaccaggaggagagcctggctcagggccccccgctgttagccacttctgtcacctcctggtggagccctcagaacatcagcctgcccagtgccgccagcttcaccttctccttccacagtcctccccacacggccgctcacaatgcctcggtggacatgtgcgagctcaaaagggacctccagctgctcagccagttcctgaagcatccccagaaggcctcaaggaggccctcggctgcccccgccagccagcagttgcagagcctggagtcgaaactgacctctgtgagattcatgggggacatggtgtccttcgaggaggaccggatcaacgccacggtgtggaagctccagcccacagccggcctccaggacctgcacatccactcccggcaggaggaggagcagagcgagatcatggagtactcggtgctgctgcctcgaacactcttccagaggacgaaaggccggagcggggaggctgagaagagactcctcctggtggacttcagcagccaagccctgttccaggacaagaattccagccaagtcctgggtgagaaggtcttggggattgtggtacagaacaccaaagtagccaacctcacggagcccgtggtgctcaccttccagcaccagctacagccgaagaatgtgactctgcaatgtgtgttctgggttgaagaccccacattgagcagcccggggcattggagcagtgctgggtgtgagaccgtcaggagagaaacccaaacatcctgcttctgcaaccacttgacctactttgcagtgctgatggtctcctcggtggaggtggacgccgtgcacaagcactacctgagcctcctctcctacgtgggctgtgtcgtctctgccctggcctgccttgtcaccattgccgcctacctctgctccaggaggaaacctcgggactacaccatcaaggtgcacatgaacctgctgctggccgtcttcctgctggacacgagcttcctgctcagcgagccggtggccctgacaggctctgaggctggctgccgagccagtgccatcttcctgcacttctccctgctcacctgcctttcctggatgggcctcgaggggtacaacctctaccgactcgtggtggaggtctttggcacctatgtccctggctacctactcaagctgagcgccatgggctggggcttccccatctttctggtgacgctggtggccctggtggatgtggacaactatggccccatcatcttggctgtgcataggactccagagggcgtcatctacccttccatgtgctggatccgggactccctggtcagctacatcaccaacctgggcctcttcagcctggtgtttctgttcaacatggccatgctagccaccatggtggtgcagatcctgcggctgcgcccccacacccaaaagtggtcacatgtgctgacactgctgggcctcagcctggtccttggcctgccctgggccttgatcttcttctcctttgcttctggcaccttccagcttgtcgtcctctaccttttcagcatcatcacctccttccaaggcttcctcatcttcatctggtactggtccatgcggctgcaggcccggggtggcccctcccctctgaagagcaactcagacagcgccaggctccccatcagctcgggcagcacctcgtccagccgcatctaggcctccagcccacctgcccatgtgatgaagcagagatgcggcctcgtcgcacactgcctgtggcccccgagcccggcccagccccaggccagtcagccgcagactttggaaagcccaacgaccatggagagatgggccgttgccatggtggacggactcccgggctgggcttttgaattggccttggggactactcggctctcactcagctcccacgggactcagaagtgcgccgccatgctgcctagggtactgtccccacatctgtcccaacccagctggaggcctggtctctccttacaacccctgggcccagccctcattgctgggggccaggccttggatcttgagggtctggcacatccttaatcctgtgcccctgcctgggacagaaatgtggctccagttgctctgtctctcgtggtcaccctgagggcactctgcatcctctgtcattttaacctcaggtggcacccagggcgaatggggcccagggcagaccttcagggccagagccctggcggaggagaggccctttgccaggagcacagcagcagctcgcctacctctgagcccaggccccctccctccctcagccccccagtcctccctccatcttccctggggttctcctcctctcccagggcctccttgctccttcgttcacagctgggggtccccgattccaatgctgttttttggggagtggtttccaggagctgcctggtgtctgctgtaaatgtttgtctactgcacaagcctcggcctgcccctgagccaggctcggtaccgatgcgtgggctgggctaggtccctctgtccatctgggcctttgtatgagctgcattgcccttgctcaccctgaccaagcacacgcctcagaggggccctcagcctctcctgaagccctcttgtggcaagaactgtggaccatgccagtcccgtctggtttccatcccaccactccaaggactgagactgacctcctctggtgacactggcctagagcctgacactctcctaagaggttctctccaagcccccaaatagctccaggcgccctcggccgcccatcatggttaattctgtccaacaaacacacacgggtagattgctggcctgttgtaggtggtagggacacagatgaccgacctggtcactcctcctgccaacattcagtctggtatgtgaggcgtgcgtgaagcaagaactcctggagctacagggacagggagccatcattcctgcctgggaatcctggaagacttcctgcaggagtcagcgttcaatcttgaccttgaagatgggaaggatgttctttttacgtaccaattcttttgtcttttgatattaaaaagaagtacatgttcattgtagagaatttggaaactgtagaagagaatcaagaagaaaaataaaaatcagctgttgtaatcacctagcaaa

SEQ ID NO: 436358 - DNA, 3306 bp, Homo sapiens
  misc_feature (25)..(25): n is a, c, g, or t
ctggtacgccccggggttaatgggnatatcgtcgacccaggccgtcccaggggcctctaccacttctgcctctactggaaccgacatgctgggagattacatcttctctatggcaagcgtgacttcttgctgagtgacaaagcctctagcctcctctgcttccagcaccaggaggagagcctggctcagggccccccgctgttagccacttctgtcacctcctggtggagccctcagaacatcagcctgcccagtgccgccagcttcaccttctccttccacagtcctccccacacggccgctcacaatgcctcggtggacatgtgcgagctcaaaagggacctccagctgctcagccagttcctgaagcatccccagaaggcctcaaggaggccctcggctgcccccgccagccagcagttgcagagcctggagtcgaaactgacctctgtgagattcatgggggacatggtgtccttcgaggaggaccggatcaacgccacggtgtggaagctccagcccacagccggcctccaggacctgcacatccactcccggcaggaggaggagcagagcgagatcatggagtactcggtgctgctgcctcgaacactcttccagaggacgaaaggccggagcggggaggctgagaagagactcctcctggtggacttcagcagccaagccctgttccaggacaagaattccagccaagtcctgggtgagaaggtcttggggattgtggtacagaacaccaaagtagccaacctcacggagcccgtggtgctcaccttccagcaccagctacagccgaagaatgtgactctgcaatgtgtgttctgggttgaagaccccacattgagcagcccggggcattggagcagtgctgggtgtgagaccgtcaggagagaaacccaaacatcctgcttctgcaaccacttgacctactttgcagtgctgatggtctcctcggtggaggtggacgccgtgcacaagcactacctgagcctcctctcctacgtgggctgtgtcgtctctgccctggcctgccttgtcaccattgccgcctacctctgctccaggaggaaacctcgggactacaccatcaaggtgcacatgaacctgctgctggccgtcttcctgctggacacgagcttcctgctcagcgagccggtggccctgacaggctctgaggctggctgccgagccagtgccatcttcctgcacttctccctgctcacctgcctttcctggatgggcctcgaggggtacaacctctaccgactcgtggtggaggtctttggcacctatgtccctggctacctactcaagctgagcgccatgggctggggcttccccatctttctggtgacgctggtggccctggtggatgtggacaactatggccccatcatcttggctgtgcataggactccagagggcgtcatctacccttccatgtgctggatccgggactccctggtcagctacatcaccaacctgggcctcttcagcctggtgtttctgttcaacatggccatgctagccaccatggtggtgcagatcctgcggctgcgcccccacacccaaaagtggtcacatgtgctgacactgctgggcctcagcctggtccttggcctgccctgggccttgatcttcttctcctttgcttctggcaccttccagcttgtcgtcctctaccttttcagcatcatcacctccttccaaggcttcctcatcttcatctggtactggtccatgcggctgcaggcccggggtggcccctcccctctgaagagcaactcagacagcgccaggctccccatcagctcgggcagcacctcgtccagccgcatctaggcctccagcccacctgcccatgtgatgaagcagagatgcggcctcgtcgcacactgcctgtggcccccgagcccggcccagccccaggccagtcagccgcagactttggaaagcccaacgaccatggagagatgggccgttgccatggtggacggactcccgggctgggcttttgaattggccttggggactactcggctctcactcagctcccacgggactcagaagtgcgccgccatgctgcctagggtactgtccccacatctgtcccaacccagctggaggcctggtctctccttacaacccctgggcccagccctcattgctgggggccaggccttggatcttgagggtctggcacatccttaatcctgtgcccctgcctgggacagaaatgtggctccagttgctctgtctctcgtggtcaccctgagggcactctgcatcctctgtcattttaacctcaggtggcacccagggcgaatggggcccagggcagaccttcagggccagagccctggcggaggagaggccctttgccaggagcacagcagcagctcgcctacctctgagcccaggccccctccctccctcagccccccagtcctccctccatcttccctggggttctcctcctctcccagggcctccttgctccttcgttcacagctgggggtccccgattccaatgctgttttttggggagtggtttccaggagctgcctggtgtctgctgtaaatgtttgtctactgcacaagcctcggcctgcccctgagccaggctcggtaccgatgcgtgggctgggctaggtccctctgtccatctgggcctttgtatgagctgcattgcccttgctcaccctgaccaagcacacgcctcagaggggccctcagcctctcctgaagccctcttgtggcaagaactgtggaccatgccagtcccgtctggtttccatcccaccactccaaggactgagactgacctcctctggtgacactggcctagagcctgacactctcctaagaggttctctccaagcccccaaatagctccaggcgccctcggccgcccatcatggttaattctgtccaacaaacacacacgggtagattgctggcctgttgtaggtggtagggacacagatgaccgacctggtcactcctcctgccaacattcagtctggtatgtgaggcgtgcgtgaagcaagaactcctggagctacagggacagggagccatcattcctgcctgggaatcctggaagacttcctgcaggagtcagcgttcaatcttgaccttgaagatgggaaggatgttctttttacgtaccaattcttttgtcttttgatattaaaaagaagtacatgttcattgtagagaatttggaaactgtagaagagaatcaagaagaaaaataaaaatcagctgttgtaatcacctagcaaa

SEQ ID NO: 436359 - DNA, 2714 bp, Homo sapiens
cttgacctaatgtagtgagaagaataaaacacaaatgatttatagtaaatgaggctgagaagagactcctcctggtggacttcagcagccaagccctgttccaggacaagaattccagccaagtcctgggtgagaaggtcttggggattgtggtacagaacaccaaagtagccaacctcacggagcccgtggtgctcaccttccagcaccagctacagccgaagaatgtgactctgcaatgtgtgttctgggttgaagaccccacattgagcagcccggggcattggagcagtgctgggtgtgagaccgtcaggagagaaacccaaacatcctgcttctgcaaccacttgacctactttgcagtgctgatggtctcctcggtggaggtggacgccgtgcacaagcactacctgagcctcctctcctacgtgggctgtgtcgtctctgccctggcctgccttgtcaccattgccgcctacctctgctccaggaggaaacctcgggactacaccatcaaggtgcacatgaacctgctgctggccgtcttcctgctggacacgagcttcctgctcagcgagccggtggccctgacaggctctgaggctggctgccgagccagtgccatcttcctgcacttctccctgctcacctgcctttcctggatgggcctcgaggggtacaacctctaccgactcgtggtggaggtctttggcacctatgtccctggctacctactcaagctgagcgccatgggctggggcttccccatctttctggtgacgctggtggccctggtggatgtggacaactatggccccatcatcttggctgtgcataggactccagagggcgtcatctacccttccatgtgctggatccgggactccctggtcagctacatcaccaacctgggcctcttcagcctggtgtttctgttcaacatggccatgctagccaccatggtggtgcagatcctgcggctgcgcccccacacccaaaagtggtcacatgtgctgacactgctgggcctcagcctggtccttggcctgccctgggccttgatcttcttctcctttgcttctggcaccttccagcttgtcgtcctctaccttttcagcatcatcacctccttccaaggcttcctcatcttcatctggtactggtccatgcggctgcaggcccggggtggcccctcccctctgaagagcaactcagacagcgccaggctccccatcagctcgggcagcacctcgtccagccgcatctaggcctccagcccacctgcccatgtgatgaagcagagatgcggcctcgtcgcacactgcctgtggcccccgagcccggcccagccccaggccagtcagccgcagactttggaaagcccaacgaccatggagagatgggccgttgccatggtggacggactcccgggctgggcttttgaattggccttggggactactcggctctcactcagctcccacgggactcagaagtgcgccgccatgctgcctagggtactgtccccacatctgtcccaacccagctggaggcctggtctctccttacaacccctgggcccagccctcattgctgggggccaggccttggatcttgagggtctggcacatccttaatcctgtgcccctgcctgggacagaaatgtggctccagttgctctgtctctcgtggtcaccctgagggcactctgcatcctctgtcattttaacctcaggtggcacccagggcgaatggggcccagggcagaccttcagggccagagccctggcggaggagaggccctttgccaggagcacagcagcagctcgcctacctctgagcccaggccccctccctccctcagccccccagtcctccctccatcttccctggggttctcctcctctcccagggcctccttgctccttcgttcacagctgggggtccccgattccaatgctgttttttggggagtggtttccaggagctgcctggtgtctgctgtaaatgtttgtctactgcacaagcctcggcctgcccctgagccaggctcggtaccgatgcgtgggctgggctaggtccctctgtccatctgggcctttgtatgagctgcattgcccttgctcaccctgaccaagcacacgcctcagaggggccctcagcctctcctgaagccctcttgtggcaagaactgtggaccatgccagtcccgtctggtttccatcccaccactccaaggactgagactgacctcctctggtgacactggcctagagcctgacactctcctaagaggttctctccaagcccccaaatagctccaggcgccctcggccgcccatcatggttaattctgtccaacaaacacacacgggtagattgctggcctgttgtaggtggtagggacacagatgaccgacctggtcactcctcctgccaacattcagtctggtatgtgaggcgtgcgtgaagcaagaactcctggagctacagggacagggagccatcattcctgcctgggaatcctggaagacttcctgcaggagtcagcgttcaatcttgaccttgaagatgggaaggatgttctttttacgtaccaattcttttgtcttttgatattaaaaagaagtacatgttcattgtagagaatttggaaactgtagaagagaatcaagaagaaaaataaaaatcagctgttgtaatcacctagcaaa

SEQ ID NO: 436360 - DNA, 4130 bp, Homo sapiens
gcccggcgctgagtcatgggcatcccccaggatcactgcctcagcgctctcagccctgccccctcctggtctccctctgagaaatccatgactcacatatatcgtccgtcatccccagtcaagctcagggaggagggaggagcccagctggggcaggagaggggtgtctccccaccaaacaaacccggtccctccctctccgcactagctgtctgccctgccctgccgtaggagatgggctgggagcctcccacgctctccagctcactcggcaggcagcggggaccagggctggcaggttaagcctctgggggtggatcctgaaaggtggtccagccgcctggccctgcgtgggaccctccacctggcagcagggtctcgctctgtcacacaggctggagtgcagtggtgtgatcttggctcatcgtaacctccacctcccgggttcaagtgattctcatgcctcagcctcccgagtagctgggattacaggtggtgacttccaagagtgactccgtcggaggaaaatgactccccagtcgctgctgcagacgacactgttcctgctgagtctgctcttcctggtccaaggtgcccacggcaggggccacagggaagactttcgcttctgcagccagcggaaccagacacacaggagcagcctccactacaaacccacaccagacctgcgcatctccatcgagaactccgaagaggccctcacagtccatgcccctttccctgcagcccaccctgcttcccgatccttccctgaccccaggggcctctaccacttctgcctctactggaaccgacatgctgggagattacatcttctctatggcaagcgtgacttcttgctgagtgacaaagcctctagcctcctctgcttccagcaccaggaggagagcctggctcagggccccccgctgttagccacttctgtcacctcctggtggagccctcagaacatcagcctgcccagtgccgccagcttcaccttctccttccacagtcctccccacacggccgctcacaatgcctcggtggacatgtgcgagctcaaaagggacctccagctgctcagccagttcctgaagcatccccagaaggcctcaaggaggccctcggctgcccccgccagccagcagttgcagagcctggagtcgaaactgacctctgtgagattcatgggggacatggtgtccttcgaggaggaccggatcaacgccacggtgtggaagctccagcccacagccggcctccaggacctgcacatccactcccggcaggaggaggagcagagcgagatcatggagtactcggtgctgctgcctcgaacactcttccagaggacgaaaggccggagcggggaggctgagaagagactcctcctggtggacttcagcagccaagccctgttccaggacaagaattccagccaagtcctgggtgagaaggtcttggggattgtggtacagaacaccaaagtagccaacctcacggagcccgtggtgctcaccttccagcaccagctacagccgaagaatgtgactctgcaatgtgtgttctgggttgaagaccccacattgagcagcccggggcattggagcagtgctgggtgtgagaccgtcaggagagaaacccaaacatcctgcttctgcaaccacttgacctactttgcagtgctgatggtctcctcggtggaggtggacgccgtgcacaagcactacctgagcctcctctcctacgtgggctgtgtcgtctctgccctggcctgccttgtcaccattgccgcctacctctgctccagggtgcccctgccgtgcaggaggaaacctcgggactacaccatcaaggtgcacatgaacctgctgctggccgtcttcctgctggacacgagcttcctgctcagcgagccggtggccctgacaggctctgaggctggctgccgagccagtgccatcttcctgcacttctccctgctcacctgcctttcctggatgggcctcgaggggtacaacctctaccgactcgtggtggaggtctttggcacctatgtccctggctacctactcaagctgagcgccatgggctggggcttccccatctttctggtgacgctggtggccctggtggatgtggacaactatggccccatcatcttggctgtgcataggactccagagggcgtcatctacccttccatgtgctggatccgggactccctggtcagctacatcaccaacctgggcctcttcagcctggtgtttctgttcaacatggccatgctagccaccatggtggtgcagatcctgcggctgcgcccccacacccaaaagtggtcacatgtgctgacactgctgggcctcagcctggtccttggcctgccctgggccttgatcttcttctcctttgcttctggcaccttccagcttgtcgtcctctaccttttcagcatcatcacctccttccaaggcttcctcatcttcatctggtactggtccatgcggctgcaggcccggggtggcccctcccctctgaagagcaactcagacagcgccaggctccccatcagctcgggcagcacctcgtccagccgcatctaggcctccagcccacctgcccatgtgatgaagcagagatgcggcctcgtcgcacactgcctgtggcccccgagcccggcccagccccaggccagtcagccgcagactttggaaagcccaacgaccatggagagatgggccgttgccatggtggacggactcccgggctgggcttttgaattggccttggggactactcggctctcactcagctcccacgggactcagaagtgcgccgccatgctgcctagggtactgtccccacatctgtcccaacccagctggaggcctggtctctccttacaacccctgggcccagccctcattgctgggggccaggccttggatcttgagggtctggcacatccttaatcctgtgcccctgcctgggacagaaatgtggctccagttgctctgtctctcgtggtcaccctgagggcactctgcatcctctgtcattttaacctcaggtggcacccagggcgaatggggcccagggcagaccttcagggccagagccctggcggaggagaggccctttgccaggagcacagcagcagctcgcctacctctgagcccaggccccctccctccctcagccccccagtcctccctccatcttccctggggttctcctcctctcccagggcctccttgctccttcgttcacagctgggggtccccgattccaatgctgttttttggggagtggtttccaggagctgcctggtgtctgctgtaaatgtttgtctactgcacaagcctcggcctgcccctgagccaggctcggtaccgatgcgtgggctgggctaggtccctctgtccatctgggcctttgtatgagctgcattgcccttgctcaccctgaccaagcacacgcctcagaggggccctcagcctctcctgaagccctcttgtggcaagaactgtggaccatgccagtcccgtctggtttccatcccaccactccaaggactgagactgacctcctctggtgacactggcctagagcctgacactctcctaagaggttctctccaagcccccaaatagctccaggcgccctcggccgcccatcatggttaattctgtccaacaaacacacacgggtagattgctggcctgttgtaggtggtagggacacagatgaccgacctggtcactcctcctgccaacattcagtctggtatgtgaggcgtgcgtgaagcaagaactcctggagctacagggacagggagccatcattcctgcctgggaatcctggaagacttcctgcaggagtcagcgttcaatcttgaccttgaagatgggaaggatgttctttttacgtaccaattcttttgtcttttgatattaaaaagaagtacatgttcattgtagagaatttggaaactgtagaagagaatcaagaagaaaaataaaaatcagctgttgtaatcacctagcaaaaaaaaaaataaacaaaaaagggggggcgcccaaaaatccccagggccaataccgacccgcgtttgtacacagggc

SEQ ID NO: 436361 - DNA, 1576 bp, Homo sapiens
  misc_feature (16)..(16): n is a, c, g, or t
catagctagtgaggcnggggtaatcggcgagggcggtgaggcccggggtggcccctcccctctgaagagcaactcagacagcgccaggctccccatcagctcgggcagcacctcgtccagccgcatctaggcctccagcccacctgcccatgtgatgaagcagagatgcggcctcgtcgcacactgcctgtggcccccgagcccggcccagccccaggccagtcagccgcagactttggaaagcccaacgaccatggagagatgggccgttgccatggtggacggactcccgggctgggcttttgaattggccttggggactactcggctctcactcagctcccacgggactcagaagtgcgccgccatgctgcctagggtactgtccccacatctgtcccaacccagctggaggcctggtctctccttacaacccctgggcccagccctcattgctgggggccaggccttggatcttgagggtctggcacatccttaatcctgtgcccctgcctgggacagaaatgtggctccagttgctctgtctctcgtggtcaccctgagggcactctgcatcctctgtcattttaacctcaggtggcacccagggcgaatggggcccagggcagaccttcagggccagagccctggcggaggagaggccctttgccaggagcacagcagcagctcgcctacctctgagcccaggccccctccctccctcagccccccagtcctccctccatcttccctggggttctcctcctctcccagggcctccttgctccttcgttcacagctgggggtccccgattccaatgctgttttttggggagtggtttccaggagctgcctggtgtctgctgtaaatgtttgtctactgcacaagcctcggcctgcccctgagccaggctcggtaccgatgcgtgggctgggctaggtccctctgtccatctgggcctttgtatgagctgcattgcccttgctcaccctgaccaagcacacgcctcagaggggccctcagcctctcctgaagccctcttgtggcaagaactgtggaccatgccagtcccgtctggtttccatcccaccactccaaggactgagactgacctcctctggtgacactggcctagagcctgacactctcctaagaggttctctccaagcccccaaatagctccaggcgccctcggccgcccatcatggttaattctgtccaacaaacacacacgggtagattgctggcctgttgtaggtggtagggacacagatgaccgacctggtcactcctcctgccaacattcagtctggtatgtgaggcgtgcgtgaagcaagaactcctggagctacagggacagggagccatcattcctgcctgggaatcctggaagacttcctgcaggagtcagcgttcaatcttgaccttgaagatgggaaggatgttctttttacgtaccaattcttttgtcttttgatattaaaaagaagtacatgttcattgtagagaatttggaaactgtagaagagaatcaagaagaaaaataaaaatcagctgttgtaatcacctagcaaa

SEQ ID NO: 436362 - DNA, 3759 bp, Homo sapiens
  misc_feature (3679)..(3679): n is a, c, g, or t
gcccggcgctgagtcatgggcatcccccaggatcactgcctcagcgctctcagccctgccccctcctggtctccctctgagaaatccatgactcacatatatcgtccgtcatccccagtcaagctcagggaggagggaggagcccagctggggcaggagaggggtgtctccccaccaaacaaacccggtccctccctctccgcactagctgtctgccctgccctgccgtaggagatgggctgggagcctcccacgctctccagctcactcggcaggcagcggggaccagggctggcaggttaagcctctgggggtggatcctgaaaggtggtccagccgcctggccctgcgtgggaccctccacctggcagcagggtctcgctctgtcacacaggctggagtgcagtggtgtgatcttggctcatcgtaacctccacctcccgggttcaagtgattctcatgcctcagcctcccgagtagctgggattacaggtggtgacttccaagagtgactccgtcggaggaaaatgactccccagtcgctgctgcagacgacactgttcctgctgagtctgctcttcctggtccaaggtgcccacggcaggggccacagggaagactttcgcttctgcagccagcggaaccagacacacaggagcagcctccactacaaacccacaccagacctgcgcatctccatcgagaactccgaagaggccctcacagtccatgcccctttccctgcagcccaccctgcttcccgatccttccctgaccccaggggcctctaccacttctgcctctactggaaccgacatgctgggagattacatcttctctatggcaagcgtgacttcttgctgagtgacaaagcctctagcctcctctgcttccagcaccaggaggagagcctggctcagggccccccgctgttagccacttctgtcacctcctggtggagccctcagaacatcagcctgcccagtgccgccagcttcaccttctccttccacagtcctccccacacggccgctcacaatgcctcggtggacatgtgcgagctcaaaagggacctccagctgctcagccagttcctgaagcatccccagaaggcctcaaggaggccctcggctgcccccgccagccagcagttgcagagcctggagtcgaaactgacctctgtgagattcatgggggacatggtgtccttcgaggaggaccggatcaacgccacggtgtggaagctccagcccacagccggcctccaggacctgcacatccactcccggcaggaggaggagcagagcgagatcatggagtactcggtgctgctgcctcgaacactcttccagaggacgaaaggccggagcggggaggctgagaagagactcctcctggtggacttcagcagccaagccctgttccaggacaagaattccagccaagtcctgggtgagaaggtcttggggattgtggtacagaacaccaaagtagccaacctcacggagcccgtggtgctcaccttccagcaccagctacagccgaagaatgtgactctgcaatgtgtgttctgggttgaagaccccacattgagcagcccggggcattggagcagtgctgggtgtgagaccgtcaggagagaaacccaaacatcctgcttctgcaaccacttgacctactttgcagtgctgatggtctcctcggtggaggtggacgccgtgcacaagcactacctgagcctcctctcctacgtgggctgtgtcgtctctgccctggcctgccttgtcaccattgccgcctacctctgctccagggtgcccctgccgtgcaggaggaaacctcgggactacaccatcaaggtgcacatgaacctgctgctggccgtcttcctgctggacacgagcttcctgctcagcgagccggtggccctgacaggctctgaggctggctgccgagccagtgccatcttcctgcacttctccctgctcacctgcctttcctggatgggcctcgaggggtacaacctctaccgactcgtggtggaggtctttggcacctatgtccctggctacctactcaagctgagcgccatgggctggggcttccccatctttctggtgacgctggtggccctggtggatgtggacaactatggccccatcatcttggctgtgcataggactccagagggcgtcatctacccttccatgtgctggatccgggactccctggtcagctacatcaccaacctgggcctcttcagcctggtgtttctgttcaacatggccatgctagccaccatggtggtgcagatcctgcggctgcgcccccacacccaaaagtggtcacatgtgctgacactgctgggcctcagcctggtccttggcctgccctgggccttgatcttcttctcctttgcttctggcaccttccagcttgtcgtcctctaccttttcagcatcatcacctccttccaaggcttcctcatcttcatctggtactggtccatgcggctgcaggcccggggtggcccctcccctctgaagagcaactcagacagcgccaggctccccatcagctcgggcagcacctcgtccagccgcatctaggcctccagcccacctgcccatgtgatgaagcagagatgcggcctcgtcgcacactgcctgtggcccccgagcccggcccagccccaggccagtcagccgcagactttggaaagcccaacgaccatggagagatgggccgttgccatggtggacggactcccgggctgggcttttgaattggccttggggactactcggctctcactcagctcccacgggactcagaagtgcgccgccatgctgcctagggtactgtccccacatctgtcccaacccagctggaggcctggtctctccttacaacccctgggcccagccctcattgctgggggccaggccttggatcttgagggtctggcacatccttaatcctgtgcccctgcctgggacagaaatgtggctccagttgctctgtctctcgtggtcaccctgagggcactctgcatcctctgtcattttaacctcaggtggcacccagggcgaatggggcccagggcagaccttcagggccagagccctggcggaggagaggccctttgccaggagcacagcagcagctcgcctacctctgagcccaggccccctccctccctcagccccccagtcctccctccatcttccctggggttctcctcctctcccagggcctccttgctccttcgttcacagctgggggtccccgattccaatgctgttttttggggagtggtttccaggagctgcctggtgtctgctgtaaatgtttgtctactgcacaagcctcggcctgcccctgagccaggctcggtaccgatgcgtgggctgggctaggtccctctgtccatctgggcctttgtatgagctgcattgcccttgctcaccctgaccaagcacacgcctcagaggggccctcagcctctcctgaagccctcttgtggcaagaactgtggaccatgccagtcccgtctggtttccatcccaccactccaaggactgagactgacctcctctggtgacactggcctagagcctgacactctcctaagaggttctctccaagcccccaaatagctccagggggagtagatagnaaggccaggaaaccctagttgtccaaaaaggcattggataaaaggataatcctatttattacgtaagaacattttttctt

SEQ ID NO: 436363 - DNA, 3587 bp, Homo sapiens
gcccggcgctgagtcatgggcatcccccaggatcactgcctcagcgctctcagccctgccccctcctggtctccctctgagaaatccatgactcacatatatcgtccgtcatccccagtcaagctcagggaggagggaggagcccagctggggcaggagaggggtgtctccccaccaaacaaacccggtccctccctctccgcactagctgtctgccctgccctgccgtaggagatgggctgggagcctcccacgctctccagctcactcggcaggcagcggggaccagggctggcaggttaagcctctgggggtggatcctgaaaggtggtccagccgcctggccctgcgtgggaccctccacctggcagcagggtctcgctctgtcacacaggctggagtgcagtggtgtgatcttggctcatcgtaacctccacctcccgggttcaagtgattctcatgcctcagcctcccgagtagctgggattacaggtggtgacttccaagagtgactccgtcggaggaaaatgactccccagtcgctgctgcagacgacactgttcctgctgagtctgctcttcctggtccaaggtgcccacggcaggggccacagggaagactttcgcttctgcagccagcggaaccagacacacaggagcagcctccactacaaacccacaccagacctgcgcatctccatcgagaactccgaagaggccctcacagtccatgcccctttccctgcagcccaccctgcttcccgatccttccctgaccccaggggcctctaccacttctgcctctactggaaccgacatgctgggagattacatcttctctatggcaagcgtgacttcttgctgagtgacaaagcctctagcctcctctgcttccagcaccaggaggagagcctggctcagggccccccgctgttagccacttctgtcacctcctggtggagccctcagaacatcagcctgcccagtgccgccagcttcaccttctccttccacagtcctccccacacggccgctcacaatgcctcggtggacatgtgcgagctcaaaagggacctccagctgctcagccagttcctgaagcatccccagaaggcctcaaggaggccctcggctgcccccgccagccagcagttgcagagcctggagtcgaaactgacctctgtgagattcatgggggacatggtgtccttcgaggaggaccggatcaacgccacggtgtggaagctccagcccacagccggcctccaggacctgcacatccactcccggcaggaggaggagcagagcgagatcatggagtactcggtgctgctgcctcgaacactcttccagaggacgaaaggccggagcggggaggctgagaagagactcctcctggtggacttcagcagccaagccctgttccaggacaagaattccagccaagtcctgggtgagaaggtcttggggattgtggtacagaacaccaaagtagccaacctcacggagcccgtggtgctcaccttccagcaccagctacagccgaagaatgtgactctgcaatgtgtgttctgggttgaagaccccacattgagcagcccggggcattggagcagtgctgggtgtgagaccgtcaggagagaaacccaaacatcctgcttctgcaaccacttgacctactttgcagtgctgatggtctcctcggtggaggtggacgccgtgcacaagcactacctgagcctcctctcctacgtgggctgtgtcgtctctgccctggcctgccttgtcaccattgccgcctacctctgctccaggaggaaacctcgggactacaccatcaaggtgcacatgaacctgctgctggccgtcttcctgctggacacgagcttcctgctcagcgagccggtggccctgacaggctctgaggctggctgccgagccagtgccatcttcctgcacttctccctgctcacctgcctttcctggatgggcctcgaggggtacaacctctaccgactcgtggtggaggtctttggcacctatgtccctggctacctactcaagctgagcgccatgggctggggcttccccatctttctggtgacgctggtggccctggtggatgtggacaactatggccccatcatcttggctgtgcataggactccagagggcgtcatctacccttccatgtgctggatccgggactccctggtcagctacatcaccaacctgggcctcttcagcctggtgtttctgttcaacatggccatgctagccaccatggtggtgcagatcctgcggctgcgcccccacacccaaaagtggtcacatgtgctgacactgctgggcctcagcctggtccttggcctgccctgggccttgatcttcttctcctttgcttctggcaccttccagcttgtcgtcctctaccttttcagcatcatcacctccttccaaggcttcctcatcttcatctggtactggtccatgcggctgcaggcccggggtggcccctcccctctgaagagcaactcagacagcgccaggctccccatcagctcgggcagcacctcgtccagccgcatctaggcctccagcccacctgcccatgtgatgaagcagagatgcggcctcgtcgcacactgcctgtggcccccgagcccggcccagccccaggccagtcagccgcagactttggaaagcccaacgaccatggagagatgggccgttgccatggtggacggactcccgggctgggcttttgaattggccttggggactactcggctctcactcagctcccacgggactcagaagtgcgccgccatgctgcctagggtactgtccccacatctgtcccaacccagctggaggcctggtctctccttacaacccctgggcccagccctcattgctgggggccaggccttggatcttgagggtctggcacatccttaatcctgtgcccctgcctgggacagaaatgtggctccagttgctctgtctctcgtggtcaccctgagggcactctgcatcctctgtcattttaacctcaggtggcacccagggcgaatggggggcccaaggggcaaggaccctctccaagggcccaagaagccccctggggtcggaagggacgcatggcgcccttttgggccaagggaagccaccagggcaaggcaaaggattaggggcttaacctctactggaggccccagggggcccccgggcgatcggcacattcgcgcattcaaaggcgcgcatccgcaaggaggcgaccatatcacccgtatccaagagagcactcataccacaccattggggacaccagtgacacacaacacaatacacaatacacttaccccatatatgagggccacgtccacaatagggcacatccccccaaaataccgcgaaagcacaacaaaaaagaccactggcggcgcagcgagcaaacacaaccagagaaaaacaccaccacccaaagagtaggcaagagatacgcaaacaacaaaaaaggagacaacgcgaaccaacctgcagcagcacacacacacaaacaaccagacacccaccacaagggca

SEQ ID NO: 436364 - DNA, 1129 bp, Homo sapiens
gcccggcgctgagtcatgggcatcccccaggatcactgcctcagcgctctcagccctgccccctcctggtctccctctgagaaatccatgactcacatatatcgtccgtcatccccagtcaagctcagggaggagggaggagcccagctggggcaggagaggggtgtctccccaccaaacaaacccggtccctccctctccgcactagctgtctgccctgccctgccgtaggagatgggctgggagcctcccacgctctccagctcactcggcaggcagcggggaccagggctggcaggttaagcctctgggggtggatcctgaaaggtggtccagccgcctggccctgcgtgggaccctccacctggcagcagggtctcgctctgtcacacaggctggagtgcagtggtgtgatcttggctcatcgtaacctccacctcccgggttcaagtgattctcatgcctcagcctcccgagtagctgggattacaggtggtgacttccaagagtgactccgtcggaggaaaatgactccccagtcgctgctgcagacgacactgttcctgctgagtctgctcttcctggtccaaggtgcccacggcaggggccacagggaagactttcgcttctgcagccagcggaaccagacacacaggagcagcctccactacaaacccacaccagacctgcgcatctccatcgagaactccgaagaggccctcacagtccatgcccctttccctgcagcccaccctgcttcccgatccttccctgaccccaggggcctctaccacttctgcctctactggaaccgacatgctgggagattacatcttctctatggcaagcgtgacttcttgctgagtgacaaagcctctagcctcctctgcttccagcaccaggaggagagcctggctcagggccccccgctgttagccacttctgtcacctcctggtggagccctcagaacatcagcctgcccagtgccgccagcttcaccttctccttccacagtaaggcaacttccaggcggagggaacaactgggcagtggtctagaggcagggaaggcaaaatgcaaagtggactgggctctcggcgtgtgcaacgccgagtgaccatactgacc

SEQ ID NO: 436365 - DNA, 1027 bp, Homo sapiens
gcccggcgctgagtcatgggcatcccccaggatcactgcctcagcgctctcagccctgccccctcctggtctccctctgagaaatccatgactcacatatatcgtccgtcatccccagtcaagctcagggaggagggaggagcccagctggggcaggagaggggtgtctccccaccaaacaaacccggtccctccctctccgcactagctgtctgccctgccctgccgtaggagatgggctgggagcctcccacgctctccagctcactcggcaggcagcggggaccagggctggcaggttaagcctctgggggtggatcctgaaaggtggtccagccgcctggccctgcgtgggaccctccacctggcagcaggtggtgacttccaagagtgactccgtcggaggaaaatgactccccagtcgctgctgcagacgacactgttcctgctgagtctgctcttcctggtccaaggtgcccacggcaggggccacagggaagactttcgcttctgcagccagcggaaccagacacacaggagcagcctccactacaaacccacaccagacctgcgcatctccatcgagaactccgaagaggccctcacagtccatgcccctttccctgcagcccaccctgcttcccgatccttccctgaccccaggggcctctaccacttctgcctctactggaaccgacatgctgggagattacatcttctctatggcaagcgtgacttcttgctgagtgacaaagcctctagcctcctctgcttccagcaccaggaggagagcctggctcagggccccccgctgttagccacttctgtcacctcctggtggagccctcagaacatcagcctgcccagtgccgccagcttcaccttctccttccacagtaaggcaacttccaggcggagggaacaactgggcagtggtctagaggcagggaaggcaaaatgcaaagtggactgggctcacaatatcagatcatgaagactgggctttgctcacaggcactggggagcc

SEQ ID NO: 436366 - DNA, 774 bp, Homo sapiens
acgtaggcacgcagaggccgtcacgtgggtcgccgaggctcgcaagtgcgcgtggccgtggcggctggtgtggggttgagtcagttgtgggacccggagctgctgacccagcgggtggcccaccgaaccggtgacacagcggcaggcgttagggctcgggagccgcgagcctggcctcgtcctagagctcggccgagccgtcgccgccgtcgtcccccgcccccagtcagcaaaccgccgccgcgggcgcgcccccgctctgcgctgtctctccgatggcgtccgcctcaggggccatggcgaagcacgagcagatcctggtcctcgatccgcccacagacctcaaattcaaaggccccttcacagatgtagtcactacaaatcttaaattgcgaaatccatcggatagaaaagtgtgtttcaaagtgaagactacagcacctcgccggtactgtgtgaggcccaacagtggaattattgacccagggtcaactgtgactgtttcagtaatgctacagccctttgactatgatccgaatgaaaagagtaaacacaagtttatggtacagacaatttttgctccaccaaacacttcagatatggaagctgtggtaagtatagaagaagaatttgttttgggaagtggagtttaaactgtgggtgttgtttagcagtcagtagaaaaacttaatttctaaaaactaaaagttaaatttaggtttttaaaaaactgccaatttcttcattatagataatcctaacttaaagaatgaa

SEQ ID NO: 436367 - DNA, 6400 bp, Homo sapiens
acgtaggcacgcagaggccgtcacgtgggtcgccgaggctcgcaagtgcgcgtggccgtggcggctggtgtggggttgagtcagttgtgggacccggagctgctgacccagcgggtggcccaccgaaccggtgacacagcggcaggcgttagggctcgggagccgcgagcctggcctcgtcctagagctcggccgagccgtcgccgccgtcgtcccccgcccccagtcagcaaaccgccgccgcgggcgcgcccccgctctgcgctgtctctccgatggcgtccgcctcaggggccatggcgaagcacgagcagatcctggtcctcgatccgcccacagacctcaaattcaaaggccccttcacagatgtagtcactacaaatcttaaattgcgaaatccatcggatagaaaagtgtgtttcaaagtgaagactacagcacctcgccggtactgtgtgaggcccaacagtggaattattgacccagggtcaactgtgactgtttcagtaatgctacagccctttgactatgatccgaatgaaaagagtaaacacaagtttatggtacagacaatttttgctccaccaaacacttcagatatggaagctgtgtggaaagaggcaaaacctgatgaattaatggattccaaattgagatgcgtatttgaaatgcccaatgaaaatgataaattgaatgatatggaacctagcaaagctgttccactgaatgcatctaagcaagatggacctatgccaaaaccacacagtgtttcacttaatgataccgaaacaaggaaactaatggaagagtgtaaaagacttcagggagaaatgatgaagctatcagaagaaaatcggcacctgagagatgaaggtttaaggctcagaaaggtagcacattcggataaacctggatcaacctcaactgcatccttcagagataatgtcaccagtcctcttccttcacttcttgttgtaattgcagccattttcattggattctttctagggaaattcatcttgtagagtgaagcatgcagagtgctgtttctttttttttttttctcttgaccagaaaaagatttgtttacctaccatttcattggtagtatggcccacggtgaccatttttttgtgtgtacagcgtcatataggctttgcctttaatgatctcttacggttagaaaacacaataaaaacaaactgttcggctactggacaggttgtatattaccagatcatcactagcagatgtcagttgcacattgagtcctttatgaaattcataaataaagaattgttctttctttgtggttttaataagagttcaagaattgttcagagtcttgtaaatgttattttaataatccctttaaattttatctgttgctgttacctcttgaaatatgatttatttagattgctaatcccactcattcaggaaatgccaagaggtattccttggggaaatggtgcctcttacagtgtaaatttttcctcctttacctttgctaatatcatggcagaatttttcttatcccttgtgaggcagttgttgactgagtttttcatccttacaatcctgtcccatggtatttaacataaaaaaaaataaaactgttaacagattcttgctcgatagcttgtttgtgtctgtcgtgttattagagggaactccactatatatggtcacttgaaattatgatgcaaaggtttctcttgcattgaaaccctcttggatattacagtatttttaattgaaagtcctaattctgttaaggaaaggagttgattaaattttaaggtaccactggtattttgggagattataatcagtttgttttcaagataatagaaaataaggtccatgagaatagaagttatgtgatttcagtgagttgatgtgtacagcatggctgtgctccatctgatttaccccattcttaagttctgagagtatgttctcaaggaagatttaactctctttggttttaaattactttttaaccagcctaataaataagtcttactacttttcataatatttcataatagttaaaagtaggtgtttttttcgtgctcaatttggcactcaaaataatgttcattatggaagtttggtaatactgagcaagcctgtggaattttctttatgaaaaatgattttagcctttgcaaatgttaaccatgtgaaacacattttcagtataagtatgcgttacagggtttgatactttcctgcacttaggtttgtcctattcttcatttattcatactaggatagaaaattttggaatcagaaaatagatccagtgtttagctacatacaatctagtacaagtgaatttttattcttaaacataggtgtgttggctctttttttaaaagatgcgctctacctgaaaaggaaattggattttagaactggatgtggtgcagtgaagtattttaggcccaggtctgtgtacacattttatagaagaatgaagtactctgaagtattttggttgccttttcatttcaactgtgttttgaatttgtcagatcacacatatattgtgttattgggcgctgtggtatcttttataaaacctcttgcttgtgtgcaaaagttcctaaaaggaaacacaagtaatgcctatccattactagcatgctatgctgcatgctttactgccattgctgtatgctttactgtctttgtaaaaatccccctctccccttttctggtaactggaaaagcatgctaaaaatagtcttatattttcaccccataagtgcagaatcagtaattccttggcttaaagctcttatataatcaatattattggtggtaaataccaagtttggtatctcatagctatctttttttaaagaaattaagttcttgaaaatttagccaaatcccgttttatgggaatgctctttagaattcattttgttcagcccctttgttctatggttgagaaatctgaggccttacgaaggttaagagaactttccccgtgtctcacaggtaggtagaggcagagctggaactagatatctggtctgttgactctagctcagtgtcttctggtaactgttgaaaattgtcttagtttgagagatggctgaaataatgaacataaaatgctatttataataacaagtatatgtgaaatttcttattgtaagactactaccggcttactgttgaatagtttggttatagtgtttaggctagaaatgcctcccacattggtaataaacattacaaaatacaatgtatttttaggtaggcattttataaaatgcattatgccatggttgcttttgagatagattgtagtctgggtagcatctttaaaatgtatgtgggcttaactgttgttcatatcaggagatgctctgattgtataggtgagactctgtttctgttatttttaattgctgtatgaaatgtgatcagattattttactaccaacagttatagtttgaaagtccaactgtattaattgactgataatatgataatatagagattaaattgtttgtcttcattccttatatgtttagaagtttttgctttgtctgcctgcttacttgtatatgtaagcatgagggaaatacactgttgctaatactgaaattacaatcaagtaactaaggccttgagttcatatgtgacactgaatgcactagcttccttcgttctataactaatgtaccttaacttcccccattcttatatttacaagaagctaagtcattatgttctgagtgtgtggtatgttcccttaaaaaaaaatgacacttggaagaaaaatgtatgaaattcagaaattccgatcaaagaaaagtaattctttcttttttttttggagacagagtcttgctttgttgcccaggctggagggcagtggtgtgatctcacctcactgcagcttccgcctcctgggttcaagtgattctcatggctcagccgcctgagtagctgggattacaggtgtgagccaacaagcccggctaatttttgtatttttagtagagacaaggtttcaccatgttggtcaggctgggctcaaactcctgaatccgcctgcctcggcctcccaaagtgctgggattacaggtgtgagctgccgcacccagccaagaaaaataatactcttaaatacttagatgttcacctaaagttgatattatttggtatgggaattacttttgaactgtaatctttcagattacaccactttgaaaacaagttttaacagtagggtaaaaatatagtttttgagggtattcccaacttgtgatcttctaccactttagagacattcaagtaatagttttcttagagctttgcacattcctattcactgagattttaaaaatttcacctttattagagggaaggatcaatgcttattaccatttggaaaaacgaagatcagaaggtaaatgatctttattttctagctttaaagggaaattaaaccattcatgaataaactttaaaaatgtgaagtgtccttttccttttcacaatacaaaaaaaatttcaacagattgtgtggtttgtgcatttatatcctgttaagcattaatagctaatcactgggacttgaattctgatggcagatagtctcttgcttagtgagatggagttaactattttttagtaggaagtgagaacagctgattttcatgccacgtttcatagccccacttttggtagactaccaccacgcttcttcgcgtaacagttggcatcttgggaatgaatgcccagccgctcgtgggttggtgcaaagaagtataaacatatatcactaaggaaaaagaaagtttgtcttgcccttctgacacagtgtgtgcacttcaggcaatttttggaaaatataaaaaattccaaattctgcctttcagcagcatcaattgctaggaacatttcattcatttccctgtaatattaatgttctttaagcataatcactaattataagttgtatcctatttttttccagcttaatttctgtggtttattgaaaaccaagtataaatgtgactaaaagcattttgctttgtttttatagttaactttcttaaggttatggacattttataatgtaacatttgattggcctggcctcttgacaattcccttctagttatgcatatcctcctgttgccacatttcttgttttaaaactcagtttcttgttttccagttgttgctatgtataacacccatcttgaaagagagtatataggaagttattcagataacttttgtagtagtgatattcaactatagcagtaccttaactcatgatgagcttaggaacataaaagataattgttgcttgaatagcacccccagagatactgacctaattggtctggggtggagatctggcatggtagtttttttcaagctccaatcatcggccagacagttgctttatgtaggtttttaaatgccaaaggcagatatgaagtagatttaattaagacttgacttcagcaatacaggggaacttaaaatacttatttttctttaaactgcaggagtcactgttaggtattgcttaaaaaaaattgcataaaagctttgcttgtcaagttaggattgctggaataccactaaagatttttgacttgtgaataaatgagctgtcatcgcaaaaaggcgatttgagaaatgtgggcttcagtattaattgccattttgctgacacccagtgtacctacctacctgagaaatttattttgtccatcatgtatttctcaaagcaaaaggtggttttcaagtataatgtcgttttcaacatgcttattacttagttttacgtcagctcatttcatcatcattgataacttgtgaaatacttatctccatcctatggaataggggagacgggtttagacaggttcaattagctcaagtctacacagctgaagtagcagagaaagtgggatctagatggtctgatcctagtgatctaccatatgaaggacatagtttgtgtcctggtccaagtcaaatattgactcctcacaaacagtaagtatggcaattttgtgatgcctttgattccactttacatggagtactattatttgtgaaatgtctttaagatttttggtcttaaatttttgaagactgctttccccctttatctcccagaaaattgagaagaagtaaactcctgcccactaacaatctcagtccgtgaacaaaaccaacatgaacattcctaaacaagagtgtgtgttactctaagaagaaggctatagaatttatggaaatggcttatgtaacctacaagactggagaacagaatgtgactggccttttctaatggtcctttaagatttaatgattaaagcaagagttttttataattgactttgt

SEQ ID NO: 436368 - DNA, 6453 bp, Homo sapiens
acgtaggcacgcagaggccgtcacgtgggtcgccgaggctcgcaagtgcgcgtggccgtggcggctggtgtggggttgagtcagttgtgggacccggagctgctgacccagcgggtggcccaccgaaccggtgacacagcggcaggcgttagggctcgggagccgcgagcctggcctcgtcctagagctcggccgagccgtcgccgccgtcgtcccccgcccccagtcagcaaaccgccgccgcgggcgcgcccccgctctgcgctgtctctccgatggcgtccgcctcaggggccatggcgaagcacgagcagatcctggtcctcgatccgcccacagacctcaaattcaaaggccccttcacagatgtagtcactacaaatcttaaattgcgaaatccatcggatagaaaagtgtgtttcaaagtgaagactacagcacctcgccggtactgtgtgaggcccaacagtggaattattgacccagggtcaactgtgactgtttcagtaatgctacagccctttgactatgatccgaatgaaaagagtaaacacaagtttatggtacagacaatttttgctccaccaaacacttcagatatggaagctgtgtggaaagaggcaaaacctgatgaattaatggattccaaattgagatgcgtatttgaaatgcccaatgaaaatgataaattgaatgatatggaacctagcaaagctgttccactgaatgcatctaagcaagatggacctatgccaaaaccacacagtgtttcacttaatgataccgaaacaaggaaactaatggaagagtgtaaaagacttcagggagaaatgatgaagctatcagaagaaaatcggcacctgagagatgaaggtttaaggctcagaaaggtagcacattcggataaacctggatcaacctcaactgcatccttcagagataatgtcaccagtcctcttccttcacttcttgttgtaattgcagccattttcattggattctttctagggaaattcatcttgtagagtgaagcatgcagagtgctgtttctttttttttttttctcttgaccagaaaaagatttgtttacctaccatttcattggtagtatggcccacggtgaccatttttttgtgtgtacagcgtcatataggctttgcctttaatgatctcttacggttagaaaacacaataaaaacaaactgttcggctactggacaggttgtatattaccagatcatcactagcagatgtcagttgcacattgagtcctttatgaaattcataaataaagaattgttctttctttgtggttttaataagagttcaagaattgttcagagtcttgtaaatgttattttaataatccctttaaattttatctgttgctgttacctcttgaaatatgatttatttagattgctaatcccactcattcaggaaatgccaagaggtattccttggggaaatggtgcctcttacagtgtaaatttttcctcctttacctttgctaatatcatggcagaatttttcttatcccttgtgaggcagttgttgactgagtttttcatccttacaatcctgtcccatggtatttaacataaaaaaaaataaaactgttaacagattcttgctcgatagcttgtttgtgtctgtcgtgttattagagggaactccactatatatggtcacttgaaattatgatgcaaaggtttctcttgcattgaaaccctcttggatattacagtatttttaattgaaagtcctaattctgttaaggaaaggagttgattaaattttaaggtaccactggtattttgggagattataatcagtttgttttcaagataatagaaaataaggtccatgagaatagaagttatgtgatttcagtgagttgatgtgtacagcatggctgtgctccatctgatttaccccattcttaagttctgagagtatgttctcaaggaagatttaactctctttggttttaaattactttttaaccagcctaataaataagtcttactacttttcataatatttcataatagttaaaagtaggtgtttttttcgtgctcaatttggcactcaaaataatgttcattatggaagtttggtaatactgagcaagcctgtggaattttctttatgaaaaatgattttagcctttgcaaatgttaaccatgtgaaacacattttcagtataagtatgcgttacagggtttgatactttcctgcacttaggtttgtcctattcttcatttattcatactaggatagaaaattttggaatcagaaaatagatccagtgtttagctacatacaatctagtacaagtgaatttttattcttaaacataggtgtgttggctctttttttaaaagatgcgctctacctgaaaaggaaattggattttagaactggatgtggtgcagtgaagtattttaggcccaggtctgtgtacacattttatagaagaatgaagtactctgaagtattttggttgccttttcatttcaactgtgttttgaatttgtcagatcacacatatattgtgttattgggcgctgtggtatcttttataaaacctcttgcttgtgtgcaaaagttcctaaaaggaaacacaagtaatgcctatccattactagcatgctatgctgcatgctttactgccattgctgtatgctttactgtctttgtaaaaatccccctctccccttttctggtaactggaaaagcatgctaaaaatagtcttatattttcaccccataagtgcagaatcagtaattccttggcttaaagctcttatataatcaatattattggtggtaaataccaagtttggtatctcatagctatctttttttaaagaaattaagttcttgaaaatttagccaaatcccgttttatgggaatgctctttagaattcattttgttcagcccctttgttctatggttgagaaatctgaggccttacgaaggttaagagaactttccccgtgtctcacaggtaggtagaggcagagctggaactagatatctggtctgttgactctagctcagtgtcttctggtaactgttgaaaattgtcttagtttgagagatggctgaaataatgaacataaaatgctatttataataacaagtatatgtgaaatttcttattgtaagactactaccggcttactgttgaatagtttggttatagtgtttaggctagaaatgcctcccacattggtaataaacattacaaaatacaatgtatttttaggtaggcattttataaaatgcattatgccatggttgcttttgagatagattgtagtctgggtagcatctttaaaatgtatgtgggcttaactgttgttcatatcaggagatgctctgattgtataggtgagactctgtttctgttatttttaattgctgtatgaaatgtgatcagattattttactaccaacagttatagtttgaaagtccaactgtattaattgactgataatatgataatatagagattaaattgtttgtcttcattccttatatgtttagaagtttttgctttgtctgcctgcttacttgtatatgtaagcatgagggaaatacactgttgctaatactgaaattacaatcaagtaactaaggccttgagttcatatgtgacactgaatgcactagcttccttcgttctataactaatgtaccttaacttcccccattcttatatttacaagaagctaagtcattatgttctgagtgtgtggtatgttcccttaaaaaaaaatgacacttggaagaaaaatgtatgaaattcagaaattccgatcaaagaaaagtaattctttcttttttttttggagacagagtcttgctttgttgcccaggctggagggcagtggtgtgatctcacctcactgcagcttccgcctcctgggttcaagtgattctcatggctcagccgcctgagtagctgggattacaggtgtgagccaacaagcccggctaatttttgtatttttagtagagacaaggtttcaccatgttggtcaggctgggctcaaactcctgaatccgcctgcctcggcctcccaaagtgctgggattacaggtgtgagctgccgcacccagccaagaaaaataatactcttaaatacttagatgttcacctaaagttgatattatttggtatgggaattacttttgaactgtaatctttcagattacaccactttgaaaacaagttttaacagtagggtaaaaatatagtttttgagggtattcccaacttgtgatcttctaccactttagagacattcaagtaatagttttcttagagctttgcacattcctattcactgagattttaaaaatttcacctttattagagggaaggatcaatgcttattaccatttggaaaaacgaagatcagaaggtaaatgatctttattttctagctttaaagggaaattaaaccattcatgaataaactttaaaaatgtgaagtgtccttttccttttcacaatacaaaaaaaatttcaacagattgtgtggtttgtgcatttatatcctgttaagcattaatagctaatcactgggacttgaattctgatggcagatagtctcttgcttagtgagatggagttaactattttttagtaggaagtgagaacagctgattttcatgccacgtttcatagccccacttttggtagactaccaccacgcttcttcgcgtaacagttggcatcttgggaatgaatgcccagccgctcgtgggttggtgcaaagaagtataaacatatatcactaaggaaaaagaaagtttgtcttgcccttctgacacagtgtgtgcacttcaggcaatttttggaaaatataaaaaattccaaattctgcctttcagcagcatcaattgctaggaacatttcattcatttccctgtaatattaatgttctttaagcataatcactaattataagttgtatcctatttttttccagcttaatttctgtggtttattgaaaaccaagtataaatgtgactaaaagcattttgctttgtttttatagttaactttcttaaggttatggacattttataatgtaacatttgattggcctggcctcttgacaattcccttctagttatgcatatcctcctgttgccacatttcttgttttaaaactcagtttcttgttttccagttgttgctatgtataacacccatcttgaaagagagtatataggaagttattcagataacttttgtagtagtgatattcaactatagcagtaccttaactcatgatgagcttaggaacataaaagataattgttgcttgaatagcacccccagagatactgacctaattggtctggggtggagatctggcatggtagtttttttcaagctccaatcatcggccagacagttgctttatgtaggtttttaaatgccaaaggcagatatgaagtagatttaattaagacttgacttcagcaatacaggggaacttaaaatacttatttttctttaaactgcaggagtcactgttaggtattgcttaaaaaaaattgcataaaagctttgcttgtcaagttaggattgctggaataccactaaagatttttgacttgtgaataaatgagctgtcatcgcaaaaaggcgatttgagaaatgtgggcttcagtattaattgccattttgctgacacccagtgtacctacctacctgagaaatttattttgtccatcatgtatttctcaaagcaaaaggtggttttcaagtataatgtcgttttcaacatgcttattacttagttttacgtcagctcatttcatcatcattgataacttgtgaaatacttatctccatcctatggaataggggagacgggtttagacaggttcaattagctcaagtctacacagctgaagtagcagagaaagtgggatctagatggtctgatcctagtgatctaccatatgaaggacatagtttgtgtcctggtccaagtcaaatattgactcctcacaaacagtaagtatggcaattttgtgatgcctttgattccactttacatggagtactattatttgtgaaatgtctttaagatttttggtcttaaatttttgaagactgctttccccctttatctcccagaaaattgagaagaagtaaactcctgcccactaacaatctcagtccgtgaacaaaaccaacatgaacattcctaaacaagagtgtgtgttactctaagaagaaggctatagaatttatggaaatggcttatgtaacctacaagactggagaacagaatgtgactggccttttctaatggtcctttaagatttaatgattaaagcaagagttttttataattgactttgtagaattataaacagtatcaagaatttagaccacaaagtcagtcgacgcggccg

SEQ ID NO: 436369 - DNA, 1942 bp, Homo sapiens
acgtaggcacgcagaggccgtcacgtgggtcgccgaggctcgcaagtgcgcgtggccgtggcggctggtgtggggttgagtcagttgtgggacccggagctgctgacccagcgggtggcccaccgaaccggtgacacagcggcaggcgttagggctcgggagccgcgagcctggcctcgtcctagagctcggccgagccgtcgccgccgtcgtcccccgcccccagtcagcaaaccgccgccgcgggcgcgcccccgctctgcgctgtctctccgatggcgtccgcctcaggggccatggcgaagcacgagcagatcctggtcctcgatccgcccacagacctcaaattcaaaggccccttcacagatgtagtcactacaaatcttaaattgcgaaatccatcggatagaaaagtgtgtttcaaagtgaagactacagcacctcgccggtactgtgtgaggcccaacagtggaattattgacccagggtcaactgtgactgtttcagtaatgctacagccctttgactatgatccgaatgaaaagagtaaacacaagtttatggtacagacaatttttgctccaccaaacacttcagatatggaagctgtgtggaaagaggcaaaacctgatgaattaatggattccaaattgagatgcgtatttgaaatgcccaatgaaaatgataaattgaatgatatggaacctagcaaagctgttccactgaatgcatctaagcaagatggacctatgccaaaaccacacagtgtttcacttaatgataccgaaacaaggaaactaatggaagagtgtaaaagacttcagggagaaatgatgaagctatcagaagaaaatcggcacctgagagatgaaggtttaaggctcagaaaggtagcacattcggataaacctggatcaacctcaactgcatccttcagagataatgtcaccagtcctcttccttcacttcttgttgtaattgcagccattttcattggattctttctagggaaattcatcttgtagagtgaagcatgcagagtgctgtttctttttttttttttctcttgaccagaaaaagatttgtttacctaccatttcattggtagtatggcccacggtgaccatttttttgtgtgtacagcgtcatataggctttgcctttaatgatctcttacggttagaaaacacaataaaaacaaactgttcggctactggacaggttgtatattaccagatcatcactagcagatgtcagttgcacattgagtcctttatgaaattcataaataaagaattgttctttctttgtggttttaataagagttcaagaattgttcagagtcttgtaaatgttattttaataatccctttaaattttatctgttgctgttacctcttgaaatatgatttatttagattgctaatcccactcattcaggaaatgccaagaggtattccttggggaaatggtgcctcttacagtgtaaatttttcctcctttacctttgctaatatcatggcagaatttttcttatcccttgtgaggcagttgttgactgagtttttcatccttacaatcctgtcccatggtatttaacataaaaaaaaataaaactgttaacagattcttgctcgataaaaaaaaaaaaaaaaaaaaaaaaaaacaaaaaaaaaaaaaaaaaaaaaaaaaaaaaaaaacaaaaaaacgaacgagcaagacgaagaacaaaaaaagacagagagaaactgagataaaaaaaaacacaacagggggcgggcggacgaccaagcagacgacacgcagtggaaataagcagaaaatgtagtgtgaagcgccaccgaggagagataacagaagggaagaggaaaaacagacgagaggagaaaagagaaaagagagaagagagacaaatggcgggagagaaaagaaaagaacaact

SEQ ID NO: 436370 - DNA, 6163 bp, Homo sapiens
gccaatctacacacgtcactgaagcgagccaagacgagcgacaacccgtctcaggggccatggcgaagcacgagcagatcctggtcctcgatccgcccacagacctcaaattcaaaggccccttcacagatgtagtcactacaaatcttaaattgcgaaatccatcggatagaaaagtgtgtttcaaagtgaagactacagcacctcgccggtactgtgtgaggcccaacagtggaattattgacccagggtcaactgtgactgtttcagtaatgctacagccctttgactatgatccgaatgaaaagagtaaacacaagtttatggtacagacaatttttgctccaccaaacacttcagatatggaagctgtgtggaaagaggcaaaacctgatgaattaatggattccaaattgagatgcgtatttgaaatgcccaatgaaaatgataaattgaatgatatggaacctagcaaagctgttccactgaatgcatctaagcaagatggacctatgccaaaaccacacagtgtttcacttaatgataccgaaacaaggaaactaatggaagagtgtaaaagacttcagggagaaatgatgaagctatcagaagaaaatcggcacctgagagatgaaggtttaaggctcagaaaggtagcacattcggataaacctggatcaacctcaactgcatccttcagagataatgtcaccagtcctcttccttcacttcttgttgtaattgcagccattttcattggattctttctagggaaattcatcttgtagagtgaagcatgcagagtgctgtttctttttttttttttctcttgaccagaaaaagatttgtttacctaccatttcattggtagtatggcccacggtgaccatttttttgtgtgtacagcgtcatataggctttgcctttaatgatctcttacggttagaaaacacaataaaaacaaactgttcggctactggacaggttgtatattaccagatcatcactagcagatgtcagttgcacattgagtcctttatgaaattcataaataaagaattgttctttctttgtggttttaataagagttcaagaattgttcagagtcttgtaaatgttattttaataatccctttaaattttatctgttgctgttacctcttgaaatatgatttatttagattgctaatcccactcattcaggaaatgccaagaggtattccttggggaaatggtgcctcttacagtgtaaatttttcctcctttacctttgctaatatcatggcagaatttttcttatcccttgtgaggcagttgttgactgagtttttcatccttacaatcctgtcccatggtatttaacataaaaaaaaataaaactgttaacagattcttgctcgatagcttgtttgtgtctgtcgtgttattagagggaactccactatatatggtcacttgaaattatgatgcaaaggtttctcttgcattgaaaccctcttggatattacagtatttttaattgaaagtcctaattctgttaaggaaaggagttgattaaattttaaggtaccactggtattttgggagattataatcagtttgttttcaagataatagaaaataaggtccatgagaatagaagttatgtgatttcagtgagttgatgtgtacagcatggctgtgctccatctgatttaccccattcttaagttctgagagtatgttctcaaggaagatttaactctctttggttttaaattactttttaaccagcctaataaataagtcttactacttttcataatatttcataatagttaaaagtaggtgtttttttcgtgctcaatttggcactcaaaataatgttcattatggaagtttggtaatactgagcaagcctgtggaattttctttatgaaaaatgattttagcctttgcaaatgttaaccatgtgaaacacattttcagtataagtatgcgttacagggtttgatactttcctgcacttaggtttgtcctattcttcatttattcatactaggatagaaaattttggaatcagaaaatagatccagtgtttagctacatacaatctagtacaagtgaatttttattcttaaacataggtgtgttggctctttttttaaaagatgcgctctacctgaaaaggaaattggattttagaactggatgtggtgcagtgaagtattttaggcccaggtctgtgtacacattttatagaagaatgaagtactctgaagtattttggttgccttttcatttcaactgtgttttgaatttgtcagatcacacatatattgtgttattgggcgctgtggtatcttttataaaacctcttgcttgtgtgcaaaagttcctaaaaggaaacacaagtaatgcctatccattactagcatgctatgctgcatgctttactgccattgctgtatgctttactgtctttgtaaaaatccccctctccccttttctggtaactggaaaagcatgctaaaaatagtcttatattttcaccccataagtgcagaatcagtaattccttggcttaaagctcttatataatcaatattattggtggtaaataccaagtttggtatctcatagctatctttttttaaagaaattaagttcttgaaaatttagccaaatcccgttttatgggaatgctctttagaattcattttgttcagcccctttgttctatggttgagaaatctgaggccttacgaaggttaagagaactttccccgtgtctcacaggtaggtagaggcagagctggaactagatatctggtctgttgactctagctcagtgtcttctggtaactgttgaaaattgtcttagtttgagagatggctgaaataatgaacataaaatgctatttataataacaagtatatgtgaaatttcttattgtaagactactaccggcttactgttgaatagtttggttatagtgtttaggctagaaatgcctcccacattggtaataaacattacaaaatacaatgtatttttaggtaggcattttataaaatgcattatgccatggttgcttttgagatagattgtagtctgggtagcatctttaaaatgtatgtgggcttaactgttgttcatatcaggagatgctctgattgtataggtgagactctgtttctgttatttttaattgctgtatgaaatgtgatcagattattttactaccaacagttatagtttgaaagtccaactgtattaattgactgataatatgataatatagagattaaattgtttgtcttcattccttatatgtttagaagtttttgctttgtctgcctgcttacttgtatatgtaagcatgagggaaatacactgttgctaatactgaaattacaatcaagtaactaaggccttgagttcatatgtgacactgaatgcactagcttccttcgttctataactaatgtaccttaacttcccccattcttatatttacaagaagctaagtcattatgttctgagtgtgtggtatgttcccttaaaaaaaaatgacacttggaagaaaaatgtatgaaattcagaaattccgatcaaagaaaagtaattctttcttttttttttggagacagagtcttgctttgttgcccaggctggagggcagtggtgtgatctcacctcactgcagcttccgcctcctgggttcaagtgattctcatggctcagccgcctgagtagctgggattacaggtgtgagccaacaagcccggctaatttttgtatttttagtagagacaaggtttcaccatgttggtcaggctgggctcaaactcctgaatccgcctgcctcggcctcccaaagtgctgggattacaggtgtgagctgccgcacccagccaagaaaaataatactcttaaatacttagatgttcacctaaagttgatattatttggtatgggaattacttttgaactgtaatctttcagattacaccactttgaaaacaagttttaacagtagggtaaaaatatagtttttgagggtattcccaacttgtgatcttctaccactttagagacattcaagtaatagttttcttagagctttgcacattcctattcactgagattttaaaaatttcacctttattagagggaaggatcaatgcttattaccatttggaaaaacgaagatcagaaggtaaatgatctttattttctagctttaaagggaaattaaaccattcatgaataaactttaaaaatgtgaagtgtccttttccttttcacaatacaaaaaaaatttcaacagattgtgtggtttgtgcatttatatcctgttaagcattaatagctaatcactgggacttgaattctgatggcagatagtctcttgcttagtgagatggagttaactattttttagtaggaagtgagaacagctgattttcatgccacgtttcatagccccacttttggtagactaccaccacgcttcttcgcgtaacagttggcatcttgggaatgaatgcccagccgctcgtgggttggtgcaaagaagtataaacatatatcactaaggaaaaagaaagtttgtcttgcccttctgacacagtgtgtgcacttcaggcaatttttggaaaatataaaaaattccaaattctgcctttcagcagcatcaattgctaggaacatttcattcatttccctgtaatattaatgttctttaagcataatcactaattataagttgtatcctatttttttccagcttaatttctgtggtttattgaaaaccaagtataaatgtgactaaaagcattttgctttgtttttatagttaactttcttaaggttatggacattttataatgtaacatttgattggcctggcctcttgacaattcccttctagttatgcatatcctcctgttgccacatttcttgttttaaaactcagtttcttgttttccagttgttgctatgtataacacccatcttgaaagagagtatataggaagttattcagataacttttgtagtagtgatattcaactatagcagtaccttaactcatgatgagcttaggaacataaaagataattgttgcttgaatagcacccccagagatactgacctaattggtctggggtggagatctggcatggtagtttttttcaagctccaatcatcggccagacagttgctttatgtaggtttttaaatgccaaaggcagatatgaagtagatttaattaagacttgacttcagcaatacaggggaacttaaaatacttatttttctttaaactgcaggagtcactgttaggtattgcttaaaaaaaattgcataaaagctttgcttgtcaagttaggattgctggaataccactaaagatttttgacttgtgaataaatgagctgtcatcgcaaaaaggcgatttgagaaatgtgggcttcagtattaattgccattttgctgacacccagtgtacctacctacctgagaaatttattttgtccatcatgtatttctcaaagcaaaaggtggttttcaagtataatgtcgttttcaacatgcttattacttagttttacgtcagctcatttcatcatcattgataacttgtgaaatacttatctccatcctatggaataggggagacgggtttagacaggttcaattagctcaagtctacacagctgaagtagcagagaaagtgggatctagatggtctgatcctagtgatctaccatatgaaggacatagtttgtgtcctggtccaagtcaaatattgactcctcacaaacagtaagtatggcaattttgtgatgcctttgattccactttacatggagtactattatttgtgaaatgtctttaagatttttggtcttaaatttttgaagactgctttccccctttatctcccagaaaattgagaagaagtaaactcctgcccactaacaatctcagtccgtgaacaaaaccaacatgaacattcctaaacaagagtgtgtgttactctaagaagaaggctatagaatttatggaaatggcttatgtaacctacaagactggagaacagaatgtgactggccttttctaatggtcctttaagatttaatgattaaagcaagagttttttataattgactttgt

SEQ ID NO: 436371 - DNA, 6342 bp, Homo sapiens
tttcatgcccttgttttaaaaaaactactttttttggcctcaaaaaaatcaagggtgtaatttttaataaattgttaatcctatgttttgtaattttcattttaggagcttgacttatttttttctctctcataaaaacacatttgttttaattgtaggagaaattttctcagcattttgcatgttctttctaatctttgttggtctgaatatattggtagtaattactgtaattattcaacaaaaagcatatccgttcaaaaatttttccactatgtcttttttctagtggctactgttttagttttctagttgaatatctctgacaagctttcgtatggttttgttatattaagtgtgtttcaaagtgaagactacagcacctcgccggtactgtgtgaggcccaacagtggaattattgacccagggtcaactgtgactgtttcagtaatgctacagccctttgactatgatccgaatgaaaagagtaaacacaagtttatggtacagacaatttttgctccaccaaacacttcagatatggaagctgtgtggaaagaggcaaaacctgatgaattaatggattccaaattgagatgcgtatttgaaatgcccaatgaaaatgataaattgaatgatatggaacctagcaaagctgttccactgaatgcatctaagcaagatggacctatgccaaaaccacacagtgtttcacttaatgataccgaaacaaggaaactaatggaagagtgtaaaagacttcagggagaaatgatgaagctatcagaagaaaatcggcacctgagagatgaaggtttaaggctcagaaaggtagcacattcggataaacctggatcaacctcaactgcatccttcagagataatgtcaccagtcctcttccttcacttcttgttgtaattgcagccattttcattggattctttctagggaaattcatcttgtagagtgaagcatgcagagtgctgtttctttttttttttttctcttgaccagaaaaagatttgtttacctaccatttcattggtagtatggcccacggtgaccatttttttgtgtgtacagcgtcatataggctttgcctttaatgatctcttacggttagaaaacacaataaaaacaaactgttcggctactggacaggttgtatattaccagatcatcactagcagatgtcagttgcacattgagtcctttatgaaattcataaataaagaattgttctttctttgtggttttaataagagttcaagaattgttcagagtcttgtaaatgttattttaataatccctttaaattttatctgttgctgttacctcttgaaatatgatttatttagattgctaatcccactcattcaggaaatgccaagaggtattccttggggaaatggtgcctcttacagtgtaaatttttcctcctttacctttgctaatatcatggcagaatttttcttatcccttgtgaggcagttgttgactgagtttttcatccttacaatcctgtcccatggtatttaacataaaaaaaaataaaactgttaacagattcttgctcgatagcttgtttgtgtctgtcgtgttattagagggaactccactatatatggtcacttgaaattatgatgcaaaggtttctcttgcattgaaaccctcttggatattacagtatttttaattgaaagtcctaattctgttaaggaaaggagttgattaaattttaaggtaccactggtattttgggagattataatcagtttgttttcaagataatagaaaataaggtccatgagaatagaagttatgtgatttcagtgagttgatgtgtacagcatggctgtgctccatctgatttaccccattcttaagttctgagagtatgttctcaaggaagatttaactctctttggttttaaattactttttaaccagcctaataaataagtcttactacttttcataatatttcataatagttaaaagtaggtgtttttttcgtgctcaatttggcactcaaaataatgttcattatggaagtttggtaatactgagcaagcctgtggaattttctttatgaaaaatgattttagcctttgcaaatgttaaccatgtgaaacacattttcagtataagtatgcgttacagggtttgatactttcctgcacttaggtttgtcctattcttcatttattcatactaggatagaaaattttggaatcagaaaatagatccagtgtttagctacatacaatctagtacaagtgaatttttattcttaaacataggtgtgttggctctttttttaaaagatgcgctctacctgaaaaggaaattggattttagaactggatgtggtgcagtgaagtattttaggcccaggtctgtgtacacattttatagaagaatgaagtactctgaagtattttggttgccttttcatttcaactgtgttttgaatttgtcagatcacacatatattgtgttattgggcgctgtggtatcttttataaaacctcttgcttgtgtgcaaaagttcctaaaaggaaacacaagtaatgcctatccattactagcatgctatgctgcatgctttactgccattgctgtatgctttactgtctttgtaaaaatccccctctccccttttctggtaactggaaaagcatgctaaaaatagtcttatattttcaccccataagtgcagaatcagtaattccttggcttaaagctcttatataatcaatattattggtggtaaataccaagtttggtatctcatagctatctttttttaaagaaattaagttcttgaaaatttagccaaatcccgttttatgggaatgctctttagaattcattttgttcagcccctttgttctatggttgagaaatctgaggccttacgaaggttaagagaactttccccgtgtctcacaggtaggtagaggcagagctggaactagatatctggtctgttgactctagctcagtgtcttctggtaactgttgaaaattgtcttagtttgagagatggctgaaataatgaacataaaatgctatttataataacaagtatatgtgaaatttcttattgtaagactactaccggcttactgttgaatagtttggttatagtgtttaggctagaaatgcctcccacattggtaataaacattacaaaatacaatgtatttttaggtaggcattttataaaatgcattatgccatggttgcttttgagatagattgtagtctgggtagcatctttaaaatgtatgtgggcttaactgttgttcatatcaggagatgctctgattgtataggtgagactctgtttctgttatttttaattgctgtatgaaatgtgatcagattattttactaccaacagttatagtttgaaagtccaactgtattaattgactgataatatgataatatagagattaaattgtttgtcttcattccttatatgtttagaagtttttgctttgtctgcctgcttacttgtatatgtaagcatgagggaaatacactgttgctaatactgaaattacaatcaagtaactaaggccttgagttcatatgtgacactgaatgcactagcttccttcgttctataactaatgtaccttaacttcccccattcttatatttacaagaagctaagtcattatgttctgagtgtgtggtatgttcccttaaaaaaaaatgacacttggaagaaaaatgtatgaaattcagaaattccgatcaaagaaaagtaattctttcttttttttttggagacagagtcttgctttgttgcccaggctggagggcagtggtgtgatctcacctcactgcagcttccgcctcctgggttcaagtgattctcatggctcagccgcctgagtagctgggattacaggtgtgagccaacaagcccggctaatttttgtatttttagtagagacaaggtttcaccatgttggtcaggctgggctcaaactcctgaatccgcctgcctcggcctcccaaagtgctgggattacaggtgtgagctgccgcacccagccaagaaaaataatactcttaaatacttagatgttcacctaaagttgatattatttggtatgggaattacttttgaactgtaatctttcagattacaccactttgaaaacaagttttaacagtagggtaaaaatatagtttttgagggtattcccaacttgtgatcttctaccactttagagacattcaagtaatagttttcttagagctttgcacattcctattcactgagattttaaaaatttcacctttattagagggaaggatcaatgcttattaccatttggaaaaacgaagatcagaaggtaaatgatctttattttctagctttaaagggaaattaaaccattcatgaataaactttaaaaatgtgaagtgtccttttccttttcacaatacaaaaaaaatttcaacagattgtgtggtttgtgcatttatatcctgttaagcattaatagctaatcactgggacttgaattctgatggcagatagtctcttgcttagtgagatggagttaactattttttagtaggaagtgagaacagctgattttcatgccacgtttcatagccccacttttggtagactaccaccacgcttcttcgcgtaacagttggcatcttgggaatgaatgcccagccgctcgtgggttggtgcaaagaagtataaacatatatcactaaggaaaaagaaagtttgtcttgcccttctgacacagtgtgtgcacttcaggcaatttttggaaaatataaaaaattccaaattctgcctttcagcagcatcaattgctaggaacatttcattcatttccctgtaatattaatgttctttaagcataatcactaattataagttgtatcctatttttttccagcttaatttctgtggtttattgaaaaccaagtataaatgtgactaaaagcattttgctttgtttttatagttaactttcttaaggttatggacattttataatgtaacatttgattggcctggcctcttgacaattcccttctagttatgcatatcctcctgttgccacatttcttgttttaaaactcagtttcttgttttccagttgttgctatgtataacacccatcttgaaagagagtatataggaagttattcagataacttttgtagtagtgatattcaactatagcagtaccttaactcatgatgagcttaggaacataaaagataattgttgcttgaatagcacccccagagatactgacctaattggtctggggtggagatctggcatggtagtttttttcaagctccaatcatcggccagacagttgctttatgtaggtttttaaatgccaaaggcagatatgaagtagatttaattaagacttgacttcagcaatacaggggaacttaaaatacttatttttctttaaactgcaggagtcactgttaggtattgcttaaaaaaaattgcataaaagctttgcttgtcaagttaggattgctggaataccactaaagatttttgacttgtgaataaatgagctgtcatcgcaaaaaggcgatttgagaaatgtgggcttcagtattaattgccattttgctgacacccagtgtacctacctacctgagaaatttattttgtccatcatgtatttctcaaagcaaaaggtggttttcaagtataatgtcgttttcaacatgcttattacttagttttacgtcagctcatttcatcatcattgataacttgtgaaatacttatctccatcctatggaataggggagacgggtttagacaggttcaattagctcaagtctacacagctgaagtagcagagaaagtgggatctagatggtctgatcctagtgatctaccatatgaaggacatagtttgtgtcctggtccaagtcaaatattgactcctcacaaacagtaagtatggcaattttgtgatgcctttgattccactttacatggagtactattatttgtgaaatgtctttaagatttttggtcttaaatttttgaagactgctttccccctttatctcccagaaaattgagaagaagtaaactcctgcccactaacaatctcagtccgtgaacaaaaccaacatgaacattcctaaacaagagtgtgtgttactctaagaagaaggctatagaatttatggaaatggcttatgtaacctacaagactggagaacagaatgtgactggccttttctaatggtcctttaagatttaatgattaaagcaagagttttttataattgactttgt

SEQ ID NO: 436372 - DNA, 6346 bp, Homo sapiens
acgtaggcacgcagaggccgtcacgtgggtcgccgaggctcgcaagtgcgcgtggccgtggcggctggtgtggggttgagtcagttgtgggacccggagctgctgacccagcgggtggcccaccgaaccggtgacacagcggcaggcgttagggctcgggagccgcgagcctggcctcgtcctagagctcggccgagccgtcgccgccgtcgtcccccgcccccagtcagcaaaccgccgccgcgggcgcgcccccgctctgcgctgtctctccgatggcgtccgcctcaggggccatggcgaagcacgagcagatcctggtcctcgatccgcccacagacctcaaattcaaaggccccttcacagatgtagtcactacaaatcttaaattgcgaaatccatcggatagaaaagtgtgtttcaaagtgaagactacagcacctcgccggtactgtgtgaggcccaacagtggaattattgacccagggtcaactgtgactgtttcagtaatgctacagccctttgactatgatccgaatgaaaagagtaaacacaagtttatggtacagacaatttttgctccaccaaacacttcagatatggaagctgtgtggaaagaggcaaaacctgatgaattaatggattccaaattgagatgcgtatttgaaatgcccaatgaaaatgataaattgaatgatatggaacctagcaaagctgttccactgaatgcatctaagcaagatggacctatgccaaaaccacacagtgtttcacttaatgataccgaaacaaggaaactaatggaagagtgtaaaagacttcagggagaaatgatgaagctatcagaagataaacctggatcaacctcaactgcatccttcagagataatgtcaccagtcctcttccttcacttcttgttgtaattgcagccattttcattggattctttctagggaaattcatcttgtagagtgaagcatgcagagtgctgtttctttttttttttttctcttgaccagaaaaagatttgtttacctaccatttcattggtagtatggcccacggtgaccatttttttgtgtgtacagcgtcatataggctttgcctttaatgatctcttacggttagaaaacacaataaaaacaaactgttcggctactggacaggttgtatattaccagatcatcactagcagatgtcagttgcacattgagtcctttatgaaattcataaataaagaattgttctttctttgtggttttaataagagttcaagaattgttcagagtcttgtaaatgttattttaataatccctttaaattttatctgttgctgttacctcttgaaatatgatttatttagattgctaatcccactcattcaggaaatgccaagaggtattccttggggaaatggtgcctcttacagtgtaaatttttcctcctttacctttgctaatatcatggcagaatttttcttatcccttgtgaggcagttgttgactgagtttttcatccttacaatcctgtcccatggtatttaacataaaaaaaaataaaactgttaacagattcttgctcgatagcttgtttgtgtctgtcgtgttattagagggaactccactatatatggtcacttgaaattatgatgcaaaggtttctcttgcattgaaaccctcttggatattacagtatttttaattgaaagtcctaattctgttaaggaaaggagttgattaaattttaaggtaccactggtattttgggagattataatcagtttgttttcaagataatagaaaataaggtccatgagaatagaagttatgtgatttcagtgagttgatgtgtacagcatggctgtgctccatctgatttaccccattcttaagttctgagagtatgttctcaaggaagatttaactctctttggttttaaattactttttaaccagcctaataaataagtcttactacttttcataatatttcataatagttaaaagtaggtgtttttttcgtgctcaatttggcactcaaaataatgttcattatggaagtttggtaatactgagcaagcctgtggaattttctttatgaaaaatgattttagcctttgcaaatgttaaccatgtgaaacacattttcagtataagtatgcgttacagggtttgatactttcctgcacttaggtttgtcctattcttcatttattcatactaggatagaaaattttggaatcagaaaatagatccagtgtttagctacatacaatctagtacaagtgaatttttattcttaaacataggtgtgttggctctttttttaaaagatgcgctctacctgaaaaggaaattggattttagaactggatgtggtgcagtgaagtattttaggcccaggtctgtgtacacattttatagaagaatgaagtactctgaagtattttggttgccttttcatttcaactgtgttttgaatttgtcagatcacacatatattgtgttattgggcgctgtggtatcttttataaaacctcttgcttgtgtgcaaaagttcctaaaaggaaacacaagtaatgcctatccattactagcatgctatgctgcatgctttactgccattgctgtatgctttactgtctttgtaaaaatccccctctccccttttctggtaactggaaaagcatgctaaaaatagtcttatattttcaccccataagtgcagaatcagtaattccttggcttaaagctcttatataatcaatattattggtggtaaataccaagtttggtatctcatagctatctttttttaaagaaattaagttcttgaaaatttagccaaatcccgttttatgggaatgctctttagaattcattttgttcagcccctttgttctatggttgagaaatctgaggccttacgaaggttaagagaactttccccgtgtctcacaggtaggtagaggcagagctggaactagatatctggtctgttgactctagctcagtgtcttctggtaactgttgaaaattgtcttagtttgagagatggctgaaataatgaacataaaatgctatttataataacaagtatatgtgaaatttcttattgtaagactactaccggcttactgttgaatagtttggttatagtgtttaggctagaaatgcctcccacattggtaataaacattacaaaatacaatgtatttttaggtaggcattttataaaatgcattatgccatggttgcttttgagatagattgtagtctgggtagcatctttaaaatgtatgtgggcttaactgttgttcatatcaggagatgctctgattgtataggtgagactctgtttctgttatttttaattgctgtatgaaatgtgatcagattattttactaccaacagttatagtttgaaagtccaactgtattaattgactgataatatgataatatagagattaaattgtttgtcttcattccttatatgtttagaagtttttgctttgtctgcctgcttacttgtatatgtaagcatgagggaaatacactgttgctaatactgaaattacaatcaagtaactaaggccttgagttcatatgtgacactgaatgcactagcttccttcgttctataactaatgtaccttaacttcccccattcttatatttacaagaagctaagtcattatgttctgagtgtgtggtatgttcccttaaaaaaaaatgacacttggaagaaaaatgtatgaaattcagaaattccgatcaaagaaaagtaattctttcttttttttttggagacagagtcttgctttgttgcccaggctggagggcagtggtgtgatctcacctcactgcagcttccgcctcctgggttcaagtgattctcatggctcagccgcctgagtagctgggattacaggtgtgagccaacaagcccggctaatttttgtatttttagtagagacaaggtttcaccatgttggtcaggctgggctcaaactcctgaatccgcctgcctcggcctcccaaagtgctgggattacaggtgtgagctgccgcacccagccaagaaaaataatactcttaaatacttagatgttcacctaaagttgatattatttggtatgggaattacttttgaactgtaatctttcagattacaccactttgaaaacaagttttaacagtagggtaaaaatatagtttttgagggtattcccaacttgtgatcttctaccactttagagacattcaagtaatagttttcttagagctttgcacattcctattcactgagattttaaaaatttcacctttattagagggaaggatcaatgcttattaccatttggaaaaacgaagatcagaaggtaaatgatctttattttctagctttaaagggaaattaaaccattcatgaataaactttaaaaatgtgaagtgtccttttccttttcacaatacaaaaaaaatttcaacagattgtgtggtttgtgcatttatatcctgttaagcattaatagctaatcactgggacttgaattctgatggcagatagtctcttgcttagtgagatggagttaactattttttagtaggaagtgagaacagctgattttcatgccacgtttcatagccccacttttggtagactaccaccacgcttcttcgcgtaacagttggcatcttgggaatgaatgcccagccgctcgtgggttggtgcaaagaagtataaacatatatcactaaggaaaaagaaagtttgtcttgcccttctgacacagtgtgtgcacttcaggcaatttttggaaaatataaaaaattccaaattctgcctttcagcagcatcaattgctaggaacatttcattcatttccctgtaatattaatgttctttaagcataatcactaattataagttgtatcctatttttttccagcttaatttctgtggtttattgaaaaccaagtataaatgtgactaaaagcattttgctttgtttttatagttaactttcttaaggttatggacattttataatgtaacatttgattggcctggcctcttgacaattcccttctagttatgcatatcctcctgttgccacatttcttgttttaaaactcagtttcttgttttccagttgttgctatgtataacacccatcttgaaagagagtatataggaagttattcagataacttttgtagtagtgatattcaactatagcagtaccttaactcatgatgagcttaggaacataaaagataattgttgcttgaatagcacccccagagatactgacctaattggtctggggtggagatctggcatggtagtttttttcaagctccaatcatcggccagacagttgctttatgtaggtttttaaatgccaaaggcagatatgaagtagatttaattaagacttgacttcagcaatacaggggaacttaaaatacttatttttctttaaactgcaggagtcactgttaggtattgcttaaaaaaaattgcataaaagctttgcttgtcaagttaggattgctggaataccactaaagatttttgacttgtgaataaatgagctgtcatcgcaaaaaggcgatttgagaaatgtgggcttcagtattaattgccattttgctgacacccagtgtacctacctacctgagaaatttattttgtccatcatgtatttctcaaagcaaaaggtggttttcaagtataatgtcgttttcaacatgcttattacttagttttacgtcagctcatttcatcatcattgataacttgtgaaatacttatctccatcctatggaataggggagacgggtttagacaggttcaattagctcaagtctacacagctgaagtagcagagaaagtgggatctagatggtctgatcctagtgatctaccatatgaaggacatagtttgtgtcctggtccaagtcaaatattgactcctcacaaacagtaagtatggcaattttgtgatgcctttgattccactttacatggagtactattatttgtgaaatgtctttaagatttttggtcttaaatttttgaagactgctttccccctttatctcccagaaaattgagaagaagtaaactcctgcccactaacaatctcagtccgtgaacaaaaccaacatgaacattcctaaacaagagtgtgtgttactctaagaagaaggctatagaatttatggaaatggcttatgtaacctacaagactggagaacagaatgtgactggccttttctaatggtcctttaagatttaatgattaaagcaagagttttttataattgactttgt

SEQ ID NO: 436373 - DNA, 6535 bp, Homo sapiens
acgtaggcacgcagaggccgtcacgtgggtcgccgaggctcgcaagtgcgcgtggccgtggcggctggtgtggggttgagtcagttgtgggacccggagctgctgacccagcgggtggcccaccgaaccggtgacacagcggcaggcgttagggctcgggagccgcgagcctggcctcgtcctagagctcggccgagccgtcgccgccgtcgtcccccgcccccagtcagcaaaccgccgccgcgggcgcgcccccgctctgcgctgtctctccgatggcgtccgcctcaggggccatggcgaagcacgagcagatcctggtcctcgatccgcccacagacctcaaattcaaaggccccttcacagatgtagtcactacaaatcttaaattgcgaaatccatcggatagaaaagtgtgtttcaaagtgaagactacagcacctcgccggtactgtgtgaggcccaacagtggaattattgacccagggtcaactgtgactgtttcagtaatgctacagccctttgactatgatccgaatgaaaagagtaaacacaagtttatggtacagacaatttttgctccaccaaacacttcagatatggaagctgtgtggaaagaggcaaaacctgatgaattaatggattccaaattgagatgcgtatttgaaatgcccaatgaaaatgataaattgggtataactccaccagggaatgctccgactgtcacttcaatgagcagcatcaacaacacagttgcaacacctgccagttatcacacgaaggatgaccccaggggactcagtgtgttgaaacaggagaaacagaagaatgatatggaacctagcaaagctgttccactgaatgcatctaagcaagatggacctatgccaaaaccacacagtgtttcacttaatgataccgaaacaaggaaactaatggaagagtgtaaaagacttcagggagaaatgatgaagctatcagaagaaaatcggcacctgagagatgaaggtttaaggctcagaaaggtagcacattcggataaacctggatcaacctcaactgcatccttcagagataatgtcaccagtcctcttccttcacttcttgttgtaattgcagccattttcattggattctttctagggaaattcatcttgtagagtgaagcatgcagagtgctgtttctttttttttttttctcttgaccagaaaaagatttgtttacctaccatttcattggtagtatggcccacggtgaccatttttttgtgtgtacagcgtcatataggctttgcctttaatgatctcttacggttagaaaacacaataaaaacaaactgttcggctactggacaggttgtatattaccagatcatcactagcagatgtcagttgcacattgagtcctttatgaaattcataaataaagaattgttctttctttgtggttttaataagagttcaagaattgttcagagtcttgtaaatgttattttaataatccctttaaattttatctgttgctgttacctcttgaaatatgatttatttagattgctaatcccactcattcaggaaatgccaagaggtattccttggggaaatggtgcctcttacagtgtaaatttttcctcctttacctttgctaatatcatggcagaatttttcttatcccttgtgaggcagttgttgactgagtttttcatccttacaatcctgtcccatggtatttaacataaaaaaaaataaaactgttaacagattcttgctcgatagcttgtttgtgtctgtcgtgttattagagggaactccactatatatggtcacttgaaattatgatgcaaaggtttctcttgcattgaaaccctcttggatattacagtatttttaattgaaagtcctaattctgttaaggaaaggagttgattaaattttaaggtaccactggtattttgggagattataatcagtttgttttcaagataatagaaaataaggtccatgagaatagaagttatgtgatttcagtgagttgatgtgtacagcatggctgtgctccatctgatttaccccattcttaagttctgagagtatgttctcaaggaagatttaactctctttggttttaaattactttttaaccagcctaataaataagtcttactacttttcataatatttcataatagttaaaagtaggtgtttttttcgtgctcaatttggcactcaaaataatgttcattatggaagtttggtaatactgagcaagcctgtggaattttctttatgaaaaatgattttagcctttgcaaatgttaaccatgtgaaacacattttcagtataagtatgcgttacagggtttgatactttcctgcacttaggtttgtcctattcttcatttattcatactaggatagaaaattttggaatcagaaaatagatccagtgtttagctacatacaatctagtacaagtgaatttttattcttaaacataggtgtgttggctctttttttaaaagatgcgctctacctgaaaaggaaattggattttagaactggatgtggtgcagtgaagtattttaggcccaggtctgtgtacacattttatagaagaatgaagtactctgaagtattttggttgccttttcatttcaactgtgttttgaatttgtcagatcacacatatattgtgttattgggcgctgtggtatcttttataaaacctcttgcttgtgtgcaaaagttcctaaaaggaaacacaagtaatgcctatccattactagcatgctatgctgcatgctttactgccattgctgtatgctttactgtctttgtaaaaatccccctctccccttttctggtaactggaaaagcatgctaaaaatagtcttatattttcaccccataagtgcagaatcagtaattccttggcttaaagctcttatataatcaatattattggtggtaaataccaagtttggtatctcatagctatctttttttaaagaaattaagttcttgaaaatttagccaaatcccgttttatgggaatgctctttagaattcattttgttcagcccctttgttctatggttgagaaatctgaggccttacgaaggttaagagaactttccccgtgtctcacaggtaggtagaggcagagctggaactagatatctggtctgttgactctagctcagtgtcttctggtaactgttgaaaattgtcttagtttgagagatggctgaaataatgaacataaaatgctatttataataacaagtatatgtgaaatttcttattgtaagactactaccggcttactgttgaatagtttggttatagtgtttaggctagaaatgcctcccacattggtaataaacattacaaaatacaatgtatttttaggtaggcattttataaaatgcattatgccatggttgcttttgagatagattgtagtctgggtagcatctttaaaatgtatgtgggcttaactgttgttcatatcaggagatgctctgattgtataggtgagactctgtttctgttatttttaattgctgtatgaaatgtgatcagattattttactaccaacagttatagtttgaaagtccaactgtattaattgactgataatatgataatatagagattaaattgtttgtcttcattccttatatgtttagaagtttttgctttgtctgcctgcttacttgtatatgtaagcatgagggaaatacactgttgctaatactgaaattacaatcaagtaactaaggccttgagttcatatgtgacactgaatgcactagcttccttcgttctataactaatgtaccttaacttcccccattcttatatttacaagaagctaagtcattatgttctgagtgtgtggtatgttcccttaaaaaaaaatgacacttggaagaaaaatgtatgaaattcagaaattccgatcaaagaaaagtaattctttcttttttttttggagacagagtcttgctttgttgcccaggctggagggcagtggtgtgatctcacctcactgcagcttccgcctcctgggttcaagtgattctcatggctcagccgcctgagtagctgggattacaggtgtgagccaacaagcccggctaatttttgtatttttagtagagacaaggtttcaccatgttggtcaggctgggctcaaactcctgaatccgcctgcctcggcctcccaaagtgctgggattacaggtgtgagctgccgcacccagccaagaaaaataatactcttaaatacttagatgttcacctaaagttgatattatttggtatgggaattacttttgaactgtaatctttcagattacaccactttgaaaacaagttttaacagtagggtaaaaatatagtttttgagggtattcccaacttgtgatcttctaccactttagagacattcaagtaatagttttcttagagctttgcacattcctattcactgagattttaaaaatttcacctttattagagggaaggatcaatgcttattaccatttggaaaaacgaagatcagaaggtaaatgatctttattttctagctttaaagggaaattaaaccattcatgaataaactttaaaaatgtgaagtgtccttttccttttcacaatacaaaaaaaatttcaacagattgtgtggtttgtgcatttatatcctgttaagcattaatagctaatcactgggacttgaattctgatggcagatagtctcttgcttagtgagatggagttaactattttttagtaggaagtgagaacagctgattttcatgccacgtttcatagccccacttttggtagactaccaccacgcttcttcgcgtaacagttggcatcttgggaatgaatgcccagccgctcgtgggttggtgcaaagaagtataaacatatatcactaaggaaaaagaaagtttgtcttgcccttctgacacagtgtgtgcacttcaggcaatttttggaaaatataaaaaattccaaattctgcctttcagcagcatcaattgctaggaacatttcattcatttccctgtaatattaatgttctttaagcataatcactaattataagttgtatcctatttttttccagcttaatttctgtggtttattgaaaaccaagtataaatgtgactaaaagcattttgctttgtttttatagttaactttcttaaggttatggacattttataatgtaacatttgattggcctggcctcttgacaattcccttctagttatgcatatcctcctgttgccacatttcttgttttaaaactcagtttcttgttttccagttgttgctatgtataacacccatcttgaaagagagtatataggaagttattcagataacttttgtagtagtgatattcaactatagcagtaccttaactcatgatgagcttaggaacataaaagataattgttgcttgaatagcacccccagagatactgacctaattggtctggggtggagatctggcatggtagtttttttcaagctccaatcatcggccagacagttgctttatgtaggtttttaaatgccaaaggcagatatgaagtagatttaattaagacttgacttcagcaatacaggggaacttaaaatacttatttttctttaaactgcaggagtcactgttaggtattgcttaaaaaaaattgcataaaagctttgcttgtcaagttaggattgctggaataccactaaagatttttgacttgtgaataaatgagctgtcatcgcaaaaaggcgatttgagaaatgtgggcttcagtattaattgccattttgctgacacccagtgtacctacctacctgagaaatttattttgtccatcatgtatttctcaaagcaaaaggtggttttcaagtataatgtcgttttcaacatgcttattacttagttttacgtcagctcatttcatcatcattgataacttgtgaaatacttatctccatcctatggaataggggagacgggtttagacaggttcaattagctcaagtctacacagctgaagtagcagagaaagtgggatctagatggtctgatcctagtgatctaccatatgaaggacatagtttgtgtcctggtccaagtcaaatattgactcctcacaaacagtaagtatggcaattttgtgatgcctttgattccactttacatggagtactattatttgtgaaatgtctttaagatttttggtcttaaatttttgaagactgctttccccctttatctcccagaaaattgagaagaagtaaactcctgcccactaacaatctcagtccgtgaacaaaaccaacatgaacattcctaaacaagagtgtgtgttactctaagaagaaggctatagaatttatggaaatggcttatgtaacctacaagactggagaacagaatgtgactggccttttctaatggtcctttaagatttaatgattaaagcaagagttttttataattgactttgt

SEQ ID NO: 436374 - DNA, 6155 bp, Homo sapiens
agcggataggccgctggccttccttcctcgcgcgctgggcgtgctcggggaacctccgaggccgcgagcagatcctggtcctagatcaggccagagacctcaaattcaagccccttcacagatgtagtcactacaaatcttaaattgcgaaatccatcggatagaaaagtgtgtttcaaagtgaagactacagcacctcgccggtactgtgtgaggcccaacagtggaattattgacccagggtcaactgtgactgtttcagtaatgctacagccctttgactatgatccgaatgaaaagagtaaacacaagtttatggtacagacaatttttgctccaccaaacacttcagatatggaagctgtgtggaaagaggcaaaacctgatgaattaatggattccaaattgagatgcgtatttgaaatgcccaatgaaaatgataaattgaatgatatggaacctagcaaagctgttccactgaatgcatctaagcaagatggacctatgccaaaaccacacagtgtttcacttaatgataccgaaacaaggaaactaatggaagagtgtaaaagacttcagggagaaatgatgaagctatcagaagaaaatcggcacctgagagatgaaggtttaaggctcagaaaggtagcacattcggataaacctggatcaacctcaactgcatccttcagagataatgtcaccagtcctcttccttcacttcttgttgtaattgcagccattttcattggattctttctagggaaattcatcttgtagagtgaagcatgcagagtgctgtttctttttttttttttctcttgaccagaaaaagatttgtttacctaccatttcattggtagtatggcccacggtgaccatttttttgtgtgtacagcgtcatataggctttgcctttaatgatctcttacggttagaaaacacaataaaaacaaactgttcggctactggacaggttgtatattaccagatcatcactagcagatgtcagttgcacattgagtcctttatgaaattcataaataaagaattgttctttctttgtggttttaataagagttcaagaattgttcagagtcttgtaaatgttattttaataatccctttaaattttatctgttgctgttacctcttgaaatatgatttatttagattgctaatcccactcattcaggaaatgccaagaggtattccttggggaaatggtgcctcttacagtgtaaatttttcctcctttacctttgctaatatcatggcagaatttttcttatcccttgtgaggcagttgttgactgagtttttcatccttacaatcctgtcccatggtatttaacataaaaaaaaataaaactgttaacagattcttgctcgatagcttgtttgtgtctgtcgtgttattagagggaactccactatatatggtcacttgaaattatgatgcaaaggtttctcttgcattgaaaccctcttggatattacagtatttttaattgaaagtcctaattctgttaaggaaaggagttgattaaattttaaggtaccactggtattttgggagattataatcagtttgttttcaagataatagaaaataaggtccatgagaatagaagttatgtgatttcagtgagttgatgtgtacagcatggctgtgctccatctgatttaccccattcttaagttctgagagtatgttctcaaggaagatttaactctctttggttttaaattactttttaaccagcctaataaataagtcttactacttttcataatatttcataatagttaaaagtaggtgtttttttcgtgctcaatttggcactcaaaataatgttcattatggaagtttggtaatactgagcaagcctgtggaattttctttatgaaaaatgattttagcctttgcaaatgttaaccatgtgaaacacattttcagtataagtatgcgttacagggtttgatactttcctgcacttaggtttgtcctattcttcatttattcatactaggatagaaaattttggaatcagaaaatagatccagtgtttagctacatacaatctagtacaagtgaatttttattcttaaacataggtgtgttggctctttttttaaaagatgcgctctacctgaaaaggaaattggattttagaactggatgtggtgcagtgaagtattttaggcccaggtctgtgtacacattttatagaagaatgaagtactctgaagtattttggttgccttttcatttcaactgtgttttgaatttgtcagatcacacatatattgtgttattgggcgctgtggtatcttttataaaacctcttgcttgtgtgcaaaagttcctaaaaggaaacacaagtaatgcctatccattactagcatgctatgctgcatgctttactgccattgctgtatgctttactgtctttgtaaaaatccccctctccccttttctggtaactggaaaagcatgctaaaaatagtcttatattttcaccccataagtgcagaatcagtaattccttggcttaaagctcttatataatcaatattattggtggtaaataccaagtttggtatctcatagctatctttttttaaagaaattaagttcttgaaaatttagccaaatcccgttttatgggaatgctctttagaattcattttgttcagcccctttgttctatggttgagaaatctgaggccttacgaaggttaagagaactttccccgtgtctcacaggtaggtagaggcagagctggaactagatatctggtctgttgactctagctcagtgtcttctggtaactgttgaaaattgtcttagtttgagagatggctgaaataatgaacataaaatgctatttataataacaagtatatgtgaaatttcttattgtaagactactaccggcttactgttgaatagtttggttatagtgtttaggctagaaatgcctcccacattggtaataaacattacaaaatacaatgtatttttaggtaggcattttataaaatgcattatgccatggttgcttttgagatagattgtagtctgggtagcatctttaaaatgtatgtgggcttaactgttgttcatatcaggagatgctctgattgtataggtgagactctgtttctgttatttttaattgctgtatgaaatgtgatcagattattttactaccaacagttatagtttgaaagtccaactgtattaattgactgataatatgataatatagagattaaattgtttgtcttcattccttatatgtttagaagtttttgctttgtctgcctgcttacttgtatatgtaagcatgagggaaatacactgttgctaatactgaaattacaatcaagtaactaaggccttgagttcatatgtgacactgaatgcactagcttccttcgttctataactaatgtaccttaacttcccccattcttatatttacaagaagctaagtcattatgttctgagtgtgtggtatgttcccttaaaaaaaaatgacacttggaagaaaaatgtatgaaattcagaaattccgatcaaagaaaagtaattctttcttttttttttggagacagagtcttgctttgttgcccaggctggagggcagtggtgtgatctcacctcactgcagcttccgcctcctgggttcaagtgattctcatggctcagccgcctgagtagctgggattacaggtgtgagccaacaagcccggctaatttttgtatttttagtagagacaaggtttcaccatgttggtcaggctgggctcaaactcctgaatccgcctgcctcggcctcccaaagtgctgggattacaggtgtgagctgccgcacccagccaagaaaaataatactcttaaatacttagatgttcacctaaagttgatattatttggtatgggaattacttttgaactgtaatctttcagattacaccactttgaaaacaagttttaacagtagggtaaaaatatagtttttgagggtattcccaacttgtgatcttctaccactttagagacattcaagtaatagttttcttagagctttgcacattcctattcactgagattttaaaaatttcacctttattagagggaaggatcaatgcttattaccatttggaaaaacgaagatcagaaggtaaatgatctttattttctagctttaaagggaaattaaaccattcatgaataaactttaaaaatgtgaagtgtccttttccttttcacaatacaaaaaaaatttcaacagattgtgtggtttgtgcatttatatcctgttaagcattaatagctaatcactgggacttgaattctgatggcagatagtctcttgcttagtgagatggagttaactattttttagtaggaagtgagaacagctgattttcatgccacgtttcatagccccacttttggtagactaccaccacgcttcttcgcgtaacagttggcatcttgggaatgaatgcccagccgctcgtgggttggtgcaaagaagtataaacatatatcactaaggaaaaagaaagtttgtcttgcccttctgacacagtgtgtgcacttcaggcaatttttggaaaatataaaaaattccaaattctgcctttcagcagcatcaattgctaggaacatttcattcatttccctgtaatattaatgttctttaagcataatcactaattataagttgtatcctatttttttccagcttaatttctgtggtttattgaaaaccaagtataaatgtgactaaaagcattttgctttgtttttatagttaactttcttaaggttatggacattttataatgtaacatttgattggcctggcctcttgacaattcccttctagttatgcatatcctcctgttgccacatttcttgttttaaaactcagtttcttgttttccagttgttgctatgtataacacccatcttgaaagagagtatataggaagttattcagataacttttgtagtagtgatattcaactatagcagtaccttaactcatgatgagcttaggaacataaaagataattgttgcttgaatagcacccccagagatactgacctaattggtctggggtggagatctggcatggtagtttttttcaagctccaatcatcggccagacagttgctttatgtaggtttttaaatgccaaaggcagatatgaagtagatttaattaagacttgacttcagcaatacaggggaacttaaaatacttatttttctttaaactgcaggagtcactgttaggtattgcttaaaaaaaattgcataaaagctttgcttgtcaagttaggattgctggaataccactaaagatttttgacttgtgaataaatgagctgtcatcgcaaaaaggcgatttgagaaatgtgggcttcagtattaattgccattttgctgacacccagtgtacctacctacctgagaaatttattttgtccatcatgtatttctcaaagcaaaaggtggttttcaagtataatgtcgttttcaacatgcttattacttagttttacgtcagctcatttcatcatcattgataacttgtgaaatacttatctccatcctatggaataggggagacgggtttagacaggttcaattagctcaagtctacacagctgaagtagcagagaaagtgggatctagatggtctgatcctagtgatctaccatatgaaggacatagtttgtgtcctggtccaagtcaaatattgactcctcacaaacagtaagtatggcaattttgtgatgcctttgattccactttacatggagtactattatttgtgaaatgtctttaagatttttggtcttaaatttttgaagactgctttccccctttatctcccagaaaattgagaagaagtaaactcctgcccactaacaatctcagtccgtgaacaaaaccaacatgaacattcctaaacaagagtgtgtgttactctaagaagaaggctatagaatttatggaaatggcttatgtaacctacaagactggagaacagaatgtgactggccttttctaatggtcctttaagatttaatgattaaagcaagagttttttataattgactttgt

SEQ ID NO: 436375 - DNA, 6097 bp, Homo sapiens
agtgcgtttacaaatttctttgaatagaagtgtaagtgagctacttgttgggccccttcacagatgtagtcactacaaatcttaaattgcgaaatccatcggatagaaaagtgtgtttcaaagtgaagactacagcacctcgccggtactgtgtgaggcccaacagtggaattattgacccagggtcaactgtgactgtttcagtaatgctacagccctttgactatgatccgaatgaaaagagtaaacacaagtttatggtacagacaatttttgctccaccaaacacttcagatatggaagctgtgtggaaagaggcaaaacctgatgaattaatggattccaaattgagatgcgtatttgaaatgcccaatgaaaatgataaattgaatgatatggaacctagcaaagctgttccactgaatgcatctaagcaagatggacctatgccaaaaccacacagtgtttcacttaatgataccgaaacaaggaaactaatggaagagtgtaaaagacttcagggagaaatgatgaagctatcagaagaaaatcggcacctgagagatgaaggtttaaggctcagaaaggtagcacattcggataaacctggatcaacctcaactgcatccttcagagataatgtcaccagtcctcttccttcacttcttgttgtaattgcagccattttcattggattctttctagggaaattcatcttgtagagtgaagcatgcagagtgctgtttctttttttttttttctcttgaccagaaaaagatttgtttacctaccatttcattggtagtatggcccacggtgaccatttttttgtgtgtacagcgtcatataggctttgcctttaatgatctcttacggttagaaaacacaataaaaacaaactgttcggctactggacaggttgtatattaccagatcatcactagcagatgtcagttgcacattgagtcctttatgaaattcataaataaagaattgttctttctttgtggttttaataagagttcaagaattgttcagagtcttgtaaatgttattttaataatccctttaaattttatctgttgctgttacctcttgaaatatgatttatttagattgctaatcccactcattcaggaaatgccaagaggtattccttggggaaatggtgcctcttacagtgtaaatttttcctcctttacctttgctaatatcatggcagaatttttcttatcccttgtgaggcagttgttgactgagtttttcatccttacaatcctgtcccatggtatttaacataaaaaaaaataaaactgttaacagattcttgctcgatagcttgtttgtgtctgtcgtgttattagagggaactccactatatatggtcacttgaaattatgatgcaaaggtttctcttgcattgaaaccctcttggatattacagtatttttaattgaaagtcctaattctgttaaggaaaggagttgattaaattttaaggtaccactggtattttgggagattataatcagtttgttttcaagataatagaaaataaggtccatgagaatagaagttatgtgatttcagtgagttgatgtgtacagcatggctgtgctccatctgatttaccccattcttaagttctgagagtatgttctcaaggaagatttaactctctttggttttaaattactttttaaccagcctaataaataagtcttactacttttcataatatttcataatagttaaaagtaggtgtttttttcgtgctcaatttggcactcaaaataatgttcattatggaagtttggtaatactgagcaagcctgtggaattttctttatgaaaaatgattttagcctttgcaaatgttaaccatgtgaaacacattttcagtataagtatgcgttacagggtttgatactttcctgcacttaggtttgtcctattcttcatttattcatactaggatagaaaattttggaatcagaaaatagatccagtgtttagctacatacaatctagtacaagtgaatttttattcttaaacataggtgtgttggctctttttttaaaagatgcgctctacctgaaaaggaaattggattttagaactggatgtggtgcagtgaagtattttaggcccaggtctgtgtacacattttatagaagaatgaagtactctgaagtattttggttgccttttcatttcaactgtgttttgaatttgtcagatcacacatatattgtgttattgggcgctgtggtatcttttataaaacctcttgcttgtgtgcaaaagttcctaaaaggaaacacaagtaatgcctatccattactagcatgctatgctgcatgctttactgccattgctgtatgctttactgtctttgtaaaaatccccctctccccttttctggtaactggaaaagcatgctaaaaatagtcttatattttcaccccataagtgcagaatcagtaattccttggcttaaagctcttatataatcaatattattggtggtaaataccaagtttggtatctcatagctatctttttttaaagaaattaagttcttgaaaatttagccaaatcccgttttatgggaatgctctttagaattcattttgttcagcccctttgttctatggttgagaaatctgaggccttacgaaggttaagagaactttccccgtgtctcacaggtaggtagaggcagagctggaactagatatctggtctgttgactctagctcagtgtcttctggtaactgttgaaaattgtcttagtttgagagatggctgaaataatgaacataaaatgctatttataataacaagtatatgtgaaatttcttattgtaagactactaccggcttactgttgaatagtttggttatagtgtttaggctagaaatgcctcccacattggtaataaacattacaaaatacaatgtatttttaggtaggcattttataaaatgcattatgccatggttgcttttgagatagattgtagtctgggtagcatctttaaaatgtatgtgggcttaactgttgttcatatcaggagatgctctgattgtataggtgagactctgtttctgttatttttaattgctgtatgaaatgtgatcagattattttactaccaacagttatagtttgaaagtccaactgtattaattgactgataatatgataatatagagattaaattgtttgtcttcattccttatatgtttagaagtttttgctttgtctgcctgcttacttgtatatgtaagcatgagggaaatacactgttgctaatactgaaattacaatcaagtaactaaggccttgagttcatatgtgacactgaatgcactagcttccttcgttctataactaatgtaccttaacttcccccattcttatatttacaagaagctaagtcattatgttctgagtgtgtggtatgttcccttaaaaaaaaatgacacttggaagaaaaatgtatgaaattcagaaattccgatcaaagaaaagtaattctttcttttttttttggagacagagtcttgctttgttgcccaggctggagggcagtggtgtgatctcacctcactgcagcttccgcctcctgggttcaagtgattctcatggctcagccgcctgagtagctgggattacaggtgtgagccaacaagcccggctaatttttgtatttttagtagagacaaggtttcaccatgttggtcaggctgggctcaaactcctgaatccgcctgcctcggcctcccaaagtgctgggattacaggtgtgagctgccgcacccagccaagaaaaataatactcttaaatacttagatgttcacctaaagttgatattatttggtatgggaattacttttgaactgtaatctttcagattacaccactttgaaaacaagttttaacagtagggtaaaaatatagtttttgagggtattcccaacttgtgatcttctaccactttagagacattcaagtaatagttttcttagagctttgcacattcctattcactgagattttaaaaatttcacctttattagagggaaggatcaatgcttattaccatttggaaaaacgaagatcagaaggtaaatgatctttattttctagctttaaagggaaattaaaccattcatgaataaactttaaaaatgtgaagtgtccttttccttttcacaatacaaaaaaaatttcaacagattgtgtggtttgtgcatttatatcctgttaagcattaatagctaatcactgggacttgaattctgatggcagatagtctcttgcttagtgagatggagttaactattttttagtaggaagtgagaacagctgattttcatgccacgtttcatagccccacttttggtagactaccaccacgcttcttcgcgtaacagttggcatcttgggaatgaatgcccagccgctcgtgggttggtgcaaagaagtataaacatatatcactaaggaaaaagaaagtttgtcttgcccttctgacacagtgtgtgcacttcaggcaatttttggaaaatataaaaaattccaaattctgcctttcagcagcatcaattgctaggaacatttcattcatttccctgtaatattaatgttctttaagcataatcactaattataagttgtatcctatttttttccagcttaatttctgtggtttattgaaaaccaagtataaatgtgactaaaagcattttgctttgtttttatagttaactttcttaaggttatggacattttataatgtaacatttgattggcctggcctcttgacaattcccttctagttatgcatatcctcctgttgccacatttcttgttttaaaactcagtttcttgttttccagttgttgctatgtataacacccatcttgaaagagagtatataggaagttattcagataacttttgtagtagtgatattcaactatagcagtaccttaactcatgatgagcttaggaacataaaagataattgttgcttgaatagcacccccagagatactgacctaattggtctggggtggagatctggcatggtagtttttttcaagctccaatcatcggccagacagttgctttatgtaggtttttaaatgccaaaggcagatatgaagtagatttaattaagacttgacttcagcaatacaggggaacttaaaatacttatttttctttaaactgcaggagtcactgttaggtattgcttaaaaaaaattgcataaaagctttgcttgtcaagttaggattgctggaataccactaaagatttttgacttgtgaataaatgagctgtcatcgcaaaaaggcgatttgagaaatgtgggcttcagtattaattgccattttgctgacacccagtgtacctacctacctgagaaatttattttgtccatcatgtatttctcaaagcaaaaggtggttttcaagtataatgtcgttttcaacatgcttattacttagttttacgtcagctcatttcatcatcattgataacttgtgaaatacttatctccatcctatggaataggggagacgggtttagacaggttcaattagctcaagtctacacagctgaagtagcagagaaagtgggatctagatggtctgatcctagtgatctaccatatgaaggacatagtttgtgtcctggtccaagtcaaatattgactcctcacaaacagtaagtatggcaattttgtgatgcctttgattccactttacatggagtactattatttgtgaaatgtctttaagatttttggtcttaaatttttgaagactgctttccccctttatctcccagaaaattgagaagaagtaaactcctgcccactaacaatctcagtccgtgaacaaaaccaacatgaacattcctaaacaagagtgtgtgttactctaagaagaaggctatagaatttatggaaatggcttatgtaacctacaagactggagaacagaatgtgactggccttttctaatggtcctttaagatttaatgattaaagcaagagttttttataattgactttgt

SEQ ID NO: 436376 - DNA, 6346 bp, Homo sapiens
acgtaggcacgcagaggccgtcacgtgggtcgccgaggctcgcaagtgcgcgtggccgtggcggctggtgtggggttgagtcagttgtgggacccggagctgctgacccagcgggtggcccaccgaaccggtgacacagcggcaggcgttagggctcgggagccgcgagcctggcctcgtcctagagctcggccgagccgtcgccgccgtcgtcccccgcccccagtcagcaaaccgccgccgcgggcgcgcccccgctctgcgctgtctctccgatggcgtccgcctcaggggccatggcgaagcacgagcagatcctggtcctcgatccgcccacagacctcaaattcaaaggccccttcacagatgtagtcactacaaatcttaaattgcgaaatccatcggatagaaaagtgtgtttcaaagtgaagactacagcacctcgccggtactgtgtgaggcccaacagtggaattattgacccagggtcaactgtgactgtttcagtaatgctacagccctttgactatgatccgaatgaaaagagtaaacacaagtttatggtacagacaatttttgctccaccaaacacttcagatatggaagctgtgtggaaagaggcaaaacctgatgaattaatggattccaaattgagatgcgtatttgaaatgcccaatgaaaatgataaattgaatgatatggaacctagcaaagctgttccactgaatgcatctaagcaagatggacctatgccaaaaccacacagtgtttcacttaatgataccgaaacaaggaaactaatggaagagtgtaaaagacttcagggagaaatgatgaagctatcagaagaaaatcggcacctgagagatgaaggtttaaggctcagaaaggtagcacattcggataaacctggatcaacctcaactgcatccttcagagataatgtcaccagtcctcttccttcacttcttgttgtaattgcagccattttcattggattctttctagggaaattcatcttgtagagtgaagcatgcagagtgctgtttctttttttttttttctcttgaccagaaaaagatttgtttacctaccatttcattggtagtatggcccacggtgaccatttttttgtgtgtacagcgtcatataggctttgcctttaatgatctcttacggttagaaaacacaataagatgtcagttgcacattgagtcctttatgaaattcataaataaagaattgttctttctttgtggttttaataagagttcaagaattgttcagagtcttgtaaatgttattttaataatccctttaaattttatctgttgctgttacctcttgaaatatgatttatttagattgctaatcccactcattcaggaaatgccaagaggtattccttggggaaatggtgcctcttacagtgtaaatttttcctcctttacctttgctaatatcatggcagaatttttcttatcccttgtgaggcagttgttgactgagtttttcatccttacaatcctgtcccatggtatttaacataaaaaaaaataaaactgttaacagattcttgctcgatagcttgtttgtgtctgtcgtgttattagagggaactccactatatatggtcacttgaaattatgatgcaaaggtttctcttgcattgaaaccctcttggatattacagtatttttaattgaaagtcctaattctgttaaggaaaggagttgattaaattttaaggtaccactggtattttgggagattataatcagtttgttttcaagataatagaaaataaggtccatgagaatagaagttatgtgatttcagtgagttgatgtgtacagcatggctgtgctccatctgatttaccccattcttaagttctgagagtatgttctcaaggaagatttaactctctttggttttaaattactttttaaccagcctaataaataagtcttactacttttcataatatttcataatagttaaaagtaggtgtttttttcgtgctcaatttggcactcaaaataatgttcattatggaagtttggtaatactgagcaagcctgtggaattttctttatgaaaaatgattttagcctttgcaaatgttaaccatgtgaaacacattttcagtataagtatgcgttacagggtttgatactttcctgcacttaggtttgtcctattcttcatttattcatactaggatagaaaattttggaatcagaaaatagatccagtgtttagctacatacaatctagtacaagtgaatttttattcttaaacataggtgtgttggctctttttttaaaagatgcgctctacctgaaaaggaaattggattttagaactggatgtggtgcagtgaagtattttaggcccaggtctgtgtacacattttatagaagaatgaagtactctgaagtattttggttgccttttcatttcaactgtgttttgaatttgtcagatcacacatatattgtgttattgggcgctgtggtatcttttataaaacctcttgcttgtgtgcaaaagttcctaaaaggaaacacaagtaatgcctatccattactagcatgctatgctgcatgctttactgccattgctgtatgctttactgtctttgtaaaaatccccctctccccttttctggtaactggaaaagcatgctaaaaatagtcttatattttcaccccataagtgcagaatcagtaattccttggcttaaagctcttatataatcaatattattggtggtaaataccaagtttggtatctcatagctatctttttttaaagaaattaagttcttgaaaatttagccaaatcccgttttatgggaatgctctttagaattcattttgttcagcccctttgttctatggttgagaaatctgaggccttacgaaggttaagagaactttccccgtgtctcacaggtaggtagaggcagagctggaactagatatctggtctgttgactctagctcagtgtcttctggtaactgttgaaaattgtcttagtttgagagatggctgaaataatgaacataaaatgctatttataataacaagtatatgtgaaatttcttattgtaagactactaccggcttactgttgaatagtttggttatagtgtttaggctagaaatgcctcccacattggtaataaacattacaaaatacaatgtatttttaggtaggcattttataaaatgcattatgccatggttgcttttgagatagattgtagtctgggtagcatctttaaaatgtatgtgggcttaactgttgttcatatcaggagatgctctgattgtataggtgagactctgtttctgttatttttaattgctgtatgaaatgtgatcagattattttactaccaacagttatagtttgaaagtccaactgtattaattgactgataatatgataatatagagattaaattgtttgtcttcattccttatatgtttagaagtttttgctttgtctgcctgcttacttgtatatgtaagcatgagggaaatacactgttgctaatactgaaattacaatcaagtaactaaggccttgagttcatatgtgacactgaatgcactagcttccttcgttctataactaatgtaccttaacttcccccattcttatatttacaagaagctaagtcattatgttctgagtgtgtggtatgttcccttaaaaaaaaatgacacttggaagaaaaatgtatgaaattcagaaattccgatcaaagaaaagtaattctttcttttttttttggagacagagtcttgctttgttgcccaggctggagggcagtggtgtgatctcacctcactgcagcttccgcctcctgggttcaagtgattctcatggctcagccgcctgagtagctgggattacaggtgtgagccaacaagcccggctaatttttgtatttttagtagagacaaggtttcaccatgttggtcaggctgggctcaaactcctgaatccgcctgcctcggcctcccaaagtgctgggattacaggtgtgagctgccgcacccagccaagaaaaataatactcttaaatacttagatgttcacctaaagttgatattatttggtatgggaattacttttgaactgtaatctttcagattacaccactttgaaaacaagttttaacagtagggtaaaaatatagtttttgagggtattcccaacttgtgatcttctaccactttagagacattcaagtaatagttttcttagagctttgcacattcctattcactgagattttaaaaatttcacctttattagagggaaggatcaatgcttattaccatttggaaaaacgaagatcagaaggtaaatgatctttattttctagctttaaagggaaattaaaccattcatgaataaactttaaaaatgtgaagtgtccttttccttttcacaatacaaaaaaaatttcaacagattgtgtggtttgtgcatttatatcctgttaagcattaatagctaatcactgggacttgaattctgatggcagatagtctcttgcttagtgagatggagttaactattttttagtaggaagtgagaacagctgattttcatgccacgtttcatagccccacttttggtagactaccaccacgcttcttcgcgtaacagttggcatcttgggaatgaatgcccagccgctcgtgggttggtgcaaagaagtataaacatatatcactaaggaaaaagaaagtttgtcttgcccttctgacacagtgtgtgcacttcaggcaatttttggaaaatataaaaaattccaaattctgcctttcagcagcatcaattgctaggaacatttcattcatttccctgtaatattaatgttctttaagcataatcactaattataagttgtatcctatttttttccagcttaatttctgtggtttattgaaaaccaagtataaatgtgactaaaagcattttgctttgtttttatagttaactttcttaaggttatggacattttataatgtaacatttgattggcctggcctcttgacaattcccttctagttatgcatatcctcctgttgccacatttcttgttttaaaactcagtttcttgttttccagttgttgctatgtataacacccatcttgaaagagagtatataggaagttattcagataacttttgtagtagtgatattcaactatagcagtaccttaactcatgatgagcttaggaacataaaagataattgttgcttgaatagcacccccagagatactgacctaattggtctggggtggagatctggcatggtagtttttttcaagctccaatcatcggccagacagttgctttatgtaggtttttaaatgccaaaggcagatatgaagtagatttaattaagacttgacttcagcaatacaggggaacttaaaatacttatttttctttaaactgcaggagtcactgttaggtattgcttaaaaaaaattgcataaaagctttgcttgtcaagttaggattgctggaataccactaaagatttttgacttgtgaataaatgagctgtcatcgcaaaaaggcgatttgagaaatgtgggcttcagtattaattgccattttgctgacacccagtgtacctacctacctgagaaatttattttgtccatcatgtatttctcaaagcaaaaggtggttttcaagtataatgtcgttttcaacatgcttattacttagttttacgtcagctcatttcatcatcattgataacttgtgaaatacttatctccatcctatggaataggggagacgggtttagacaggttcaattagctcaagtctacacagctgaagtagcagagaaagtgggatctagatggtctgatcctagtgatctaccatatgaaggacatagtttgtgtcctggtccaagtcaaatattgactcctcacaaacagtaagtatggcaattttgtgatgcctttgattccactttacatggagtactattatttgtgaaatgtctttaagatttttggtcttaaatttttgaagactgctttccccctttatctcccagaaaattgagaagaagtaaactcctgcccactaacaatctcagtccgtgaacaaaaccaacatgaacattcctaaacaagagtgtgtgttactctaagaagaaggctatagaatttatggaaatggcttatgtaacctacaagactggagaacagaatgtgactggccttttctaatggtcctttaagatttaatgattaaagcaagagttttttataattgactttgt

SEQ ID NO: 436377 - DNA, 5861 bp, Homo sapiens
gtcactttaagcccatgctccatctagccccaaagtccggcagtttccaatcggattagtttgctgtacccttggaaagaggcaaaacctgatgaattaatggattccaaattgagatgcgtatttgaaatgcccaatgaaaatgataaattgaatgatatggaacctagcaaagctgttccactgaatgcatctaagcaagatggacctatgccaaaaccacacagtgtttcacttaatgataccgaaacaaggaaactaatggaagagtgtaaaagacttcagggagaaatgatgaagctatcagaagaaaatcggcacctgagagatgaaggtttaaggctcagaaaggtagcacattcggataaacctggatcaacctcaactgcatccttcagagataatgtcaccagtcctcttccttcacttcttgttgtaattgcagccattttcattggattctttctagggaaattcatcttgtagagtgaagcatgcagagtgctgtttctttttttttttttctcttgaccagaaaaagatttgtttacctaccatttcattggtagtatggcccacggtgaccatttttttgtgtgtacagcgtcatataggctttgcctttaatgatctcttacggttagaaaacacaataaaaacaaactgttcggctactggacaggttgtatattaccagatcatcactagcagatgtcagttgcacattgagtcctttatgaaattcataaataaagaattgttctttctttgtggttttaataagagttcaagaattgttcagagtcttgtaaatgttattttaataatccctttaaattttatctgttgctgttacctcttgaaatatgatttatttagattgctaatcccactcattcaggaaatgccaagaggtattccttggggaaatggtgcctcttacagtgtaaatttttcctcctttacctttgctaatatcatggcagaatttttcttatcccttgtgaggcagttgttgactgagtttttcatccttacaatcctgtcccatggtatttaacataaaaaaaaataaaactgttaacagattcttgctcgatagcttgtttgtgtctgtcgtgttattagagggaactccactatatatggtcacttgaaattatgatgcaaaggtttctcttgcattgaaaccctcttggatattacagtatttttaattgaaagtcctaattctgttaaggaaaggagttgattaaattttaaggtaccactggtattttgggagattataatcagtttgttttcaagataatagaaaataaggtccatgagaatagaagttatgtgatttcagtgagttgatgtgtacagcatggctgtgctccatctgatttaccccattcttaagttctgagagtatgttctcaaggaagatttaactctctttggttttaaattactttttaaccagcctaataaataagtcttactacttttcataatatttcataatagttaaaagtaggtgtttttttcgtgctcaatttggcactcaaaataatgttcattatggaagtttggtaatactgagcaagcctgtggaattttctttatgaaaaatgattttagcctttgcaaatgttaaccatgtgaaacacattttcagtataagtatgcgttacagggtttgatactttcctgcacttaggtttgtcctattcttcatttattcatactaggatagaaaattttggaatcagaaaatagatccagtgtttagctacatacaatctagtacaagtgaatttttattcttaaacataggtgtgttggctctttttttaaaagatgcgctctacctgaaaaggaaattggattttagaactggatgtggtgcagtgaagtattttaggcccaggtctgtgtacacattttatagaagaatgaagtactctgaagtattttggttgccttttcatttcaactgtgttttgaatttgtcagatcacacatatattgtgttattgggcgctgtggtatcttttataaaacctcttgcttgtgtgcaaaagttcctaaaaggaaacacaagtaatgcctatccattactagcatgctatgctgcatgctttactgccattgctgtatgctttactgtctttgtaaaaatccccctctccccttttctggtaactggaaaagcatgctaaaaatagtcttatattttcaccccataagtgcagaatcagtaattccttggcttaaagctcttatataatcaatattattggtggtaaataccaagtttggtatctcatagctatctttttttaaagaaattaagttcttgaaaatttagccaaatcccgttttatgggaatgctctttagaattcattttgttcagcccctttgttctatggttgagaaatctgaggccttacgaaggttaagagaactttccccgtgtctcacaggtaggtagaggcagagctggaactagatatctggtctgttgactctagctcagtgtcttctggtaactgttgaaaattgtcttagtttgagagatggctgaaataatgaacataaaatgctatttataataacaagtatatgtgaaatttcttattgtaagactactaccggcttactgttgaatagtttggttatagtgtttaggctagaaatgcctcccacattggtaataaacattacaaaatacaatgtatttttaggtaggcattttataaaatgcattatgccatggttgcttttgagatagattgtagtctgggtagcatctttaaaatgtatgtgggcttaactgttgttcatatcaggagatgctctgattgtataggtgagactctgtttctgttatttttaattgctgtatgaaatgtgatcagattattttactaccaacagttatagtttgaaagtccaactgtattaattgactgataatatgataatatagagattaaattgtttgtcttcattccttatatgtttagaagtttttgctttgtctgcctgcttacttgtatatgtaagcatgagggaaatacactgttgctaatactgaaattacaatcaagtaactaaggccttgagttcatatgtgacactgaatgcactagcttccttcgttctataactaatgtaccttaacttcccccattcttatatttacaagaagctaagtcattatgttctgagtgtgtggtatgttcccttaaaaaaaaatgacacttggaagaaaaatgtatgaaattcagaaattccgatcaaagaaaagtaattctttcttttttttttggagacagagtcttgctttgttgcccaggctggagggcagtggtgtgatctcacctcactgcagcttccgcctcctgggttcaagtgattctcatggctcagccgcctgagtagctgggattacaggtgtgagccaacaagcccggctaatttttgtatttttagtagagacaaggtttcaccatgttggtcaggctgggctcaaactcctgaatccgcctgcctcggcctcccaaagtgctgggattacaggtgtgagctgccgcacccagccaagaaaaataatactcttaaatacttagatgttcacctaaagttgatattatttggtatgggaattacttttgaactgtaatctttcagattacaccactttgaaaacaagttttaacagtagggtaaaaatatagtttttgagggtattcccaacttgtgatcttctaccactttagagacattcaagtaatagttttcttagagctttgcacattcctattcactgagattttaaaaatttcacctttattagagggaaggatcaatgcttattaccatttggaaaaacgaagatcagaaggtaaatgatctttattttctagctttaaagggaaattaaaccattcatgaataaactttaaaaatgtgaagtgtccttttccttttcacaatacaaaaaaaatttcaacagattgtgtggtttgtgcatttatatcctgttaagcattaatagctaatcactgggacttgaattctgatggcagatagtctcttgcttagtgagatggagttaactattttttagtaggaagtgagaacagctgattttcatgccacgtttcatagccccacttttggtagactaccaccacgcttcttcgcgtaacagttggcatcttgggaatgaatgcccagccgctcgtgggttggtgcaaagaagtataaacatatatcactaaggaaaaagaaagtttgtcttgcccttctgacacagtgtgtgcacttcaggcaatttttggaaaatataaaaaattccaaattctgcctttcagcagcatcaattgctaggaacatttcattcatttccctgtaatattaatgttctttaagcataatcactaattataagttgtatcctatttttttccagcttaatttctgtggtttattgaaaaccaagtataaatgtgactaaaagcattttgctttgtttttatagttaactttcttaaggttatggacattttataatgtaacatttgattggcctggcctcttgacaattcccttctagttatgcatatcctcctgttgccacatttcttgttttaaaactcagtttcttgttttccagttgttgctatgtataacacccatcttgaaagagagtatataggaagttattcagataacttttgtagtagtgatattcaactatagcagtaccttaactcatgatgagcttaggaacataaaagataattgttgcttgaatagcacccccagagatactgacctaattggtctggggtggagatctggcatggtagtttttttcaagctccaatcatcggccagacagttgctttatgtaggtttttaaatgccaaaggcagatatgaagtagatttaattaagacttgacttcagcaatacaggggaacttaaaatacttatttttctttaaactgcaggagtcactgttaggtattgcttaaaaaaaattgcataaaagctttgcttgtcaagttaggattgctggaataccactaaagatttttgacttgtgaataaatgagctgtcatcgcaaaaaggcgatttgagaaatgtgggcttcagtattaattgccattttgctgacacccagtgtacctacctacctgagaaatttattttgtccatcatgtatttctcaaagcaaaaggtggttttcaagtataatgtcgttttcaacatgcttattacttagttttacgtcagctcatttcatcatcattgataacttgtgaaatacttatctccatcctatggaataggggagacgggtttagacaggttcaattagctcaagtctacacagctgaagtagcagagaaagtgggatctagatggtctgatcctagtgatctaccatatgaaggacatagtttgtgtcctggtccaagtcaaatattgactcctcacaaacagtaagtatggcaattttgtgatgcctttgattccactttacatggagtactattatttgtgaaatgtctttaagatttttggtcttaaatttttgaagactgctttccccctttatctcccagaaaattgagaagaagtaaactcctgcccactaacaatctcagtccgtgaacaaaaccaacatgaacattcctaaacaagagtgtgtgttactctaagaagaaggctatagaatttatggaaatggcttatgtaacctacaagactggagaacagaatgtgactggccttttctaatggtcctttaagatttaatgattaaagcaagagttttttataattgactttgt

SEQ ID NO: 436378 - DNA, 5837 bp, Homo sapiens
  misc_feature (40)..(40): n is a, c, g, or t
accacaaaacaccacaccacacacgaaagggaagaccccnaaatttcatggaaagaggcaaaacctgatgaattaatggattccaaattgagatgcgtatttgaaatgcccaatgaaaatgataaattgaatgatatggaacctagcaaagctgttccactgaatgcatctaagcaagatggacctatgccaaaaccacacagtgtttcacttaatgataccgaaacaaggaaactaatggaagagtgtaaaagacttcagggagaaatgatgaagctatcagaagaaaatcggcacctgagagatgaaggtttaaggctcagaaaggtagcacattcggataaacctggatcaacctcaactgcatccttcagagataatgtcaccagtcctcttccttcacttcttgttgtaattgcagccattttcattggattctttctagggaaattcatcttgtagagtgaagcatgcagagtgctgtttctttttttttttttctcttgaccagaaaaagatttgtttacctaccatttcattggtagtatggcccacggtgaccatttttttgtgtgtacagcgtcatataggctttgcctttaatgatctcttacggttagaaaacacaataaaaacaaactgttcggctactggacaggttgtatattaccagatcatcactagcagatgtcagttgcacattgagtcctttatgaaattcataaataaagaattgttctttctttgtggttttaataagagttcaagaattgttcagagtcttgtaaatgttattttaataatccctttaaattttatctgttgctgttacctcttgaaatatgatttatttagattgctaatcccactcattcaggaaatgccaagaggtattccttggggaaatggtgcctcttacagtgtaaatttttcctcctttacctttgctaatatcatggcagaatttttcttatcccttgtgaggcagttgttgactgagtttttcatccttacaatcctgtcccatggtatttaacataaaaaaaaataaaactgttaacagattcttgctcgatagcttgtttgtgtctgtcgtgttattagagggaactccactatatatggtcacttgaaattatgatgcaaaggtttctcttgcattgaaaccctcttggatattacagtatttttaattgaaagtcctaattctgttaaggaaaggagttgattaaattttaaggtaccactggtattttgggagattataatcagtttgttttcaagataatagaaaataaggtccatgagaatagaagttatgtgatttcagtgagttgatgtgtacagcatggctgtgctccatctgatttaccccattcttaagttctgagagtatgttctcaaggaagatttaactctctttggttttaaattactttttaaccagcctaataaataagtcttactacttttcataatatttcataatagttaaaagtaggtgtttttttcgtgctcaatttggcactcaaaataatgttcattatggaagtttggtaatactgagcaagcctgtggaattttctttatgaaaaatgattttagcctttgcaaatgttaaccatgtgaaacacattttcagtataagtatgcgttacagggtttgatactttcctgcacttaggtttgtcctattcttcatttattcatactaggatagaaaattttggaatcagaaaatagatccagtgtttagctacatacaatctagtacaagtgaatttttattcttaaacataggtgtgttggctctttttttaaaagatgcgctctacctgaaaaggaaattggattttagaactggatgtggtgcagtgaagtattttaggcccaggtctgtgtacacattttatagaagaatgaagtactctgaagtattttggttgccttttcatttcaactgtgttttgaatttgtcagatcacacatatattgtgttattgggcgctgtggtatcttttataaaacctcttgcttgtgtgcaaaagttcctaaaaggaaacacaagtaatgcctatccattactagcatgctatgctgcatgctttactgccattgctgtatgctttactgtctttgtaaaaatccccctctccccttttctggtaactggaaaagcatgctaaaaatagtcttatattttcaccccataagtgcagaatcagtaattccttggcttaaagctcttatataatcaatattattggtggtaaataccaagtttggtatctcatagctatctttttttaaagaaattaagttcttgaaaatttagccaaatcccgttttatgggaatgctctttagaattcattttgttcagcccctttgttctatggttgagaaatctgaggccttacgaaggttaagagaactttccccgtgtctcacaggtaggtagaggcagagctggaactagatatctggtctgttgactctagctcagtgtcttctggtaactgttgaaaattgtcttagtttgagagatggctgaaataatgaacataaaatgctatttataataacaagtatatgtgaaatttcttattgtaagactactaccggcttactgttgaatagtttggttatagtgtttaggctagaaatgcctcccacattggtaataaacattacaaaatacaatgtatttttaggtaggcattttataaaatgcattatgccatggttgcttttgagatagattgtagtctgggtagcatctttaaaatgtatgtgggcttaactgttgttcatatcaggagatgctctgattgtataggtgagactctgtttctgttatttttaattgctgtatgaaatgtgatcagattattttactaccaacagttatagtttgaaagtccaactgtattaattgactgataatatgataatatagagattaaattgtttgtcttcattccttatatgtttagaagtttttgctttgtctgcctgcttacttgtatatgtaagcatgagggaaatacactgttgctaatactgaaattacaatcaagtaactaaggccttgagttcatatgtgacactgaatgcactagcttccttcgttctataactaatgtaccttaacttcccccattcttatatttacaagaagctaagtcattatgttctgagtgtgtggtatgttcccttaaaaaaaaatgacacttggaagaaaaatgtatgaaattcagaaattccgatcaaagaaaagtaattctttcttttttttttggagacagagtcttgctttgttgcccaggctggagggcagtggtgtgatctcacctcactgcagcttccgcctcctgggttcaagtgattctcatggctcagccgcctgagtagctgggattacaggtgtgagccaacaagcccggctaatttttgtatttttagtagagacaaggtttcaccatgttggtcaggctgggctcaaactcctgaatccgcctgcctcggcctcccaaagtgctgggattacaggtgtgagctgccgcacccagccaagaaaaataatactcttaaatacttagatgttcacctaaagttgatattatttggtatgggaattacttttgaactgtaatctttcagattacaccactttgaaaacaagttttaacagtagggtaaaaatatagtttttgagggtattcccaacttgtgatcttctaccactttagagacattcaagtaatagttttcttagagctttgcacattcctattcactgagattttaaaaatttcacctttattagagggaaggatcaatgcttattaccatttggaaaaacgaagatcagaaggtaaatgatctttattttctagctttaaagggaaattaaaccattcatgaataaactttaaaaatgtgaagtgtccttttccttttcacaatacaaaaaaaatttcaacagattgtgtggtttgtgcatttatatcctgttaagcattaatagctaatcactgggacttgaattctgatggcagatagtctcttgcttagtgagatggagttaactattttttagtaggaagtgagaacagctgattttcatgccacgtttcatagccccacttttggtagactaccaccacgcttcttcgcgtaacagttggcatcttgggaatgaatgcccagccgctcgtgggttggtgcaaagaagtataaacatatatcactaaggaaaaagaaagtttgtcttgcccttctgacacagtgtgtgcacttcaggcaatttttggaaaatataaaaaattccaaattctgcctttcagcagcatcaattgctaggaacatttcattcatttccctgtaatattaatgttctttaagcataatcactaattataagttgtatcctatttttttccagcttaatttctgtggtttattgaaaaccaagtataaatgtgactaaaagcattttgctttgtttttatagttaactttcttaaggttatggacattttataatgtaacatttgattggcctggcctcttgacaattcccttctagttatgcatatcctcctgttgccacatttcttgttttaaaactcagtttcttgttttccagttgttgctatgtataacacccatcttgaaagagagtatataggaagttattcagataacttttgtagtagtgatattcaactatagcagtaccttaactcatgatgagcttaggaacataaaagataattgttgcttgaatagcacccccagagatactgacctaattggtctggggtggagatctggcatggtagtttttttcaagctccaatcatcggccagacagttgctttatgtaggtttttaaatgccaaaggcagatatgaagtagatttaattaagacttgacttcagcaatacaggggaacttaaaatacttatttttctttaaactgcaggagtcactgttaggtattgcttaaaaaaaattgcataaaagctttgcttgtcaagttaggattgctggaataccactaaagatttttgacttgtgaataaatgagctgtcatcgcaaaaaggcgatttgagaaatgtgggcttcagtattaattgccattttgctgacacccagtgtacctacctacctgagaaatttattttgtccatcatgtatttctcaaagcaaaaggtggttttcaagtataatgtcgttttcaacatgcttattacttagttttacgtcagctcatttcatcatcattgataacttgtgaaatacttatctccatcctatggaataggggagacgggtttagacaggttcaattagctcaagtctacacagctgaagtagcagagaaagtgggatctagatggtctgatcctagtgatctaccatatgaaggacatagtttgtgtcctggtccaagtcaaatattgactcctcacaaacagtaagtatggcaattttgtgatgcctttgattccactttacatggagtactattatttgtgaaatgtctttaagatttttggtcttaaatttttgaagactgctttccccctttatctcccagaaaattgagaagaagtaaactcctgcccactaacaatctcagtccgtgaacaaaaccaacatgaacattcctaaacaagagtgtgtgttactctaagaagaaggctatagaatttatggaaatggcttatgtaacctacaagactggagaacagaatgtgactggccttttctaatggtcctttaagatttaatgattaaagcaagagttttttataattgactttgt

SEQ ID NO: 436379 - DNA, 5846 bp, Homo sapiens
gccgccaccataaacccacaacgaacaaaaagagaaaagaaaccccccccccttcagtggaaagaggcaaaacctgatgaattaatggattccaaattgagatgcgtatttgaaatgcccaatgaaaatgataaattgaatgatatggaacctagcaaagctgttccactgaatgcatctaagcaagatggacctatgccaaaaccacacagtgtttcacttaatgataccgaaacaaggaaactaatggaagagtgtaaaagacttcagggagaaatgatgaagctatcagaagaaaatcggcacctgagagatgaaggtttaaggctcagaaaggtagcacattcggataaacctggatcaacctcaactgcatccttcagagataatgtcaccagtcctcttccttcacttcttgttgtaattgcagccattttcattggattctttctagggaaattcatcttgtagagtgaagcatgcagagtgctgtttctttttttttttttctcttgaccagaaaaagatttgtttacctaccatttcattggtagtatggcccacggtgaccatttttttgtgtgtacagcgtcatataggctttgcctttaatgatctcttacggttagaaaacacaataaaaacaaactgttcggctactggacaggttgtatattaccagatcatcactagcagatgtcagttgcacattgagtcctttatgaaattcataaataaagaattgttctttctttgtggttttaataagagttcaagaattgttcagagtcttgtaaatgttattttaataatccctttaaattttatctgttgctgttacctcttgaaatatgatttatttagattgctaatcccactcattcaggaaatgccaagaggtattccttggggaaatggtgcctcttacagtgtaaatttttcctcctttacctttgctaatatcatggcagaatttttcttatcccttgtgaggcagttgttgactgagtttttcatccttacaatcctgtcccatggtatttaacataaaaaaaaataaaactgttaacagattcttgctcgatagcttgtttgtgtctgtcgtgttattagagggaactccactatatatggtcacttgaaattatgatgcaaaggtttctcttgcattgaaaccctcttggatattacagtatttttaattgaaagtcctaattctgttaaggaaaggagttgattaaattttaaggtaccactggtattttgggagattataatcagtttgttttcaagataatagaaaataaggtccatgagaatagaagttatgtgatttcagtgagttgatgtgtacagcatggctgtgctccatctgatttaccccattcttaagttctgagagtatgttctcaaggaagatttaactctctttggttttaaattactttttaaccagcctaataaataagtcttactacttttcataatatttcataatagttaaaagtaggtgtttttttcgtgctcaatttggcactcaaaataatgttcattatggaagtttggtaatactgagcaagcctgtggaattttctttatgaaaaatgattttagcctttgcaaatgttaaccatgtgaaacacattttcagtataagtatgcgttacagggtttgatactttcctgcacttaggtttgtcctattcttcatttattcatactaggatagaaaattttggaatcagaaaatagatccagtgtttagctacatacaatctagtacaagtgaatttttattcttaaacataggtgtgttggctctttttttaaaagatgcgctctacctgaaaaggaaattggattttagaactggatgtggtgcagtgaagtattttaggcccaggtctgtgtacacattttatagaagaatgaagtactctgaagtattttggttgccttttcatttcaactgtgttttgaatttgtcagatcacacatatattgtgttattgggcgctgtggtatcttttataaaacctcttgcttgtgtgcaaaagttcctaaaaggaaacacaagtaatgcctatccattactagcatgctatgctgcatgctttactgccattgctgtatgctttactgtctttgtaaaaatccccctctccccttttctggtaactggaaaagcatgctaaaaatagtcttatattttcaccccataagtgcagaatcagtaattccttggcttaaagctcttatataatcaatattattggtggtaaataccaagtttggtatctcatagctatctttttttaaagaaattaagttcttgaaaatttagccaaatcccgttttatgggaatgctctttagaattcattttgttcagcccctttgttctatggttgagaaatctgaggccttacgaaggttaagagaactttccccgtgtctcacaggtaggtagaggcagagctggaactagatatctggtctgttgactctagctcagtgtcttctggtaactgttgaaaattgtcttagtttgagagatggctgaaataatgaacataaaatgctatttataataacaagtatatgtgaaatttcttattgtaagactactaccggcttactgttgaatagtttggttatagtgtttaggctagaaatgcctcccacattggtaataaacattacaaaatacaatgtatttttaggtaggcattttataaaatgcattatgccatggttgcttttgagatagattgtagtctgggtagcatctttaaaatgtatgtgggcttaactgttgttcatatcaggagatgctctgattgtataggtgagactctgtttctgttatttttaattgctgtatgaaatgtgatcagattattttactaccaacagttatagtttgaaagtccaactgtattaattgactgataatatgataatatagagattaaattgtttgtcttcattccttatatgtttagaagtttttgctttgtctgcctgcttacttgtatatgtaagcatgagggaaatacactgttgctaatactgaaattacaatcaagtaactaaggccttgagttcatatgtgacactgaatgcactagcttccttcgttctataactaatgtaccttaacttcccccattcttatatttacaagaagctaagtcattatgttctgagtgtgtggtatgttcccttaaaaaaaaatgacacttggaagaaaaatgtatgaaattcagaaattccgatcaaagaaaagtaattctttcttttttttttggagacagagtcttgctttgttgcccaggctggagggcagtggtgtgatctcacctcactgcagcttccgcctcctgggttcaagtgattctcatggctcagccgcctgagtagctgggattacaggtgtgagccaacaagcccggctaatttttgtatttttagtagagacaaggtttcaccatgttggtcaggctgggctcaaactcctgaatccgcctgcctcggcctcccaaagtgctgggattacaggtgtgagctgccgcacccagccaagaaaaataatactcttaaatacttagatgttcacctaaagttgatattatttggtatgggaattacttttgaactgtaatctttcagattacaccactttgaaaacaagttttaacagtagggtaaaaatatagtttttgagggtattcccaacttgtgatcttctaccactttagagacattcaagtaatagttttcttagagctttgcacattcctattcactgagattttaaaaatttcacctttattagagggaaggatcaatgcttattaccatttggaaaaacgaagatcagaaggtaaatgatctttattttctagctttaaagggaaattaaaccattcatgaataaactttaaaaatgtgaagtgtccttttccttttcacaatacaaaaaaaatttcaacagattgtgtggtttgtgcatttatatcctgttaagcattaatagctaatcactgggacttgaattctgatggcagatagtctcttgcttagtgagatggagttaactattttttagtaggaagtgagaacagctgattttcatgccacgtttcatagccccacttttggtagactaccaccacgcttcttcgcgtaacagttggcatcttgggaatgaatgcccagccgctcgtgggttggtgcaaagaagtataaacatatatcactaaggaaaaagaaagtttgtcttgcccttctgacacagtgtgtgcacttcaggcaatttttggaaaatataaaaaattccaaattctgcctttcagcagcatcaattgctaggaacatttcattcatttccctgtaatattaatgttctttaagcataatcactaattataagttgtatcctatttttttccagcttaatttctgtggtttattgaaaaccaagtataaatgtgactaaaagcattttgctttgtttttatagttaactttcttaaggttatggacattttataatgtaacatttgattggcctggcctcttgacaattcccttctagttatgcatatcctcctgttgccacatttcttgttttaaaactcagtttcttgttttccagttgttgctatgtataacacccatcttgaaagagagtatataggaagttattcagataacttttgtagtagtgatattcaactatagcagtaccttaactcatgatgagcttaggaacataaaagataattgttgcttgaatagcacccccagagatactgacctaattggtctggggtggagatctggcatggtagtttttttcaagctccaatcatcggccagacagttgctttatgtaggtttttaaatgccaaaggcagatatgaagtagatttaattaagacttgacttcagcaatacaggggaacttaaaatacttatttttctttaaactgcaggagtcactgttaggtattgcttaaaaaaaattgcataaaagctttgcttgtcaagttaggattgctggaataccactaaagatttttgacttgtgaataaatgagctgtcatcgcaaaaaggcgatttgagaaatgtgggcttcagtattaattgccattttgctgacacccagtgtacctacctacctgagaaatttattttgtccatcatgtatttctcaaagcaaaaggtggttttcaagtataatgtcgttttcaacatgcttattacttagttttacgtcagctcatttcatcatcattgataacttgtgaaatacttatctccatcctatggaataggggagacgggtttagacaggttcaattagctcaagtctacacagctgaagtagcagagaaagtgggatctagatggtctgatcctagtgatctaccatatgaaggacatagtttgtgtcctggtccaagtcaaatattgactcctcacaaacagtaagtatggcaattttgtgatgcctttgattccactttacatggagtactattatttgtgaaatgtctttaagatttttggtcttaaatttttgaagactgctttccccctttatctcccagaaaattgagaagaagtaaactcctgcccactaacaatctcagtccgtgaacaaaaccaacatgaacattcctaaacaagagtgtgtgttactctaagaagaaggctatagaatttatggaaatggcttatgtaacctacaagactggagaacagaatgtgactggccttttctaatggtcctttaagatttaatgattaaagcaagagttttttataattgactttgt

SEQ ID NO: 436380 - DNA, 5823 bp, Homo sapiens
  misc_feature (12)..(12): n is a, c, g, or t
  misc_feature (22)..(22): n is a, c, g, or t
agcctgactctngaggaaaacnagagcacactgcaacacagttgcaacacctgccagttatcacacgaaggatgaccccaggggactcagtgtgttgaaacaggagaaacagaagaatgatatggaacctagcaaagctgttccactgaatgcatctaagcaagatggacctatgccaaaaccacacagtgtttcacttaatgataccgaaacaaggaaactaatggaagagtgtaaaagacttcagggagaaatgatgaagctatcagaagaaaatcggcacctgagagatgaaggtttaaggctcagaaaggtagcacattcggataaacctggatcaacctcaactgcatccttcagagataatgtcaccagtcctcttccttcacttcttgttgtaattgcagccattttcattggattctttctagggaaattcatcttgtagagtgaagcatgcagagtgctgtttctttttttttttttctcttgaccagaaaaagatttgtttacctaccatttcattggtagtatggcccacggtgaccatttttttgtgtgtacagcgtcatataggctttgcctttaatgatctcttacggttagaaaacacaataaaaacaaactgttcggctactggacaggttgtatattaccagatcatcactagcagatgtcagttgcacattgagtcctttatgaaattcataaataaagaattgttctttctttgtggttttaataagagttcaagaattgttcagagtcttgtaaatgttattttaataatccctttaaattttatctgttgctgttacctcttgaaatatgatttatttagattgctaatcccactcattcaggaaatgccaagaggtattccttggggaaatggtgcctcttacagtgtaaatttttcctcctttacctttgctaatatcatggcagaatttttcttatcccttgtgaggcagttgttgactgagtttttcatccttacaatcctgtcccatggtatttaacataaaaaaaaataaaactgttaacagattcttgctcgatagcttgtttgtgtctgtcgtgttattagagggaactccactatatatggtcacttgaaattatgatgcaaaggtttctcttgcattgaaaccctcttggatattacagtatttttaattgaaagtcctaattctgttaaggaaaggagttgattaaattttaaggtaccactggtattttgggagattataatcagtttgttttcaagataatagaaaataaggtccatgagaatagaagttatgtgatttcagtgagttgatgtgtacagcatggctgtgctccatctgatttaccccattcttaagttctgagagtatgttctcaaggaagatttaactctctttggttttaaattactttttaaccagcctaataaataagtcttactacttttcataatatttcataatagttaaaagtaggtgtttttttcgtgctcaatttggcactcaaaataatgttcattatggaagtttggtaatactgagcaagcctgtggaattttctttatgaaaaatgattttagcctttgcaaatgttaaccatgtgaaacacattttcagtataagtatgcgttacagggtttgatactttcctgcacttaggtttgtcctattcttcatttattcatactaggatagaaaattttggaatcagaaaatagatccagtgtttagctacatacaatctagtacaagtgaatttttattcttaaacataggtgtgttggctctttttttaaaagatgcgctctacctgaaaaggaaattggattttagaactggatgtggtgcagtgaagtattttaggcccaggtctgtgtacacattttatagaagaatgaagtactctgaagtattttggttgccttttcatttcaactgtgttttgaatttgtcagatcacacatatattgtgttattgggcgctgtggtatcttttataaaacctcttgcttgtgtgcaaaagttcctaaaaggaaacacaagtaatgcctatccattactagcatgctatgctgcatgctttactgccattgctgtatgctttactgtctttgtaaaaatccccctctccccttttctggtaactggaaaagcatgctaaaaatagtcttatattttcaccccataagtgcagaatcagtaattccttggcttaaagctcttatataatcaatattattggtggtaaataccaagtttggtatctcatagctatctttttttaaagaaattaagttcttgaaaatttagccaaatcccgttttatgggaatgctctttagaattcattttgttcagcccctttgttctatggttgagaaatctgaggccttacgaaggttaagagaactttccccgtgtctcacaggtaggtagaggcagagctggaactagatatctggtctgttgactctagctcagtgtcttctggtaactgttgaaaattgtcttagtttgagagatggctgaaataatgaacataaaatgctatttataataacaagtatatgtgaaatttcttattgtaagactactaccggcttactgttgaatagtttggttatagtgtttaggctagaaatgcctcccacattggtaataaacattacaaaatacaatgtatttttaggtaggcattttataaaatgcattatgccatggttgcttttgagatagattgtagtctgggtagcatctttaaaatgtatgtgggcttaactgttgttcatatcaggagatgctctgattgtataggtgagactctgtttctgttatttttaattgctgtatgaaatgtgatcagattattttactaccaacagttatagtttgaaagtccaactgtattaattgactgataatatgataatatagagattaaattgtttgtcttcattccttatatgtttagaagtttttgctttgtctgcctgcttacttgtatatgtaagcatgagggaaatacactgttgctaatactgaaattacaatcaagtaactaaggccttgagttcatatgtgacactgaatgcactagcttccttcgttctataactaatgtaccttaacttcccccattcttatatttacaagaagctaagtcattatgttctgagtgtgtggtatgttcccttaaaaaaaaatgacacttggaagaaaaatgtatgaaattcagaaattccgatcaaagaaaagtaattctttcttttttttttggagacagagtcttgctttgttgcccaggctggagggcagtggtgtgatctcacctcactgcagcttccgcctcctgggttcaagtgattctcatggctcagccgcctgagtagctgggattacaggtgtgagccaacaagcccggctaatttttgtatttttagtagagacaaggtttcaccatgttggtcaggctgggctcaaactcctgaatccgcctgcctcggcctcccaaagtgctgggattacaggtgtgagctgccgcacccagccaagaaaaataatactcttaaatacttagatgttcacctaaagttgatattatttggtatgggaattacttttgaactgtaatctttcagattacaccactttgaaaacaagttttaacagtagggtaaaaatatagtttttgagggtattcccaacttgtgatcttctaccactttagagacattcaagtaatagttttcttagagctttgcacattcctattcactgagattttaaaaatttcacctttattagagggaaggatcaatgcttattaccatttggaaaaacgaagatcagaaggtaaatgatctttattttctagctttaaagggaaattaaaccattcatgaataaactttaaaaatgtgaagtgtccttttccttttcacaatacaaaaaaaatttcaacagattgtgtggtttgtgcatttatatcctgttaagcattaatagctaatcactgggacttgaattctgatggcagatagtctcttgcttagtgagatggagttaactattttttagtaggaagtgagaacagctgattttcatgccacgtttcatagccccacttttggtagactaccaccacgcttcttcgcgtaacagttggcatcttgggaatgaatgcccagccgctcgtgggttggtgcaaagaagtataaacatatatcactaaggaaaaagaaagtttgtcttgcccttctgacacagtgtgtgcacttcaggcaatttttggaaaatataaaaaattccaaattctgcctttcagcagcatcaattgctaggaacatttcattcatttccctgtaatattaatgttctttaagcataatcactaattataagttgtatcctatttttttccagcttaatttctgtggtttattgaaaaccaagtataaatgtgactaaaagcattttgctttgtttttatagttaactttcttaaggttatggacattttataatgtaacatttgattggcctggcctcttgacaattcccttctagttatgcatatcctcctgttgccacatttcttgttttaaaactcagtttcttgttttccagttgttgctatgtataacacccatcttgaaagagagtatataggaagttattcagataacttttgtagtagtgatattcaactatagcagtaccttaactcatgatgagcttaggaacataaaagataattgttgcttgaatagcacccccagagatactgacctaattggtctggggtggagatctggcatggtagtttttttcaagctccaatcatcggccagacagttgctttatgtaggtttttaaatgccaaaggcagatatgaagtagatttaattaagacttgacttcagcaatacaggggaacttaaaatacttatttttctttaaactgcaggagtcactgttaggtattgcttaaaaaaaattgcataaaagctttgcttgtcaagttaggattgctggaataccactaaagatttttgacttgtgaataaatgagctgtcatcgcaaaaaggcgatttgagaaatgtgggcttcagtattaattgccattttgctgacacccagtgtacctacctacctgagaaatttattttgtccatcatgtatttctcaaagcaaaaggtggttttcaagtataatgtcgttttcaacatgcttattacttagttttacgtcagctcatttcatcatcattgataacttgtgaaatacttatctccatcctatggaataggggagacgggtttagacaggttcaattagctcaagtctacacagctgaagtagcagagaaagtgggatctagatggtctgatcctagtgatctaccatatgaaggacatagtttgtgtcctggtccaagtcaaatattgactcctcacaaacagtaagtatggcaattttgtgatgcctttgattccactttacatggagtactattatttgtgaaatgtctttaagatttttggtcttaaatttttgaagactgctttccccctttatctcccagaaaattgagaagaagtaaactcctgcccactaacaatctcagtccgtgaacaaaaccaacatgaacattcctaaacaagagtgtgtgttactctaagaagaaggctatagaatttatggaaatggcttatgtaacctacaagactggagaacagaatgtgactggccttttctaatggtcctttaagatttaatgattaaagcaagagttttttataattgactttgt

SEQ ID NO: 436381 - DNA, 5744 bp, Homo sapiens
gttagttaaaaaattcccaatatctttgtaatgcagaatgatatggaacctagcaaagctgttccactgaatgcatctaagcaagatggacctatgccaaaaccacacagtgtttcacttaatgataccgaaacaaggaaactaatggaagagtgtaaaagacttcagggagaaatgatgaagctatcagaagaaaatcggcacctgagagatgaaggtttaaggctcagaaaggtagcacattcggataaacctggatcaacctcaactgcatccttcagagataatgtcaccagtcctcttccttcacttcttgttgtaattgcagccattttcattggattctttctagggaaattcatcttgtagagtgaagcatgcagagtgctgtttctttttttttttttctcttgaccagaaaaagatttgtttacctaccatttcattggtagtatggcccacggtgaccatttttttgtgtgtacagcgtcatataggctttgcctttaatgatctcttacggttagaaaacacaataaaaacaaactgttcggctactggacaggttgtatattaccagatcatcactagcagatgtcagttgcacattgagtcctttatgaaattcataaataaagaattgttctttctttgtggttttaataagagttcaagaattgttcagagtcttgtaaatgttattttaataatccctttaaattttatctgttgctgttacctcttgaaatatgatttatttagattgctaatcccactcattcaggaaatgccaagaggtattccttggggaaatggtgcctcttacagtgtaaatttttcctcctttacctttgctaatatcatggcagaatttttcttatcccttgtgaggcagttgttgactgagtttttcatccttacaatcctgtcccatggtatttaacataaaaaaaaataaaactgttaacagattcttgctcgatagcttgtttgtgtctgtcgtgttattagagggaactccactatatatggtcacttgaaattatgatgcaaaggtttctcttgcattgaaaccctcttggatattacagtatttttaattgaaagtcctaattctgttaaggaaaggagttgattaaattttaaggtaccactggtattttgggagattataatcagtttgttttcaagataatagaaaataaggtccatgagaatagaagttatgtgatttcagtgagttgatgtgtacagcatggctgtgctccatctgatttaccccattcttaagttctgagagtatgttctcaaggaagatttaactctctttggttttaaattactttttaaccagcctaataaataagtcttactacttttcataatatttcataatagttaaaagtaggtgtttttttcgtgctcaatttggcactcaaaataatgttcattatggaagtttggtaatactgagcaagcctgtggaattttctttatgaaaaatgattttagcctttgcaaatgttaaccatgtgaaacacattttcagtataagtatgcgttacagggtttgatactttcctgcacttaggtttgtcctattcttcatttattcatactaggatagaaaattttggaatcagaaaatagatccagtgtttagctacatacaatctagtacaagtgaatttttattcttaaacataggtgtgttggctctttttttaaaagatgcgctctacctgaaaaggaaattggattttagaactggatgtggtgcagtgaagtattttaggcccaggtctgtgtacacattttatagaagaatgaagtactctgaagtattttggttgccttttcatttcaactgtgttttgaatttgtcagatcacacatatattgtgttattgggcgctgtggtatcttttataaaacctcttgcttgtgtgcaaaagttcctaaaaggaaacacaagtaatgcctatccattactagcatgctatgctgcatgctttactgccattgctgtatgctttactgtctttgtaaaaatccccctctccccttttctggtaactggaaaagcatgctaaaaatagtcttatattttcaccccataagtgcagaatcagtaattccttggcttaaagctcttatataatcaatattattggtggtaaataccaagtttggtatctcatagctatctttttttaaagaaattaagttcttgaaaatttagccaaatcccgttttatgggaatgctctttagaattcattttgttcagcccctttgttctatggttgagaaatctgaggccttacgaaggttaagagaactttccccgtgtctcacaggtaggtagaggcagagctggaactagatatctggtctgttgactctagctcagtgtcttctggtaactgttgaaaattgtcttagtttgagagatggctgaaataatgaacataaaatgctatttataataacaagtatatgtgaaatttcttattgtaagactactaccggcttactgttgaatagtttggttatagtgtttaggctagaaatgcctcccacattggtaataaacattacaaaatacaatgtatttttaggtaggcattttataaaatgcattatgccatggttgcttttgagatagattgtagtctgggtagcatctttaaaatgtatgtgggcttaactgttgttcatatcaggagatgctctgattgtataggtgagactctgtttctgttatttttaattgctgtatgaaatgtgatcagattattttactaccaacagttatagtttgaaagtccaactgtattaattgactgataatatgataatatagagattaaattgtttgtcttcattccttatatgtttagaagtttttgctttgtctgcctgcttacttgtatatgtaagcatgagggaaatacactgttgctaatactgaaattacaatcaagtaactaaggccttgagttcatatgtgacactgaatgcactagcttccttcgttctataactaatgtaccttaacttcccccattcttatatttacaagaagctaagtcattatgttctgagtgtgtggtatgttcccttaaaaaaaaatgacacttggaagaaaaatgtatgaaattcagaaattccgatcaaagaaaagtaattctttcttttttttttggagacagagtcttgctttgttgcccaggctggagggcagtggtgtgatctcacctcactgcagcttccgcctcctgggttcaagtgattctcatggctcagccgcctgagtagctgggattacaggtgtgagccaacaagcccggctaatttttgtatttttagtagagacaaggtttcaccatgttggtcaggctgggctcaaactcctgaatccgcctgcctcggcctcccaaagtgctgggattacaggtgtgagctgccgcacccagccaagaaaaataatactcttaaatacttagatgttcacctaaagttgatattatttggtatgggaattacttttgaactgtaatctttcagattacaccactttgaaaacaagttttaacagtagggtaaaaatatagtttttgagggtattcccaacttgtgatcttctaccactttagagacattcaagtaatagttttcttagagctttgcacattcctattcactgagattttaaaaatttcacctttattagagggaaggatcaatgcttattaccatttggaaaaacgaagatcagaaggtaaatgatctttattttctagctttaaagggaaattaaaccattcatgaataaactttaaaaatgtgaagtgtccttttccttttcacaatacaaaaaaaatttcaacagattgtgtggtttgtgcatttatatcctgttaagcattaatagctaatcactgggacttgaattctgatggcagatagtctcttgcttagtgagatggagttaactattttttagtaggaagtgagaacagctgattttcatgccacgtttcatagccccacttttggtagactaccaccacgcttcttcgcgtaacagttggcatcttgggaatgaatgcccagccgctcgtgggttggtgcaaagaagtataaacatatatcactaaggaaaaagaaagtttgtcttgcccttctgacacagtgtgtgcacttcaggcaatttttggaaaatataaaaaattccaaattctgcctttcagcagcatcaattgctaggaacatttcattcatttccctgtaatattaatgttctttaagcataatcactaattataagttgtatcctatttttttccagcttaatttctgtggtttattgaaaaccaagtataaatgtgactaaaagcattttgctttgtttttatagttaactttcttaaggttatggacattttataatgtaacatttgattggcctggcctcttgacaattcccttctagttatgcatatcctcctgttgccacatttcttgttttaaaactcagtttcttgttttccagttgttgctatgtataacacccatcttgaaagagagtatataggaagttattcagataacttttgtagtagtgatattcaactatagcagtaccttaactcatgatgagcttaggaacataaaagataattgttgcttgaatagcacccccagagatactgacctaattggtctggggtggagatctggcatggtagtttttttcaagctccaatcatcggccagacagttgctttatgtaggtttttaaatgccaaaggcagatatgaagtagatttaattaagacttgacttcagcaatacaggggaacttaaaatacttatttttctttaaactgcaggagtcactgttaggtattgcttaaaaaaaattgcataaaagctttgcttgtcaagttaggattgctggaataccactaaagatttttgacttgtgaataaatgagctgtcatcgcaaaaaggcgatttgagaaatgtgggcttcagtattaattgccattttgctgacacccagtgtacctacctacctgagaaatttattttgtccatcatgtatttctcaaagcaaaaggtggttttcaagtataatgtcgttttcaacatgcttattacttagttttacgtcagctcatttcatcatcattgataacttgtgaaatacttatctccatcctatggaataggggagacgggtttagacaggttcaattagctcaagtctacacagctgaagtagcagagaaagtgggatctagatggtctgatcctagtgatctaccatatgaaggacatagtttgtgtcctggtccaagtcaaatattgactcctcacaaacagtaagtatggcaattttgtgatgcctttgattccactttacatggagtactattatttgtgaaatgtctttaagatttttggtcttaaatttttgaagactgctttccccctttatctcccagaaaattgagaagaagtaaactcctgcccactaacaatctcagtccgtgaacaaaaccaacatgaacattcctaaacaagagtgtgtgttactctaagaagaaggctatagaatttatggaaatggcttatgtaacctacaagactggagaacagaatgtgactggccttttctaatggtcctttaagatttaatgattaaagcaagagttttttataattgactttgt

SEQ ID NO: 436382 - DNA, 6062 bp, Homo sapiens
acgtaggcacgcagaggccgtcacgtgggtcgccgaggctcgcaagtgcgcgtggccgtggcggctggtgtggggttgagtcagttgtgggacccggagctgctgacccagcgggtggcccaccgaaccggtgacacagcggcaggcgttagggctcgggagccgcgagcctggcctcgtcctagagctcggccgagccgtcgccgccgtcgtcccccgcccccagtcagcaaaccgccgccgcgggcgcgcccccgctctgcgctgtctctccgatggcgtccgcctcaggggccatggcgaagcacgagcagatcctggtcctcgatccgcccacagacctcaaattcaaagaatgatatggaacctagcaaagctgttccactgaatgcatctaagcaagatggacctatgccaaaaccacacagtgtttcacttaatgataccgaaacaaggaaactaatggaagagtgtaaaagacttcagggagaaatgatgaagctatcagaagaaaatcggcacctgagagatgaaggtttaaggctcagaaaggtagcacattcggataaacctggatcaacctcaactgcatccttcagagataatgtcaccagtcctcttccttcacttcttgttgtaattgcagccattttcattggattctttctagggaaattcatcttgtagagtgaagcatgcagagtgctgtttctttttttttttttctcttgaccagaaaaagatttgtttacctaccatttcattggtagtatggcccacggtgaccatttttttgtgtgtacagcgtcatataggctttgcctttaatgatctcttacggttagaaaacacaataaaaacaaactgttcggctactggacaggttgtatattaccagatcatcactagcagatgtcagttgcacattgagtcctttatgaaattcataaataaagaattgttctttctttgtggttttaataagagttcaagaattgttcagagtcttgtaaatgttattttaataatccctttaaattttatctgttgctgttacctcttgaaatatgatttatttagattgctaatcccactcattcaggaaatgccaagaggtattccttggggaaatggtgcctcttacagtgtaaatttttcctcctttacctttgctaatatcatggcagaatttttcttatcccttgtgaggcagttgttgactgagtttttcatccttacaatcctgtcccatggtatttaacataaaaaaaaataaaactgttaacagattcttgctcgatagcttgtttgtgtctgtcgtgttattagagggaactccactatatatggtcacttgaaattatgatgcaaaggtttctcttgcattgaaaccctcttggatattacagtatttttaattgaaagtcctaattctgttaaggaaaggagttgattaaattttaaggtaccactggtattttgggagattataatcagtttgttttcaagataatagaaaataaggtccatgagaatagaagttatgtgatttcagtgagttgatgtgtacagcatggctgtgctccatctgatttaccccattcttaagttctgagagtatgttctcaaggaagatttaactctctttggttttaaattactttttaaccagcctaataaataagtcttactacttttcataatatttcataatagttaaaagtaggtgtttttttcgtgctcaatttggcactcaaaataatgttcattatggaagtttggtaatactgagcaagcctgtggaattttctttatgaaaaatgattttagcctttgcaaatgttaaccatgtgaaacacattttcagtataagtatgcgttacagggtttgatactttcctgcacttaggtttgtcctattcttcatttattcatactaggatagaaaattttggaatcagaaaatagatccagtgtttagctacatacaatctagtacaagtgaatttttattcttaaacataggtgtgttggctctttttttaaaagatgcgctctacctgaaaaggaaattggattttagaactggatgtggtgcagtgaagtattttaggcccaggtctgtgtacacattttatagaagaatgaagtactctgaagtattttggttgccttttcatttcaactgtgttttgaatttgtcagatcacacatatattgtgttattgggcgctgtggtatcttttataaaacctcttgcttgtgtgcaaaagttcctaaaaggaaacacaagtaatgcctatccattactagcatgctatgctgcatgctttactgccattgctgtatgctttactgtctttgtaaaaatccccctctccccttttctggtaactggaaaagcatgctaaaaatagtcttatattttcaccccataagtgcagaatcagtaattccttggcttaaagctcttatataatcaatattattggtggtaaataccaagtttggtatctcatagctatctttttttaaagaaattaagttcttgaaaatttagccaaatcccgttttatgggaatgctctttagaattcattttgttcagcccctttgttctatggttgagaaatctgaggccttacgaaggttaagagaactttccccgtgtctcacaggtaggtagaggcagagctggaactagatatctggtctgttgactctagctcagtgtcttctggtaactgttgaaaattgtcttagtttgagagatggctgaaataatgaacataaaatgctatttataataacaagtatatgtgaaatttcttattgtaagactactaccggcttactgttgaatagtttggttatagtgtttaggctagaaatgcctcccacattggtaataaacattacaaaatacaatgtatttttaggtaggcattttataaaatgcattatgccatggttgcttttgagatagattgtagtctgggtagcatctttaaaatgtatgtgggcttaactgttgttcatatcaggagatgctctgattgtataggtgagactctgtttctgttatttttaattgctgtatgaaatgtgatcagattattttactaccaacagttatagtttgaaagtccaactgtattaattgactgataatatgataatatagagattaaattgtttgtcttcattccttatatgtttagaagtttttgctttgtctgcctgcttacttgtatatgtaagcatgagggaaatacactgttgctaatactgaaattacaatcaagtaactaaggccttgagttcatatgtgacactgaatgcactagcttccttcgttctataactaatgtaccttaacttcccccattcttatatttacaagaagctaagtcattatgttctgagtgtgtggtatgttcccttaaaaaaaaatgacacttggaagaaaaatgtatgaaattcagaaattccgatcaaagaaaagtaattctttcttttttttttggagacagagtcttgctttgttgcccaggctggagggcagtggtgtgatctcacctcactgcagcttccgcctcctgggttcaagtgattctcatggctcagccgcctgagtagctgggattacaggtgtgagccaacaagcccggctaatttttgtatttttagtagagacaaggtttcaccatgttggtcaggctgggctcaaactcctgaatccgcctgcctcggcctcccaaagtgctgggattacaggtgtgagctgccgcacccagccaagaaaaataatactcttaaatacttagatgttcacctaaagttgatattatttggtatgggaattacttttgaactgtaatctttcagattacaccactttgaaaacaagttttaacagtagggtaaaaatatagtttttgagggtattcccaacttgtgatcttctaccactttagagacattcaagtaatagttttcttagagctttgcacattcctattcactgagattttaaaaatttcacctttattagagggaaggatcaatgcttattaccatttggaaaaacgaagatcagaaggtaaatgatctttattttctagctttaaagggaaattaaaccattcatgaataaactttaaaaatgtgaagtgtccttttccttttcacaatacaaaaaaaatttcaacagattgtgtggtttgtgcatttatatcctgttaagcattaatagctaatcactgggacttgaattctgatggcagatagtctcttgcttagtgagatggagttaactattttttagtaggaagtgagaacagctgattttcatgccacgtttcatagccccacttttggtagactaccaccacgcttcttcgcgtaacagttggcatcttgggaatgaatgcccagccgctcgtgggttggtgcaaagaagtataaacatatatcactaaggaaaaagaaagtttgtcttgcccttctgacacagtgtgtgcacttcaggcaatttttggaaaatataaaaaattccaaattctgcctttcagcagcatcaattgctaggaacatttcattcatttccctgtaatattaatgttctttaagcataatcactaattataagttgtatcctatttttttccagcttaatttctgtggtttattgaaaaccaagtataaatgtgactaaaagcattttgctttgtttttatagttaactttcttaaggttatggacattttataatgtaacatttgattggcctggcctcttgacaattcccttctagttatgcatatcctcctgttgccacatttcttgttttaaaactcagtttcttgttttccagttgttgctatgtataacacccatcttgaaagagagtatataggaagttattcagataacttttgtagtagtgatattcaactatagcagtaccttaactcatgatgagcttaggaacataaaagataattgttgcttgaatagcacccccagagatactgacctaattggtctggggtggagatctggcatggtagtttttttcaagctccaatcatcggccagacagttgctttatgtaggtttttaaatgccaaaggcagatatgaagtagatttaattaagacttgacttcagcaatacaggggaacttaaaatacttatttttctttaaactgcaggagtcactgttaggtattgcttaaaaaaaattgcataaaagctttgcttgtcaagttaggattgctggaataccactaaagatttttgacttgtgaataaatgagctgtcatcgcaaaaaggcgatttgagaaatgtgggcttcagtattaattgccattttgctgacacccagtgtacctacctacctgagaaatttattttgtccatcatgtatttctcaaagcaaaaggtggttttcaagtataatgtcgttttcaacatgcttattacttagttttacgtcagctcatttcatcatcattgataacttgtgaaatacttatctccatcctatggaataggggagacgggtttagacaggttcaattagctcaagtctacacagctgaagtagcagagaaagtgggatctagatggtctgatcctagtgatctaccatatgaaggacatagtttgtgtcctggtccaagtcaaatattgactcctcacaaacagtaagtatggcaattttgtgatgcctttgattccactttacatggagtactattatttgtgaaatgtctttaagatttttggtcttaaatttttgaagactgctttccccctttatctcccagaaaattgagaagaagtaaactcctgcccactaacaatctcagtccgtgaacaaaaccaacatgaacattcctaaacaagagtgtgtgttactctaagaagaaggctatagaatttatggaaatggcttatgtaacctacaagactggagaacagaatgtgactggccttttctaatggtcctttaagatttaatgattaaagcaagagttttttataattgactttgt

SEQ ID NO: 436383 - DNA, 5787 bp, Homo sapiens
  misc_feature (76)..(76): n is a, c, g, or t
cgcgggaagtgggagacccgctgcggaggttttacgacaccccgagaaagaagcccccccgtcaggatggactggnaacaatgatatggaacctagcaaagctgttccactgaatgcatctaagcaagatggacctatgccaaaaccacacagtgtttcacttaatgataccgaaacaaggaaactaatggaagagtgtaaaagacttcagggagaaatgatgaagctatcagaagaaaatcggcacctgagagatgaaggtttaaggctcagaaaggtagcacattcggataaacctggatcaacctcaactgcatccttcagagataatgtcaccagtcctcttccttcacttcttgttgtaattgcagccattttcattggattctttctagggaaattcatcttgtagagtgaagcatgcagagtgctgtttctttttttttttttctcttgaccagaaaaagatttgtttacctaccatttcattggtagtatggcccacggtgaccatttttttgtgtgtacagcgtcatataggctttgcctttaatgatctcttacggttagaaaacacaataaaaacaaactgttcggctactggacaggttgtatattaccagatcatcactagcagatgtcagttgcacattgagtcctttatgaaattcataaataaagaattgttctttctttgtggttttaataagagttcaagaattgttcagagtcttgtaaatgttattttaataatccctttaaattttatctgttgctgttacctcttgaaatatgatttatttagattgctaatcccactcattcaggaaatgccaagaggtattccttggggaaatggtgcctcttacagtgtaaatttttcctcctttacctttgctaatatcatggcagaatttttcttatcccttgtgaggcagttgttgactgagtttttcatccttacaatcctgtcccatggtatttaacataaaaaaaaataaaactgttaacagattcttgctcgatagcttgtttgtgtctgtcgtgttattagagggaactccactatatatggtcacttgaaattatgatgcaaaggtttctcttgcattgaaaccctcttggatattacagtatttttaattgaaagtcctaattctgttaaggaaaggagttgattaaattttaaggtaccactggtattttgggagattataatcagtttgttttcaagataatagaaaataaggtccatgagaatagaagttatgtgatttcagtgagttgatgtgtacagcatggctgtgctccatctgatttaccccattcttaagttctgagagtatgttctcaaggaagatttaactctctttggttttaaattactttttaaccagcctaataaataagtcttactacttttcataatatttcataatagttaaaagtaggtgtttttttcgtgctcaatttggcactcaaaataatgttcattatggaagtttggtaatactgagcaagcctgtggaattttctttatgaaaaatgattttagcctttgcaaatgttaaccatgtgaaacacattttcagtataagtatgcgttacagggtttgatactttcctgcacttaggtttgtcctattcttcatttattcatactaggatagaaaattttggaatcagaaaatagatccagtgtttagctacatacaatctagtacaagtgaatttttattcttaaacataggtgtgttggctctttttttaaaagatgcgctctacctgaaaaggaaattggattttagaactggatgtggtgcagtgaagtattttaggcccaggtctgtgtacacattttatagaagaatgaagtactctgaagtattttggttgccttttcatttcaactgtgttttgaatttgtcagatcacacatatattgtgttattgggcgctgtggtatcttttataaaacctcttgcttgtgtgcaaaagttcctaaaaggaaacacaagtaatgcctatccattactagcatgctatgctgcatgctttactgccattgctgtatgctttactgtctttgtaaaaatccccctctccccttttctggtaactggaaaagcatgctaaaaatagtcttatattttcaccccataagtgcagaatcagtaattccttggcttaaagctcttatataatcaatattattggtggtaaataccaagtttggtatctcatagctatctttttttaaagaaattaagttcttgaaaatttagccaaatcccgttttatgggaatgctctttagaattcattttgttcagcccctttgttctatggttgagaaatctgaggccttacgaaggttaagagaactttccccgtgtctcacaggtaggtagaggcagagctggaactagatatctggtctgttgactctagctcagtgtcttctggtaactgttgaaaattgtcttagtttgagagatggctgaaataatgaacataaaatgctatttataataacaagtatatgtgaaatttcttattgtaagactactaccggcttactgttgaatagtttggttatagtgtttaggctagaaatgcctcccacattggtaataaacattacaaaatacaatgtatttttaggtaggcattttataaaatgcattatgccatggttgcttttgagatagattgtagtctgggtagcatctttaaaatgtatgtgggcttaactgttgttcatatcaggagatgctctgattgtataggtgagactctgtttctgttatttttaattgctgtatgaaatgtgatcagattattttactaccaacagttatagtttgaaagtccaactgtattaattgactgataatatgataatatagagattaaattgtttgtcttcattccttatatgtttagaagtttttgctttgtctgcctgcttacttgtatatgtaagcatgagggaaatacactgttgctaatactgaaattacaatcaagtaactaaggccttgagttcatatgtgacactgaatgcactagcttccttcgttctataactaatgtaccttaacttcccccattcttatatttacaagaagctaagtcattatgttctgagtgtgtggtatgttcccttaaaaaaaaatgacacttggaagaaaaatgtatgaaattcagaaattccgatcaaagaaaagtaattctttcttttttttttggagacagagtcttgctttgttgcccaggctggagggcagtggtgtgatctcacctcactgcagcttccgcctcctgggttcaagtgattctcatggctcagccgcctgagtagctgggattacaggtgtgagccaacaagcccggctaatttttgtatttttagtagagacaaggtttcaccatgttggtcaggctgggctcaaactcctgaatccgcctgcctcggcctcccaaagtgctgggattacaggtgtgagctgccgcacccagccaagaaaaataatactcttaaatacttagatgttcacctaaagttgatattatttggtatgggaattacttttgaactgtaatctttcagattacaccactttgaaaacaagttttaacagtagggtaaaaatatagtttttgagggtattcccaacttgtgatcttctaccactttagagacattcaagtaatagttttcttagagctttgcacattcctattcactgagattttaaaaatttcacctttattagagggaaggatcaatgcttattaccatttggaaaaacgaagatcagaaggtaaatgatctttattttctagctttaaagggaaattaaaccattcatgaataaactttaaaaatgtgaagtgtccttttccttttcacaatacaaaaaaaatttcaacagattgtgtggtttgtgcatttatatcctgttaagcattaatagctaatcactgggacttgaattctgatggcagatagtctcttgcttagtgagatggagttaactattttttagtaggaagtgagaacagctgattttcatgccacgtttcatagccccacttttggtagactaccaccacgcttcttcgcgtaacagttggcatcttgggaatgaatgcccagccgctcgtgggttggtgcaaagaagtataaacatatatcactaaggaaaaagaaagtttgtcttgcccttctgacacagtgtgtgcacttcaggcaatttttggaaaatataaaaaattccaaattctgcctttcagcagcatcaattgctaggaacatttcattcatttccctgtaatattaatgttctttaagcataatcactaattataagttgtatcctatttttttccagcttaatttctgtggtttattgaaaaccaagtataaatgtgactaaaagcattttgctttgtttttatagttaactttcttaaggttatggacattttataatgtaacatttgattggcctggcctcttgacaattcccttctagttatgcatatcctcctgttgccacatttcttgttttaaaactcagtttcttgttttccagttgttgctatgtataacacccatcttgaaagagagtatataggaagttattcagataacttttgtagtagtgatattcaactatagcagtaccttaactcatgatgagcttaggaacataaaagataattgttgcttgaatagcacccccagagatactgacctaattggtctggggtggagatctggcatggtagtttttttcaagctccaatcatcggccagacagttgctttatgtaggtttttaaatgccaaaggcagatatgaagtagatttaattaagacttgacttcagcaatacaggggaacttaaaatacttatttttctttaaactgcaggagtcactgttaggtattgcttaaaaaaaattgcataaaagctttgcttgtcaagttaggattgctggaataccactaaagatttttgacttgtgaataaatgagctgtcatcgcaaaaaggcgatttgagaaatgtgggcttcagtattaattgccattttgctgacacccagtgtacctacctacctgagaaatttattttgtccatcatgtatttctcaaagcaaaaggtggttttcaagtataatgtcgttttcaacatgcttattacttagttttacgtcagctcatttcatcatcattgataacttgtgaaatacttatctccatcctatggaataggggagacgggtttagacaggttcaattagctcaagtctacacagctgaagtagcagagaaagtgggatctagatggtctgatcctagtgatctaccatatgaaggacatagtttgtgtcctggtccaagtcaaatattgactcctcacaaacagtaagtatggcaattttgtgatgcctttgattccactttacatggagtactattatttgtgaaatgtctttaagatttttggtcttaaatttttgaagactgctttccccctttatctcccagaaaattgagaagaagtaaactcctgcccactaacaatctcagtccgtgaacaaaaccaacatgaacattcctaaacaagagtgtgtgttactctaagaagaaggctatagaatttatggaaatggcttatgtaacctacaagactggagaacagaatgtgactggccttttctaatggtcctttaagatttaatgattaaagcaagagttttttataattgactttgt

SEQ ID NO: 436384 - DNA, 5786 bp, Homo sapiens
  misc_feature (29)..(29): n is a, c, g, or t
tttatattatttgtgcacgaacaaacggnggggggggagactagtctgcgacgactctcttaatttccaccgctacacaatgatatggaacctagcaaagctgttccactgaatgcatctaagcaagatggacctatgccaaaaccacacagtgtttcacttaatgataccgaaacaaggaaactaatggaagagtgtaaaagacttcagggagaaatgatgaagctatcagaagaaaatcggcacctgagagatgaaggtttaaggctcagaaaggtagcacattcggataaacctggatcaacctcaactgcatccttcagagataatgtcaccagtcctcttccttcacttcttgttgtaattgcagccattttcattggattctttctagggaaattcatcttgtagagtgaagcatgcagagtgctgtttctttttttttttttctcttgaccagaaaaagatttgtttacctaccatttcattggtagtatggcccacggtgaccatttttttgtgtgtacagcgtcatataggctttgcctttaatgatctcttacggttagaaaacacaataaaaacaaactgttcggctactggacaggttgtatattaccagatcatcactagcagatgtcagttgcacattgagtcctttatgaaattcataaataaagaattgttctttctttgtggttttaataagagttcaagaattgttcagagtcttgtaaatgttattttaataatccctttaaattttatctgttgctgttacctcttgaaatatgatttatttagattgctaatcccactcattcaggaaatgccaagaggtattccttggggaaatggtgcctcttacagtgtaaatttttcctcctttacctttgctaatatcatggcagaatttttcttatcccttgtgaggcagttgttgactgagtttttcatccttacaatcctgtcccatggtatttaacataaaaaaaaataaaactgttaacagattcttgctcgatagcttgtttgtgtctgtcgtgttattagagggaactccactatatatggtcacttgaaattatgatgcaaaggtttctcttgcattgaaaccctcttggatattacagtatttttaattgaaagtcctaattctgttaaggaaaggagttgattaaattttaaggtaccactggtattttgggagattataatcagtttgttttcaagataatagaaaataaggtccatgagaatagaagttatgtgatttcagtgagttgatgtgtacagcatggctgtgctccatctgatttaccccattcttaagttctgagagtatgttctcaaggaagatttaactctctttggttttaaattactttttaaccagcctaataaataagtcttactacttttcataatatttcataatagttaaaagtaggtgtttttttcgtgctcaatttggcactcaaaataatgttcattatggaagtttggtaatactgagcaagcctgtggaattttctttatgaaaaatgattttagcctttgcaaatgttaaccatgtgaaacacattttcagtataagtatgcgttacagggtttgatactttcctgcacttaggtttgtcctattcttcatttattcatactaggatagaaaattttggaatcagaaaatagatccagtgtttagctacatacaatctagtacaagtgaatttttattcttaaacataggtgtgttggctctttttttaaaagatgcgctctacctgaaaaggaaattggattttagaactggatgtggtgcagtgaagtattttaggcccaggtctgtgtacacattttatagaagaatgaagtactctgaagtattttggttgccttttcatttcaactgtgttttgaatttgtcagatcacacatatattgtgttattgggcgctgtggtatcttttataaaacctcttgcttgtgtgcaaaagttcctaaaaggaaacacaagtaatgcctatccattactagcatgctatgctgcatgctttactgccattgctgtatgctttactgtctttgtaaaaatccccctctccccttttctggtaactggaaaagcatgctaaaaatagtcttatattttcaccccataagtgcagaatcagtaattccttggcttaaagctcttatataatcaatattattggtggtaaataccaagtttggtatctcatagctatctttttttaaagaaattaagttcttgaaaatttagccaaatcccgttttatgggaatgctctttagaattcattttgttcagcccctttgttctatggttgagaaatctgaggccttacgaaggttaagagaactttccccgtgtctcacaggtaggtagaggcagagctggaactagatatctggtctgttgactctagctcagtgtcttctggtaactgttgaaaattgtcttagtttgagagatggctgaaataatgaacataaaatgctatttataataacaagtatatgtgaaatttcttattgtaagactactaccggcttactgttgaatagtttggttatagtgtttaggctagaaatgcctcccacattggtaataaacattacaaaatacaatgtatttttaggtaggcattttataaaatgcattatgccatggttgcttttgagatagattgtagtctgggtagcatctttaaaatgtatgtgggcttaactgttgttcatatcaggagatgctctgattgtataggtgagactctgtttctgttatttttaattgctgtatgaaatgtgatcagattattttactaccaacagttatagtttgaaagtccaactgtattaattgactgataatatgataatatagagattaaattgtttgtcttcattccttatatgtttagaagtttttgctttgtctgcctgcttacttgtatatgtaagcatgagggaaatacactgttgctaatactgaaattacaatcaagtaactaaggccttgagttcatatgtgacactgaatgcactagcttccttcgttctataactaatgtaccttaacttcccccattcttatatttacaagaagctaagtcattatgttctgagtgtgtggtatgttcccttaaaaaaaaatgacacttggaagaaaaatgtatgaaattcagaaattccgatcaaagaaaagtaattctttcttttttttttggagacagagtcttgctttgttgcccaggctggagggcagtggtgtgatctcacctcactgcagcttccgcctcctgggttcaagtgattctcatggctcagccgcctgagtagctgggattacaggtgtgagccaacaagcccggctaatttttgtatttttagtagagacaaggtttcaccatgttggtcaggctgggctcaaactcctgaatccgcctgcctcggcctcccaaagtgctgggattacaggtgtgagctgccgcacccagccaagaaaaataatactcttaaatacttagatgttcacctaaagttgatattatttggtatgggaattacttttgaactgtaatctttcagattacaccactttgaaaacaagttttaacagtagggtaaaaatatagtttttgagggtattcccaacttgtgatcttctaccactttagagacattcaagtaatagttttcttagagctttgcacattcctattcactgagattttaaaaatttcacctttattagagggaaggatcaatgcttattaccatttggaaaaacgaagatcagaaggtaaatgatctttattttctagctttaaagggaaattaaaccattcatgaataaactttaaaaatgtgaagtgtccttttccttttcacaatacaaaaaaaatttcaacagattgtgtggtttgtgcatttatatcctgttaagcattaatagctaatcactgggacttgaattctgatggcagatagtctcttgcttagtgagatggagttaactattttttagtaggaagtgagaacagctgattttcatgccacgtttcatagccccacttttggtagactaccaccacgcttcttcgcgtaacagttggcatcttgggaatgaatgcccagccgctcgtgggttggtgcaaagaagtataaacatatatcactaaggaaaaagaaagtttgtcttgcccttctgacacagtgtgtgcacttcaggcaatttttggaaaatataaaaaattccaaattctgcctttcagcagcatcaattgctaggaacatttcattcatttccctgtaatattaatgttctttaagcataatcactaattataagttgtatcctatttttttccagcttaatttctgtggtttattgaaaaccaagtataaatgtgactaaaagcattttgctttgtttttatagttaactttcttaaggttatggacattttataatgtaacatttgattggcctggcctcttgacaattcccttctagttatgcatatcctcctgttgccacatttcttgttttaaaactcagtttcttgttttccagttgttgctatgtataacacccatcttgaaagagagtatataggaagttattcagataacttttgtagtagtgatattcaactatagcagtaccttaactcatgatgagcttaggaacataaaagataattgttgcttgaatagcacccccagagatactgacctaattggtctggggtggagatctggcatggtagtttttttcaagctccaatcatcggccagacagttgctttatgtaggtttttaaatgccaaaggcagatatgaagtagatttaattaagacttgacttcagcaatacaggggaacttaaaatacttatttttctttaaactgcaggagtcactgttaggtattgcttaaaaaaaattgcataaaagctttgcttgtcaagttaggattgctggaataccactaaagatttttgacttgtgaataaatgagctgtcatcgcaaaaaggcgatttgagaaatgtgggcttcagtattaattgccattttgctgacacccagtgtacctacctacctgagaaatttattttgtccatcatgtatttctcaaagcaaaaggtggttttcaagtataatgtcgttttcaacatgcttattacttagttttacgtcagctcatttcatcatcattgataacttgtgaaatacttatctccatcctatggaataggggagacgggtttagacaggttcaattagctcaagtctacacagctgaagtagcagagaaagtgggatctagatggtctgatcctagtgatctaccatatgaaggacatagtttgtgtcctggtccaagtcaaatattgactcctcacaaacagtaagtatggcaattttgtgatgcctttgattccactttacatggagtactattatttgtgaaatgtctttaagatttttggtcttaaatttttgaagactgctttccccctttatctcccagaaaattgagaagaagtaaactcctgcccactaacaatctcagtccgtgaacaaaaccaacatgaacattcctaaacaagagtgtgtgttactctaagaagaaggctatagaatttatggaaatggcttatgtaacctacaagactggagaacagaatgtgactggccttttctaatggtcctttaagatttaatgattaaagcaagagttttttataattgactttgt

SEQ ID NO: 436385 - DNA, 5779 bp, Homo sapiens
  misc_feature (27)..(27): n is a, c, g, or t
atattaagtttattcatataaacaggnggaggaagctagcggcactgatctcttaactaccaccgctacagaatgatatggaacctagcaaagctgttccactgaatgcatctaagcaagatggacctatgccaaaaccacacagtgtttcacttaatgataccgaaacaaggaaactaatggaagagtgtaaaagacttcagggagaaatgatgaagctatcagaagaaaatcggcacctgagagatgaaggtttaaggctcagaaaggtagcacattcggataaacctggatcaacctcaactgcatccttcagagataatgtcaccagtcctcttccttcacttcttgttgtaattgcagccattttcattggattctttctagggaaattcatcttgtagagtgaagcatgcagagtgctgtttctttttttttttttctcttgaccagaaaaagatttgtttacctaccatttcattggtagtatggcccacggtgaccatttttttgtgtgtacagcgtcatataggctttgcctttaatgatctcttacggttagaaaacacaataaaaacaaactgttcggctactggacaggttgtatattaccagatcatcactagcagatgtcagttgcacattgagtcctttatgaaattcataaataaagaattgttctttctttgtggttttaataagagttcaagaattgttcagagtcttgtaaatgttattttaataatccctttaaattttatctgttgctgttacctcttgaaatatgatttatttagattgctaatcccactcattcaggaaatgccaagaggtattccttggggaaatggtgcctcttacagtgtaaatttttcctcctttacctttgctaatatcatggcagaatttttcttatcccttgtgaggcagttgttgactgagtttttcatccttacaatcctgtcccatggtatttaacataaaaaaaaataaaactgttaacagattcttgctcgatagcttgtttgtgtctgtcgtgttattagagggaactccactatatatggtcacttgaaattatgatgcaaaggtttctcttgcattgaaaccctcttggatattacagtatttttaattgaaagtcctaattctgttaaggaaaggagttgattaaattttaaggtaccactggtattttgggagattataatcagtttgttttcaagataatagaaaataaggtccatgagaatagaagttatgtgatttcagtgagttgatgtgtacagcatggctgtgctccatctgatttaccccattcttaagttctgagagtatgttctcaaggaagatttaactctctttggttttaaattactttttaaccagcctaataaataagtcttactacttttcataatatttcataatagttaaaagtaggtgtttttttcgtgctcaatttggcactcaaaataatgttcattatggaagtttggtaatactgagcaagcctgtggaattttctttatgaaaaatgattttagcctttgcaaatgttaaccatgtgaaacacattttcagtataagtatgcgttacagggtttgatactttcctgcacttaggtttgtcctattcttcatttattcatactaggatagaaaattttggaatcagaaaatagatccagtgtttagctacatacaatctagtacaagtgaatttttattcttaaacataggtgtgttggctctttttttaaaagatgcgctctacctgaaaaggaaattggattttagaactggatgtggtgcagtgaagtattttaggcccaggtctgtgtacacattttatagaagaatgaagtactctgaagtattttggttgccttttcatttcaactgtgttttgaatttgtcagatcacacatatattgtgttattgggcgctgtggtatcttttataaaacctcttgcttgtgtgcaaaagttcctaaaaggaaacacaagtaatgcctatccattactagcatgctatgctgcatgctttactgccattgctgtatgctttactgtctttgtaaaaatccccctctccccttttctggtaactggaaaagcatgctaaaaatagtcttatattttcaccccataagtgcagaatcagtaattccttggcttaaagctcttatataatcaatattattggtggtaaataccaagtttggtatctcatagctatctttttttaaagaaattaagttcttgaaaatttagccaaatcccgttttatgggaatgctctttagaattcattttgttcagcccctttgttctatggttgagaaatctgaggccttacgaaggttaagagaactttccccgtgtctcacaggtaggtagaggcagagctggaactagatatctggtctgttgactctagctcagtgtcttctggtaactgttgaaaattgtcttagtttgagagatggctgaaataatgaacataaaatgctatttataataacaagtatatgtgaaatttcttattgtaagactactaccggcttactgttgaatagtttggttatagtgtttaggctagaaatgcctcccacattggtaataaacattacaaaatacaatgtatttttaggtaggcattttataaaatgcattatgccatggttgcttttgagatagattgtagtctgggtagcatctttaaaatgtatgtgggcttaactgttgttcatatcaggagatgctctgattgtataggtgagactctgtttctgttatttttaattgctgtatgaaatgtgatcagattattttactaccaacagttatagtttgaaagtccaactgtattaattgactgataatatgataatatagagattaaattgtttgtcttcattccttatatgtttagaagtttttgctttgtctgcctgcttacttgtatatgtaagcatgagggaaatacactgttgctaatactgaaattacaatcaagtaactaaggccttgagttcatatgtgacactgaatgcactagcttccttcgttctataactaatgtaccttaacttcccccattcttatatttacaagaagctaagtcattatgttctgagtgtgtggtatgttcccttaaaaaaaaatgacacttggaagaaaaatgtatgaaattcagaaattccgatcaaagaaaagtaattctttcttttttttttggagacagagtcttgctttgttgcccaggctggagggcagtggtgtgatctcacctcactgcagcttccgcctcctgggttcaagtgattctcatggctcagccgcctgagtagctgggattacaggtgtgagccaacaagcccggctaatttttgtatttttagtagagacaaggtttcaccatgttggtcaggctgggctcaaactcctgaatccgcctgcctcggcctcccaaagtgctgggattacaggtgtgagctgccgcacccagccaagaaaaataatactcttaaatacttagatgttcacctaaagttgatattatttggtatgggaattacttttgaactgtaatctttcagattacaccactttgaaaacaagttttaacagtagggtaaaaatatagtttttgagggtattcccaacttgtgatcttctaccactttagagacattcaagtaatagttttcttagagctttgcacattcctattcactgagattttaaaaatttcacctttattagagggaaggatcaatgcttattaccatttggaaaaacgaagatcagaaggtaaatgatctttattttctagctttaaagggaaattaaaccattcatgaataaactttaaaaatgtgaagtgtccttttccttttcacaatacaaaaaaaatttcaacagattgtgtggtttgtgcatttatatcctgttaagcattaatagctaatcactgggacttgaattctgatggcagatagtctcttgcttagtgagatggagttaactattttttagtaggaagtgagaacagctgattttcatgccacgtttcatagccccacttttggtagactaccaccacgcttcttcgcgtaacagttggcatcttgggaatgaatgcccagccgctcgtgggttggtgcaaagaagtataaacatatatcactaaggaaaaagaaagtttgtcttgcccttctgacacagtgtgtgcacttcaggcaatttttggaaaatataaaaaattccaaattctgcctttcagcagcatcaattgctaggaacatttcattcatttccctgtaatattaatgttctttaagcataatcactaattataagttgtatcctatttttttccagcttaatttctgtggtttattgaaaaccaagtataaatgtgactaaaagcattttgctttgtttttatagttaactttcttaaggttatggacattttataatgtaacatttgattggcctggcctcttgacaattcccttctagttatgcatatcctcctgttgccacatttcttgttttaaaactcagtttcttgttttccagttgttgctatgtataacacccatcttgaaagagagtatataggaagttattcagataacttttgtagtagtgatattcaactatagcagtaccttaactcatgatgagcttaggaacataaaagataattgttgcttgaatagcacccccagagatactgacctaattggtctggggtggagatctggcatggtagtttttttcaagctccaatcatcggccagacagttgctttatgtaggtttttaaatgccaaaggcagatatgaagtagatttaattaagacttgacttcagcaatacaggggaacttaaaatacttatttttctttaaactgcaggagtcactgttaggtattgcttaaaaaaaattgcataaaagctttgcttgtcaagttaggattgctggaataccactaaagatttttgacttgtgaataaatgagctgtcatcgcaaaaaggcgatttgagaaatgtgggcttcagtattaattgccattttgctgacacccagtgtacctacctacctgagaaatttattttgtccatcatgtatttctcaaagcaaaaggtggttttcaagtataatgtcgttttcaacatgcttattacttagttttacgtcagctcatttcatcatcattgataacttgtgaaatacttatctccatcctatggaataggggagacgggtttagacaggttcaattagctcaagtctacacagctgaagtagcagagaaagtgggatctagatggtctgatcctagtgatctaccatatgaaggacatagtttgtgtcctggtccaagtcaaatattgactcctcacaaacagtaagtatggcaattttgtgatgcctttgattccactttacatggagtactattatttgtgaaatgtctttaagatttttggtcttaaatttttgaagactgctttccccctttatctcccagaaaattgagaagaagtaaactcctgcccactaacaatctcagtccgtgaacaaaaccaacatgaacattcctaaacaagagtgtgtgttactctaagaagaaggctatagaatttatggaaatggcttatgtaacctacaagactggagaacagaatgtgactggccttttctaatggtcctttaagatttaatgattaaagcaagagttttttataattgactttgt

SEQ ID NO: 436386 - DNA, 1669 bp, Homo sapiens
acgtaggcacgcagaggccgtcacgtgggtcgccgaggctcgcaagtgcgcgtggccgtggcggctggtgtggggttgagtcagttgtgggacccggagctgctgacccagcgggtggcccaccgaaccggtgacacagcggcaggcgttagggctcgggagccgcgagcctggcctcgtcctagagctcggccgagccgtcgccgccgtcgtcccccgcccccagtcagcaaaccgccgccgcgggcgcgcccccgctctgcgctgtctctccgatggcgtccgcctcaggggccatggcgaagcacgagcagatcctggtcctcgatccgcccacagacctcaaattcaaaggccccttcacagatgtagtcactacaaatcttaaattgcgaaatccatcggatagaaaagtgtgtttcaaagtgaagactacagcacctcgccggtactgtgtgaggcccaacagtggaattattgacccagggtcaactgtgactgtttcagtaatgctacagccctttgactatgatccgaatgaaaagagtaaacacaagtttatggtacagacaatttttgctccaccaaacacttcagatatggaagctgtgtggaaagaggcaaaacctgatgaattaatggattccaaattgagatgcgtatttgaaatgcccaatgaaaatgataaattgaatgatatggaacctagcaaagctgttccactgaatgcatctaagcaagatggacctatgccaaaaccacacagtgtttcacttaatgataccgaaacaaggaaactaatggaagagtgtaaaagacttcagggagaaatgatgaagctatcagaagaaaatcggcacctgagagatgaaggtttaaggctcagaaaggtagcacattcggataaacctggatcaacctcaactgcatccttcagagataatgtcaccagtcctcttccttcacttcttgttgtaattgcagccattttcattggattctttctagggaaattcatcttgtagagtgaagcatgcagagtgctgtttctttttttttttttctcttgaccagaaaaagatttgtttacctaccatttcattggtagtatggcccacggtgaccatttttttgtgtgtacagcgtcatataggctttgcctttaatgatctcttacggttagaaaacacaataaaaacaaactgttcggctactggacaggttgtatattaccagatcatcactagcagatgtcagttgcacattgagtcctttatgaaattcataaataaagaattgttctttctttgtggttttaataagagttcaagaattgttcagagtcttgtaaatgttattttaataatccctttaaattttatctgttgctgttacctcttgaaatatgatttatttagattgctaatcccactcattcaggaaatgccaagaggtattccttggggaaatggtgcctcttacagtgtaaatttttcctcctttacctttgctaatatcatggcagaatttttcttatcccttgtgaggcagttgttgactgagtttttcatccttacaatcctgtcccatggtatttaacataaaaaaaaataaaactcagatgcggcagttctctttctccgtcccggtgatcaaggtgttgatttat

SEQ ID NO: 436387 - DNA, 5916 bp, Homo sapiens
actcttctttaattatatttttagtgggatttaaaaaaaggtaaatatagcctatctaacttttgctttttaggaatacatttctcagctccagttttaaaaaatcagtgttattgaggtataatttatatcccatggagacacccactgtgagtgtacaattcattgatacatagaactttgtaaccatcactatagttcagttttagaatgtctatcacccccggaaagtttccttatgtggttagcagttaatccccttttccgtccccagccataggcaaccactaatctactttccgtccctatagatttttagctccagtagtctcgttagtatgcttgtttttaaaaaccttttgtgtgtgtgttttttttctaggatgaaggtttaaggctcagaaaggtagcacattcggataaacctggatcaacctcaactgcatccttcagagataatgtcaccagtcctcttccttcacttcttgttgtaattgcagccattttcattggattctttctagggaaattcatcttgtagagtgaagcatgcagagtgctgtttctttttttttttttctcttgaccagaaaaagatttgtttacctaccatttcattggtagtatggcccacggtgaccatttttttgtgtgtacagcgtcatataggctttgcctttaatgatctcttacggttagaaaacacaataaaaacaaactgttcggctactggacaggttgtatattaccagatcatcactagcagatgtcagttgcacattgagtcctttatgaaattcataaataaagaattgttctttctttgtggttttaataagagttcaagaattgttcagagtcttgtaaatgttattttaataatccctttaaattttatctgttgctgttacctcttgaaatatgatttatttagattgctaatcccactcattcaggaaatgccaagaggtattccttggggaaatggtgcctcttacagtgtaaatttttcctcctttacctttgctaatatcatggcagaatttttcttatcccttgtgaggcagttgttgactgagtttttcatccttacaatcctgtcccatggtatttaacataaaaaaaaataaaactgttaacagattcttgctcgatagcttgtttgtgtctgtcgtgttattagagggaactccactatatatggtcacttgaaattatgatgcaaaggtttctcttgcattgaaaccctcttggatattacagtatttttaattgaaagtcctaattctgttaaggaaaggagttgattaaattttaaggtaccactggtattttgggagattataatcagtttgttttcaagataatagaaaataaggtccatgagaatagaagttatgtgatttcagtgagttgatgtgtacagcatggctgtgctccatctgatttaccccattcttaagttctgagagtatgttctcaaggaagatttaactctctttggttttaaattactttttaaccagcctaataaataagtcttactacttttcataatatttcataatagttaaaagtaggtgtttttttcgtgctcaatttggcactcaaaataatgttcattatggaagtttggtaatactgagcaagcctgtggaattttctttatgaaaaatgattttagcctttgcaaatgttaaccatgtgaaacacattttcagtataagtatgcgttacagggtttgatactttcctgcacttaggtttgtcctattcttcatttattcatactaggatagaaaattttggaatcagaaaatagatccagtgtttagctacatacaatctagtacaagtgaatttttattcttaaacataggtgtgttggctctttttttaaaagatgcgctctacctgaaaaggaaattggattttagaactggatgtggtgcagtgaagtattttaggcccaggtctgtgtacacattttatagaagaatgaagtactctgaagtattttggttgccttttcatttcaactgtgttttgaatttgtcagatcacacatatattgtgttattgggcgctgtggtatcttttataaaacctcttgcttgtgtgcaaaagttcctaaaaggaaacacaagtaatgcctatccattactagcatgctatgctgcatgctttactgccattgctgtatgctttactgtctttgtaaaaatccccctctccccttttctggtaactggaaaagcatgctaaaaatagtcttatattttcaccccataagtgcagaatcagtaattccttggcttaaagctcttatataatcaatattattggtggtaaataccaagtttggtatctcatagctatctttttttaaagaaattaagttcttgaaaatttagccaaatcccgttttatgggaatgctctttagaattcattttgttcagcccctttgttctatggttgagaaatctgaggccttacgaaggttaagagaactttccccgtgtctcacaggtaggtagaggcagagctggaactagatatctggtctgttgactctagctcagtgtcttctggtaactgttgaaaattgtcttagtttgagagatggctgaaataatgaacataaaatgctatttataataacaagtatatgtgaaatttcttattgtaagactactaccggcttactgttgaatagtttggttatagtgtttaggctagaaatgcctcccacattggtaataaacattacaaaatacaatgtatttttaggtaggcattttataaaatgcattatgccatggttgcttttgagatagattgtagtctgggtagcatctttaaaatgtatgtgggcttaactgttgttcatatcaggagatgctctgattgtataggtgagactctgtttctgttatttttaattgctgtatgaaatgtgatcagattattttactaccaacagttatagtttgaaagtccaactgtattaattgactgataatatgataatatagagattaaattgtttgtcttcattccttatatgtttagaagtttttgctttgtctgcctgcttacttgtatatgtaagcatgagggaaatacactgttgctaatactgaaattacaatcaagtaactaaggccttgagttcatatgtgacactgaatgcactagcttccttcgttctataactaatgtaccttaacttcccccattcttatatttacaagaagctaagtcattatgttctgagtgtgtggtatgttcccttaaaaaaaaatgacacttggaagaaaaatgtatgaaattcagaaattccgatcaaagaaaagtaattctttcttttttttttggagacagagtcttgctttgttgcccaggctggagggcagtggtgtgatctcacctcactgcagcttccgcctcctgggttcaagtgattctcatggctcagccgcctgagtagctgggattacaggtgtgagccaacaagcccggctaatttttgtatttttagtagagacaaggtttcaccatgttggtcaggctgggctcaaactcctgaatccgcctgcctcggcctcccaaagtgctgggattacaggtgtgagctgccgcacccagccaagaaaaataatactcttaaatacttagatgttcacctaaagttgatattatttggtatgggaattacttttgaactgtaatctttcagattacaccactttgaaaacaagttttaacagtagggtaaaaatatagtttttgagggtattcccaacttgtgatcttctaccactttagagacattcaagtaatagttttcttagagctttgcacattcctattcactgagattttaaaaatttcacctttattagagggaaggatcaatgcttattaccatttggaaaaacgaagatcagaaggtaaatgatctttattttctagctttaaagggaaattaaaccattcatgaataaactttaaaaatgtgaagtgtccttttccttttcacaatacaaaaaaaatttcaacagattgtgtggtttgtgcatttatatcctgttaagcattaatagctaatcactgggacttgaattctgatggcagatagtctcttgcttagtgagatggagttaactattttttagtaggaagtgagaacagctgattttcatgccacgtttcatagccccacttttggtagactaccaccacgcttcttcgcgtaacagttggcatcttgggaatgaatgcccagccgctcgtgggttggtgcaaagaagtataaacatatatcactaaggaaaaagaaagtttgtcttgcccttctgacacagtgtgtgcacttcaggcaatttttggaaaatataaaaaattccaaattctgcctttcagcagcatcaattgctaggaacatttcattcatttccctgtaatattaatgttctttaagcataatcactaattataagttgtatcctatttttttccagcttaatttctgtggtttattgaaaaccaagtataaatgtgactaaaagcattttgctttgtttttatagttaactttcttaaggttatggacattttataatgtaacatttgattggcctggcctcttgacaattcccttctagttatgcatatcctcctgttgccacatttcttgttttaaaactcagtttcttgttttccagttgttgctatgtataacacccatcttgaaagagagtatataggaagttattcagataacttttgtagtagtgatattcaactatagcagtaccttaactcatgatgagcttaggaacataaaagataattgttgcttgaatagcacccccagagatactgacctaattggtctggggtggagatctggcatggtagtttttttcaagctccaatcatcggccagacagttgctttatgtaggtttttaaatgccaaaggcagatatgaagtagatttaattaagacttgacttcagcaatacaggggaacttaaaatacttatttttctttaaactgcaggagtcactgttaggtattgcttaaaaaaaattgcataaaagctttgcttgtcaagttaggattgctggaataccactaaagatttttgacttgtgaataaatgagctgtcatcgcaaaaaggcgatttgagaaatgtgggcttcagtattaattgccattttgctgacacccagtgtacctacctacctgagaaatttattttgtccatcatgtatttctcaaagcaaaaggtggttttcaagtataatgtcgttttcaacatgcttattacttagttttacgtcagctcatttcatcatcattgataacttgtgaaatacttatctccatcctatggaataggggagacgggtttagacaggttcaattagctcaagtctacacagctgaagtagcagagaaagtgggatctagatggtctgatcctagtgatctaccatatgaaggacatagtttgtgtcctggtccaagtcaaatattgactcctcacaaacagtaagtatggcaattttgtgatgcctttgattccactttacatggagtactattatttgtgaaatgtctttaagatttttggtcttaaatttttgaagactgctttccccctttatctcccagaaaattgagaagaagtaaactcctgcccactaacaatctcagtccgtgaacaaaaccaacatgaacattcctaaacaagagtgtgtgttactctaagaagaaggctatagaatttatggaaatggcttatgtaacctacaagactggagaacagaatgtgactggccttttctaatggtcctttaagatttaatgattaaagcaagagttttttataattgactttgt

SEQ ID NO: 436388 - DNA, 5325 bp, Homo sapiens
tgctagtgatgatctggtaagatacaacctgtccagtagccggacagttcatttttttgtgtgtacagcgtcatataggctttgcctttaatgatctcttacggttagaaaacacaataaaaacaaactgttcggctactggacaggttgtatattaccagatcatcactagcagatgtcagttgcacattgagtcctttatgaaattcataaataaagaattgttctttctttgtggttttaataagagttcaagaattgttcagagtcttgtaaatgttattttaataatccctttaaattttatctgttgctgttacctcttgaaatatgatttatttagattgctaatcccactcattcaggaaatgccaagaggtattccttggggaaatggtgcctcttacagtgtaaatttttcctcctttacctttgctaatatcatggcagaatttttcttatcccttgtgaggcagttgttgactgagtttttcatccttacaatcctgtcccatggtatttaacataaaaaaaaataaaactgttaacagattcttgctcgatagcttgtttgtgtctgtcgtgttattagagggaactccactatatatggtcacttgaaattatgatgcaaaggtttctcttgcattgaaaccctcttggatattacagtatttttaattgaaagtcctaattctgttaaggaaaggagttgattaaattttaaggtaccactggtattttgggagattataatcagtttgttttcaagataatagaaaataaggtccatgagaatagaagttatgtgatttcagtgagttgatgtgtacagcatggctgtgctccatctgatttaccccattcttaagttctgagagtatgttctcaaggaagatttaactctctttggttttaaattactttttaaccagcctaataaataagtcttactacttttcataatatttcataatagttaaaagtaggtgtttttttcgtgctcaatttggcactcaaaataatgttcattatggaagtttggtaatactgagcaagcctgtggaattttctttatgaaaaatgattttagcctttgcaaatgttaaccatgtgaaacacattttcagtataagtatgcgttacagggtttgatactttcctgcacttaggtttgtcctattcttcatttattcatactaggatagaaaattttggaatcagaaaatagatccagtgtttagctacatacaatctagtacaagtgaatttttattcttaaacataggtgtgttggctctttttttaaaagatgcgctctacctgaaaaggaaattggattttagaactggatgtggtgcagtgaagtattttaggcccaggtctgtgtacacattttatagaagaatgaagtactctgaagtattttggttgccttttcatttcaactgtgttttgaatttgtcagatcacacatatattgtgttattgggcgctgtggtatcttttataaaacctcttgcttgtgtgcaaaagttcctaaaaggaaacacaagtaatgcctatccattactagcatgctatgctgcatgctttactgccattgctgtatgctttactgtctttgtaaaaatccccctctccccttttctggtaactggaaaagcatgctaaaaatagtcttatattttcaccccataagtgcagaatcagtaattccttggcttaaagctcttatataatcaatattattggtggtaaataccaagtttggtatctcatagctatctttttttaaagaaattaagttcttgaaaatttagccaaatcccgttttatgggaatgctctttagaattcattttgttcagcccctttgttctatggttgagaaatctgaggccttacgaaggttaagagaactttccccgtgtctcacaggtaggtagaggcagagctggaactagatatctggtctgttgactctagctcagtgtcttctggtaactgttgaaaattgtcttagtttgagagatggctgaaataatgaacataaaatgctatttataataacaagtatatgtgaaatttcttattgtaagactactaccggcttactgttgaatagtttggttatagtgtttaggctagaaatgcctcccacattggtaataaacattacaaaatacaatgtatttttaggtaggcattttataaaatgcattatgccatggttgcttttgagatagattgtagtctgggtagcatctttaaaatgtatgtgggcttaactgttgttcatatcaggagatgctctgattgtataggtgagactctgtttctgttatttttaattgctgtatgaaatgtgatcagattattttactaccaacagttatagtttgaaagtccaactgtattaattgactgataatatgataatatagagattaaattgtttgtcttcattccttatatgtttagaagtttttgctttgtctgcctgcttacttgtatatgtaagcatgagggaaatacactgttgctaatactgaaattacaatcaagtaactaaggccttgagttcatatgtgacactgaatgcactagcttccttcgttctataactaatgtaccttaacttcccccattcttatatttacaagaagctaagtcattatgttctgagtgtgtggtatgttcccttaaaaaaaaatgacacttggaagaaaaatgtatgaaattcagaaattccgatcaaagaaaagtaattctttcttttttttttggagacagagtcttgctttgttgcccaggctggagggcagtggtgtgatctcacctcactgcagcttccgcctcctgggttcaagtgattctcatggctcagccgcctgagtagctgggattacaggtgtgagccaacaagcccggctaatttttgtatttttagtagagacaaggtttcaccatgttggtcaggctgggctcaaactcctgaatccgcctgcctcggcctcccaaagtgctgggattacaggtgtgagctgccgcacccagccaagaaaaataatactcttaaatacttagatgttcacctaaagttgatattatttggtatgggaattacttttgaactgtaatctttcagattacaccactttgaaaacaagttttaacagtagggtaaaaatatagtttttgagggtattcccaacttgtgatcttctaccactttagagacattcaagtaatagttttcttagagctttgcacattcctattcactgagattttaaaaatttcacctttattagagggaaggatcaatgcttattaccatttggaaaaacgaagatcagaaggtaaatgatctttattttctagctttaaagggaaattaaaccattcatgaataaactttaaaaatgtgaagtgtccttttccttttcacaatacaaaaaaaatttcaacagattgtgtggtttgtgcatttatatcctgttaagcattaatagctaatcactgggacttgaattctgatggcagatagtctcttgcttagtgagatggagttaactattttttagtaggaagtgagaacagctgattttcatgccacgtttcatagccccacttttggtagactaccaccacgcttcttcgcgtaacagttggcatcttgggaatgaatgcccagccgctcgtgggttggtgcaaagaagtataaacatatatcactaaggaaaaagaaagtttgtcttgcccttctgacacagtgtgtgcacttcaggcaatttttggaaaatataaaaaattccaaattctgcctttcagcagcatcaattgctaggaacatttcattcatttccctgtaatattaatgttctttaagcataatcactaattataagttgtatcctatttttttccagcttaatttctgtggtttattgaaaaccaagtataaatgtgactaaaagcattttgctttgtttttatagttaactttcttaaggttatggacattttataatgtaacatttgattggcctggcctcttgacaattcccttctagttatgcatatcctcctgttgccacatttcttgttttaaaactcagtttcttgttttccagttgttgctatgtataacacccatcttgaaagagagtatataggaagttattcagataacttttgtagtagtgatattcaactatagcagtaccttaactcatgatgagcttaggaacataaaagataattgttgcttgaatagcacccccagagatactgacctaattggtctggggtggagatctggcatggtagtttttttcaagctccaatcatcggccagacagttgctttatgtaggtttttaaatgccaaaggcagatatgaagtagatttaattaagacttgacttcagcaatacaggggaacttaaaatacttatttttctttaaactgcaggagtcactgttaggtattgcttaaaaaaaattgcataaaagctttgcttgtcaagttaggattgctggaataccactaaagatttttgacttgtgaataaatgagctgtcatcgcaaaaaggcgatttgagaaatgtgggcttcagtattaattgccattttgctgacacccagtgtacctacctacctgagaaatttattttgtccatcatgtatttctcaaagcaaaaggtggttttcaagtataatgtcgttttcaacatgcttattacttagttttacgtcagctcatttcatcatcattgataacttgtgaaatacttatctccatcctatggaataggggagacgggtttagacaggttcaattagctcaagtctacacagctgaagtagcagagaaagtgggatctagatggtctgatcctagtgatctaccatatgaaggacatagtttgtgtcctggtccaagtcaaatattgactcctcacaaacagtaagtatggcaattttgtgatgcctttgattccactttacatggagtactattatttgtgaaatgtctttaagatttttggtcttaaatttttgaagactgctttccccctttatctcccagaaaattgagaagaagtaaactcctgcccactaacaatctcagtccgtgaacaaaaccaacatgaacattcctaaacaagagtgtgtgttactctaagaagaaggctatagaatttatggaaatggcttatgtaacctacaagactggagaacagaatgtgactggccttttctaatggtcctttaagatttaatgattaaagcaagagttttttataattgactttgt

SEQ ID NO: 436389 - DNA, 5025 bp, Homo sapiens
gaccgttggtgtgcgtgttagctcgtgaaatatggaggatgtagattgggggtgcgggtgggctggggggtgggggaggtattccttggggaaatggtgcctcttacagtgtaaatttttcctcctttacctttgctaatatcatggcagaatttttcttatcccttgtgaggcagttgttgactgagtttttcatccttacaatcctgtcccatggtatttaacataaaaaaaaataaaactgttaacagattcttgctcgatagcttgtttgtgtctgtcgtgttattagagggaactccactatatatggtcacttgaaattatgatgcaaaggtttctcttgcattgaaaccctcttggatattacagtatttttaattgaaagtcctaattctgttaaggaaaggagttgattaaattttaaggtaccactggtattttgggagattataatcagtttgttttcaagataatagaaaataaggtccatgagaatagaagttatgtgatttcagtgagttgatgtgtacagcatggctgtgctccatctgatttaccccattcttaagttctgagagtatgttctcaaggaagatttaactctctttggttttaaattactttttaaccagcctaataaataagtcttactacttttcataatatttcataatagttaaaagtaggtgtttttttcgtgctcaatttggcactcaaaataatgttcattatggaagtttggtaatactgagcaagcctgtggaattttctttatgaaaaatgattttagcctttgcaaatgttaaccatgtgaaacacattttcagtataagtatgcgttacagggtttgatactttcctgcacttaggtttgtcctattcttcatttattcatactaggatagaaaattttggaatcagaaaatagatccagtgtttagctacatacaatctagtacaagtgaatttttattcttaaacataggtgtgttggctctttttttaaaagatgcgctctacctgaaaaggaaattggattttagaactggatgtggtgcagtgaagtattttaggcccaggtctgtgtacacattttatagaagaatgaagtactctgaagtattttggttgccttttcatttcaactgtgttttgaatttgtcagatcacacatatattgtgttattgggcgctgtggtatcttttataaaacctcttgcttgtgtgcaaaagttcctaaaaggaaacacaagtaatgcctatccattactagcatgctatgctgcatgctttactgccattgctgtatgctttactgtctttgtaaaaatccccctctccccttttctggtaactggaaaagcatgctaaaaatagtcttatattttcaccccataagtgcagaatcagtaattccttggcttaaagctcttatataatcaatattattggtggtaaataccaagtttggtatctcatagctatctttttttaaagaaattaagttcttgaaaatttagccaaatcccgttttatgggaatgctctttagaattcattttgttcagcccctttgttctatggttgagaaatctgaggccttacgaaggttaagagaactttccccgtgtctcacaggtaggtagaggcagagctggaactagatatctggtctgttgactctagctcagtgtcttctggtaactgttgaaaattgtcttagtttgagagatggctgaaataatgaacataaaatgctatttataataacaagtatatgtgaaatttcttattgtaagactactaccggcttactgttgaatagtttggttatagtgtttaggctagaaatgcctcccacattggtaataaacattacaaaatacaatgtatttttaggtaggcattttataaaatgcattatgccatggttgcttttgagatagattgtagtctgggtagcatctttaaaatgtatgtgggcttaactgttgttcatatcaggagatgctctgattgtataggtgagactctgtttctgttatttttaattgctgtatgaaatgtgatcagattattttactaccaacagttatagtttgaaagtccaactgtattaattgactgataatatgataatatagagattaaattgtttgtcttcattccttatatgtttagaagtttttgctttgtctgcctgcttacttgtatatgtaagcatgagggaaatacactgttgctaatactgaaattacaatcaagtaactaaggccttgagttcatatgtgacactgaatgcactagcttccttcgttctataactaatgtaccttaacttcccccattcttatatttacaagaagctaagtcattatgttctgagtgtgtggtatgttcccttaaaaaaaaatgacacttggaagaaaaatgtatgaaattcagaaattccgatcaaagaaaagtaattctttcttttttttttggagacagagtcttgctttgttgcccaggctggagggcagtggtgtgatctcacctcactgcagcttccgcctcctgggttcaagtgattctcatggctcagccgcctgagtagctgggattacaggtgtgagccaacaagcccggctaatttttgtatttttagtagagacaaggtttcaccatgttggtcaggctgggctcaaactcctgaatccgcctgcctcggcctcccaaagtgctgggattacaggtgtgagctgccgcacccagccaagaaaaataatactcttaaatacttagatgttcacctaaagttgatattatttggtatgggaattacttttgaactgtaatctttcagattacaccactttgaaaacaagttttaacagtagggtaaaaatatagtttttgagggtattcccaacttgtgatcttctaccactttagagacattcaagtaatagttttcttagagctttgcacattcctattcactgagattttaaaaatttcacctttattagagggaaggatcaatgcttattaccatttggaaaaacgaagatcagaaggtaaatgatctttattttctagctttaaagggaaattaaaccattcatgaataaactttaaaaatgtgaagtgtccttttccttttcacaatacaaaaaaaatttcaacagattgtgtggtttgtgcatttatatcctgttaagcattaatagctaatcactgggacttgaattctgatggcagatagtctcttgcttagtgagatggagttaactattttttagtaggaagtgagaacagctgattttcatgccacgtttcatagccccacttttggtagactaccaccacgcttcttcgcgtaacagttggcatcttgggaatgaatgcccagccgctcgtgggttggtgcaaagaagtataaacatatatcactaaggaaaaagaaagtttgtcttgcccttctgacacagtgtgtgcacttcaggcaatttttggaaaatataaaaaattccaaattctgcctttcagcagcatcaattgctaggaacatttcattcatttccctgtaatattaatgttctttaagcataatcactaattataagttgtatcctatttttttccagcttaatttctgtggtttattgaaaaccaagtataaatgtgactaaaagcattttgctttgtttttatagttaactttcttaaggttatggacattttataatgtaacatttgattggcctggcctcttgacaattcccttctagttatgcatatcctcctgttgccacatttcttgttttaaaactcagtttcttgttttccagttgttgctatgtataacacccatcttgaaagagagtatataggaagttattcagataacttttgtagtagtgatattcaactatagcagtaccttaactcatgatgagcttaggaacataaaagataattgttgcttgaatagcacccccagagatactgacctaattggtctggggtggagatctggcatggtagtttttttcaagctccaatcatcggccagacagttgctttatgtaggtttttaaatgccaaaggcagatatgaagtagatttaattaagacttgacttcagcaatacaggggaacttaaaatacttatttttctttaaactgcaggagtcactgttaggtattgcttaaaaaaaattgcataaaagctttgcttgtcaagttaggattgctggaataccactaaagatttttgacttgtgaataaatgagctgtcatcgcaaaaaggcgatttgagaaatgtgggcttcagtattaattgccattttgctgacacccagtgtacctacctacctgagaaatttattttgtccatcatgtatttctcaaagcaaaaggtggttttcaagtataatgtcgttttcaacatgcttattacttagttttacgtcagctcatttcatcatcattgataacttgtgaaatacttatctccatcctatggaataggggagacgggtttagacaggttcaattagctcaagtctacacagctgaagtagcagagaaagtgggatctagatggtctgatcctagtgatctaccatatgaaggacatagtttgtgtcctggtccaagtcaaatattgactcctcacaaacagtaagtatggcaattttgtgatgcctttgattccactttacatggagtactattatttgtgaaatgtctttaagatttttggtcttaaatttttgaagactgctttccccctttatctcccagaaaattgagaagaagtaaactcctgcccactaacaatctcagtccgtgaacaaaaccaacatgaacattcctaaacaagagtgtgtgttactctaagaagaaggctatagaatttatggaaatggcttatgtaacctacaagactggagaacagaatgtgactggccttttctaatggtcctttaagatttaatgattaaagcaagagttttttataattgactttgt

SEQ ID NO: 436390 - DNA, 928 bp, Homo sapiens
acgtaggcacgcagaggccgtcacgtgggtcgccgaggctcgcaagtgcgcgtggccgtggcggctggtgtggggttgagtcagttgtgggacccggagctgctgacccagcgggtggcccaccgaaccggtgacacagcggcaggcgttagggctcgggagccgcgagcctggcctcgtcctagagctcggccgagccgtcgccgccgtcgtcccccgcccccagtcagcaaaccgccgccgcgggcgcgcccccgctctgcgctgtctctccgatggcgtccgcctcaggggccatggcgaagcacgagcagatcctggtcctcgatccgcccacagacctcaaattcaaaggccccttcacagatgtagtcactacaaatcttaaattgcgaaatccatcggatagaaaagtgtgtttcaaagtgaagactacagcacctcgccggtactgtgtgaggcccaacagtggaattattgacccagggtcaactgtgactgtttcagtaatgctacagccctttgactatgatccgaatgaaaagagtaaacacaagtttatggtacagacaatttttgctccaccaaacacttcagatatggaagctgtgtggaaagaggcaaaacctgatgaattaatggattccaaattgagatgcgtatttgaaatgcccaatgaaaatgataaattgggtataactccaccagggaatgctccgactgtcacttcaatgagcagcatcaacaacacagttgcaacacctgccagttatcacacgaaggatgaccccaggggactcagtgtgttgaaacaggagaaacagaagaatgatatgtacctatcaaactggtcactgaatgcctctaaccagatggacctttgccccacagtggttacttatgatccgaacaaggaactattggtggt

SEQ ID NO: 436391 - DNA, 3549 bp, Homo sapiens
acgtaggcacgcagaggccgtcacgtgggtcgccgaggctcgcaagtgcgcgtggccgtggcggctggtgtggggttgagtcagttgtgggacccggagctgctgacccagcgggtggcccaccgaaccggtgacacagcggcaggcgttagggctcgggagccgcgagcctggcctcgtcctagagctcggccgagccgtcgccgccgtcgtcccccgcccccagtcagcaaaccgccgccgcgggcgcgcccccgctctgcgctgtctctccgatggcgtccgcctcaggggccatggcgaagcacgagcagatcctggtcctcgatccgcccacagacctcaaattcaaaggccccttcacagatgtagtcactacaaatcttaaattgcgaaatccatcggatagaaaagtgtgtttcaaagtgaagactacagcacctcgccggtactgtgtgaggcccaacagtggaattattgacccagggtcaactgtgactgtttcagtaatgctacagccctttgactatgatccgaatgaaaagagtaaacacaagtttatggtacagacaatttttgctccaccaaacacttcagatatggaagctgtgtggaaagaggcaaaacctgatgaattaatggattccaaattgagatgcgtatttgaaatgcccaatgaaaatgataaattgaatgatatggaacctagcaaagctgttccactgaatgcatctaagcaagatggacctatgccaaaaccacacagtgtttcacttaatgataccgaaacaaggaaactaatggaagagtgtaaaagacttcagggagaaatgatgaagctatcagaagaaaatcggcacctgagagatgaaggtttaaggctcagaaaggtagcacattcggataaacctggatcaacctcaactgcatccttcagagataatgtcaccagtcctcttccttcacttcttgttgtaattgcagccattttcattggattctttctagggaaattcatcttgtagagtgaagcatgcagagtgctgtttctttttttttttttctcttgaccagaaaaagatttgtttacctaccatttcattggtagtatggcccacggtgaccatttttttgtgtgtacagcgtcatataggctttgcctttaatgatctcttacggttagaaaacacaataaaaacaaactgttcggctactggacaggttgtatattaccagatcatcactagcagatgtcagttgcacattgagtcctttatgaaattcataaataaagaattgttctttctttgtggttttaataagagttcaagaattgttcagagtcttgtaaatgttattttaataatccctttaaattttatctgttgctgttacctcttgaaatatgatttatttagattgctaatcccactcattcaggaaatgccaagaggtattccttggggaaatggtgcctcttacagtgtaaatttttcctcctttacctttgctaatatcatggcagaatttttcttatcccttgtgaggcagttgttgactgagtttttcatccttacaatcctgtcccatggtatttaacataaaaaaaaataaaactgttaacagattcttgctcgatagcttgtttgtgtctgtcgtgttattagagggaactccactatatatggtcacttgaaattatgatgcaaaggtttctcttgcattgaaaccctcttggatattacagtatttttaattgaaagtcctaattctgttaaggaaaggagttgattaaattttaaggtaccactggtattttgggagattataatcagtttgttttcaagataatagaaaataaggtccatgagaatagaagttatgtgatttcagtgagttgatgtgtacagcatggctgtgctccatctgatttaccccattcttaagttctgagagtatgttctcaaggaagatttaactctctttggttttaaattactttttaaccagcctaataaataagtcttactacttttcataatatttcataatagttaaaagtaggtgtttttttcgtgctcaatttggcactcaaaataatgttcattatggaagtttggtaatactgagcaagcctgtggaattttctttatgaaaaatgattttagcctttgcaaatgttaaccatgtgaaacacattttcagtataagtatgcgttacagggtttgatactttcctgcacttaggtttgtcctattcttcatttattcatactaggatagaaaattttggaatcagaaaatagatccagtgtttagctacatacaatctagtacaagtgaatttttattcttaaacataggtgtgttggctctttttttaaaagatgcgctctacctgaaaaggaaattggattttagaactggatgtggtgcagtgaagtattttaggcccaggtctgtgtacacattttatagaagaatgaagtactctgaagtattttggttgccttttcatttcaactgtgttttgaatttgtcagatcacacatatattgtgttattgggcgctgtggtatcttttataaaacctcttgcttgtgtgcaaaagttcctaaaaggaaacacaagtaatgcctatccattactagcatgctatgctgcatgctttactgccattgctgtatgctttactgtctttgtaaaaatccccctctccccttttctggtaactggaaaagcatgctaaaaatagtcttatattttcaccccataagtgcagaatcagtaattccttggcttaaagctcttatataatcaatattattggtggtaaataccaagtttggtatctcatagctatctttttttaaagaaattaagttcttgaaaatttagccaaatcccgttttatgggaatgctctttagaattcattttgttcagcccctttgttctatggttgagaaatctgaggccttacgaaggttaagagaactttccccgtgtctcacaggtaggtagaggcagagctggaactagatatctggtctgttgactctagctcagtgtcttctggtaactgttgaaaattgtcttagtttgagagatggctgaaataatgaacataaaatgctatttataataacaagtatatgtgaaatttcttattgtaagactactaccggcttactgttgaatagtttggttatagtgtttaggctagaaatgcctcccacattggtaataaacattacaaaatacaatgtatttttaggtaggcattttataaaatgcattatgccatggttgcttttgagatagattgtagtctgggtagcatctttaaaatgtatgtgggcttaactgttgttcatatcaggagatgctctgattgtataggtgagactctgtttctgttatttttaattgctgtatgaaatgtgatcagattattttactaccaacagttatagtttgaaagtccaactgtattaattgactgataatatgataatatagagattaaattgtttgtcttcattcctta

SEQ ID NO: 436392 - DNA, 1659 bp, Homo sapiens
acgtaggcacgcagaggccgtcacgtgggtcgccgaggctcgcaagtgcgcgtggccgtggcggctggtgtggggttgagtcagttgtgggacccggagctgctgacccagcgggtggcccaccgaaccggtgacacagcggcaggcgttagggctcgggagccgcgagcctggcctcgtcctagagctcggccgagccgtcgccgccgtcgtcccccgcccccagtcagcaaaccgccgccgcgggcgcgcccccgctctgcgctgtctctccgatggcgtccgcctcaggggccatggcgaagcacgagcagatcctggtcctcgatccgcccacagacctcaaattcaaaggccccttcacagatgtagtcactacaaatcttaaattgcgaaatccatcggatagaaaagtgtgtttcaaagtgaagactacagcacctcgccggtactgtgtgaggcccaacagtggaattattgacccagggtcaactgtgactgtttcagtaatgctacagccctttgactatgatccgaatgaaaagagtaaacacaagtttatggtacagacaatttttgctccaccaaacacttcagatatggaagctgtgtggaaagaggcaaaacctgatgaattaatggattccaaattgagatgcgtatttgaaatgcccaatgaaaatgataaattgaatgatatggaacctagcaaagctgttccactgaatgcatctaagcaagatggacctatgccaaaaccacacagtgtttcacttaatgataccgaaacaaggaaactaatggaagagtgtaaaagacttcagggagaaatgatgaagctatcagaagaaaatcggcacctgagagatgaaggtttaaggctcagaaaggtagcacattcggataaacctggatcaacctcaactgcatccttcagagataatgtcaccagtcctcttccttcacttcttgttgtaattgcagccattttcattggattctttctagggaaattcatcttgtagagtgaagcatgcagagtgctgtttctttttttttttttctcttgaccagaaaaagatttgtttacctaccatttcattggtagtatggcccacggtgaccatttttttgtgtgtacagcgtcatataggctttgcctttaatgatctcttacggttagaaaacacaataaaaacaaactgttcggctactggacaggttgtatattaccagatcatcactagcagatgtcagttgcacattgagtcctttatgaaattcataaataaagaattgttctttctttgtggttttaataagagttcaagaattgttcagagtcttgtaaatgttattttaataatccctttaaattttatctgttgctgttacctcttgaaatatgatttatttagattgctaatcccactcattcaggaaatgccaagaggtattccttggggaaatggtgcctcttacagtgtaaatttttcctcctttacctttgctaatatcatggcagaatttttcttatcccttgtgaggcagttgttgactgagtttttcatccttacggggggggtgcccggccccctttttataacatcaaacgccctagggctgttaaagggtttttagttttttcgggggggggaa

SEQ ID NO: 436393 - DNA, 5260 bp, Homo sapiens
tactactactaaattcagcggccgtcgactctcttacggttagaaaacacaataaaaacaaactgttcggctactggacaggttgtatattaccagatcatcactagcagatgtcagttgcacattgagtcctttatgaaattcataaataaagaattgttctttctttgtggttttaataagagttcaagaattgttcagagtcttgtaaatgttattttaataatccctttaaattttatctgttgctgttacctcttgaaatatgatttatttagattgctaatcccactcattcaggaaatgccaagaggtattccttggggaaatggtgcctcttacagtgtaaatttttcctcctttacctttgctaatatcatggcagaatttttcttatcccttgtgaggcagttgttgactgagtttttcatccttacaatcctgtcccatggtatttaacataaaaaaaaataaaactgttaacagattcttgctcgatagcttgtttgtgtctgtcgtgttattagagggaactccactatatatggtcacttgaaattatgatgcaaaggtttctcttgcattgaaaccctcttggatattacagtatttttaattgaaagtcctaattctgttaaggaaaggagttgattaaattttaaggtaccactggtattttgggagattataatcagtttgttttcaagataatagaaaataaggtccatgagaatagaagttatgtgatttcagtgagttgatgtgtacagcatggctgtgctccatctgatttaccccattcttaagttctgagagtatgttctcaaggaagatttaactctctttggttttaaattactttttaaccagcctaataaataagtcttactacttttcataatatttcataatagttaaaagtaggtgtttttttcgtgctcaatttggcactcaaaataatgttcattatggaagtttggtaatactgagcaagcctgtggaattttctttatgaaaaatgattttagcctttgcaaatgttaaccatgtgaaacacattttcagtataagtatgcgttacagggtttgatactttcctgcacttaggtttgtcctattcttcatttattcatactaggatagaaaattttggaatcagaaaatagatccagtgtttagctacatacaatctagtacaagtgaatttttattcttaaacataggtgtgttggctctttttttaaaagatgcgctctacctgaaaaggaaattggattttagaactggatgtggtgcagtgaagtattttaggcccaggtctgtgtacacattttatagaagaatgaagtactctgaagtattttggttgccttttcatttcaactgtgttttgaatttgtcagatcacacatatattgtgttattgggcgctgtggtatcttttataaaacctcttgcttgtgtgcaaaagttcctaaaaggaaacacaagtaatgcctatccattactagcatgctatgctgcatgctttactgccattgctgtatgctttactgtctttgtaaaaatccccctctccccttttctggtaactggaaaagcatgctaaaaatagtcttatattttcaccccataagtgcagaatcagtaattccttggcttaaagctcttatataatcaatattattggtggtaaataccaagtttggtatctcatagctatctttttttaaagaaattaagttcttgaaaatttagccaaatcccgttttatgggaatgctctttagaattcattttgttcagcccctttgttctatggttgagaaatctgaggccttacgaaggttaagagaactttccccgtgtctcacaggtaggtagaggcagagctggaactagatatctggtctgttgactctagctcagtgtcttctggtaactgttgaaaattgtcttagtttgagagatggctgaaataatgaacataaaatgctatttataataacaagtatatgtgaaatttcttattgtaagactactaccggcttactgttgaatagtttggttatagtgtttaggctagaaatgcctcccacattggtaataaacattacaaaatacaatgtatttttaggtaggcattttataaaatgcattatgccatggttgcttttgagatagattgtagtctgggtagcatctttaaaatgtatgtgggcttaactgttgttcatatcaggagatgctctgattgtataggtgagactctgtttctgttatttttaattgctgtatgaaatgtgatcagattattttactaccaacagttatagtttgaaagtccaactgtattaattgactgataatatgataatatagagattaaattgtttgtcttcattccttatatgtttagaagtttttgctttgtctgcctgcttacttgtatatgtaagcatgagggaaatacactgttgctaatactgaaattacaatcaagtaactaaggccttgagttcatatgtgacactgaatgcactagcttccttcgttctataactaatgtaccttaacttcccccattcttatatttacaagaagctaagtcattatgttctgagtgtgtggtatgttcccttaaaaaaaaatgacacttggaagaaaaatgtatgaaattcagaaattccgatcaaagaaaagtaattctttcttttttttttggagacagagtcttgctttgttgcccaggctggagggcagtggtgtgatctcacctcactgcagcttccgcctcctgggttcaagtgattctcatggctcagccgcctgagtagctgggattacaggtgtgagccaacaagcccggctaatttttgtatttttagtagagacaaggtttcaccatgttggtcaggctgggctcaaactcctgaatccgcctgcctcggcctcccaaagtgctgggattacaggtgtgagctgccgcacccagccaagaaaaataatactcttaaatacttagatgttcacctaaagttgatattatttggtatgggaattacttttgaactgtaatctttcagattacaccactttgaaaacaagttttaacagtagggtaaaaatatagtttttgagggtattcccaacttgtgatcttctaccactttagagacattcaagtaatagttttcttagagctttgcacattcctattcactgagattttaaaaatttcacctttattagagggaaggatcaatgcttattaccatttggaaaaacgaagatcagaaggtaaatgatctttattttctagctttaaagggaaattaaaccattcatgaataaactttaaaaatgtgaagtgtccttttccttttcacaatacaaaaaaaatttcaacagattgtgtggtttgtgcatttatatcctgttaagcattaatagctaatcactgggacttgaattctgatggcagatagtctcttgcttagtgagatggagttaactattttttagtaggaagtgagaacagctgattttcatgccacgtttcatagccccacttttggtagactaccaccacgcttcttcgcgtaacagttggcatcttgggaatgaatgcccagccgctcgtgggttggtgcaaagaagtataaacatatatcactaaggaaaaagaaagtttgtcttgcccttctgacacagtgtgtgcacttcaggcaatttttggaaaatataaaaaattccaaattctgcctttcagcagcatcaattgctaggaacatttcattcatttccctgtaatattaatgttctttaagcataatcactaattataagttgtatcctatttttttccagcttaatttctgtggtttattgaaaaccaagtataaatgtgactaaaagcattttgctttgtttttatagttaactttcttaaggttatggacattttataatgtaacatttgattggcctggcctcttgacaattcccttctagttatgcatatcctcctgttgccacatttcttgttttaaaactcagtttcttgttttccagttgttgctatgtataacacccatcttgaaagagagtatataggaagttattcagataacttttgtagtagtgatattcaactatagcagtaccttaactcatgatgagcttaggaacataaaagataattgttgcttgaatagcacccccagagatactgacctaattggtctggggtggagatctggcatggtagtttttttcaagctccaatcatcggccagacagttgctttatgtaggtttttaaatgccaaaggcagatatgaagtagatttaattaagacttgacttcagcaatacaggggaacttaaaatacttatttttctttaaactgcaggagtcactgttaggtattgcttaaaaaaaattgcataaaagctttgcttgtcaagttaggattgctggaataccactaaagatttttgacttgtgaataaatgagctgtcatcgcaaaaaggcgatttgagaaatgtgggcttcagtattaattgccattttgctgacacccagtgtacctacctacctgagaaatttattttgtccatcatgtatttctcaaagcaaaaggtggttttcaagtataatgtcgttttcaacatgcttattacttagttttacgtcagctcatttcatcatcattgataacttgtgaaatacttatctccatcctatggaataggggagacgggtttagacaggttcaattagctcaagtctacacagctgaagtagcagagaaagtgggatctagatggtctgatcctagtgatctaccatatgaaggacatagtttgtgtcctggtccaagtcaaatattgactcctcacaaacagtaagtatggcaattttgtgatgcctttgattccactttacatggagtactattatttgtgaaatgtctttaagatttttggtcttaaatttttgaagactgctttccccctttatctcccagaaaattgagaagaagtaaactcctgcccactaacaatctcagtccgtgaacaaaaccaacatgaacattcctaaacaagagtgtgtgttactctaagaagaaggctatagaatttatggaaatggcttatgtaacctacaagactggagaacagaatgtgactggccttttctaatggtcctttaagatttaatgattaaagcaagagttttttataattgactttgt

SEQ ID NO: 436394 - DNA, 6845 bp, Homo sapiens
acgtaggcacgcagaggccgtcacgtgggtcgccgaggctcgcaagtgcgcgtggccgtggcggctggtgtggggttgagtcagttgtgggacccggagctgctgacccagcgggtggcccaccgaaccggtgacacagcggcaggcgttagggctcgggagccgcgagcctggcctcgtcctagagctcggccgagccgtcgccgccgtcgtcccccgcccccagtcagcaaaccgccgccgcgggcgcgcccccgctctgcgctgtctctccgatggcgtccgcctcaggggccatggcgaagcacgagcagatcctggtcctcgatccgcccacagacctcaaattcaaaggccccttcacagatgtagtcactacaaatcttaaattgcgaaatccatcggatagaaaagtgtgtttcaaagtgaagactacagcacctcgccggtactgtgtgaggcccaacagtggaattattgacccagggtcaactgtgactgtttcagtaatgctacagccctttgactatgatccgaatgaaaagagtaaacacaagtttatggtacagacaatttttgctccaccaaacacttcagatatggaagctgtgtggaaagaggcaaaacctgatgaattaatggattccaaattgagatgcgtatttgaaatgcccaatgaaaatgataaattgaatgatatggaacctagcaaagctgttccactgaatgcatctaagcaagatggacctatgccaaaaccacacagtgtttcacttaatgataccgaaacaaggaaactaatggaagagtgtaaaagacttcagggagaaatgatgaagctatcagaagaaaatcggcacctgagagatgaaggtttaaggctcagaaaggtagcacattcggataaacctggatcaacctcaactgcatccttcagagataatgtcaccagtcctcttccttcacttcttgttgtaattgcagccattttcattggattctttctagggaaattcatcttgtagagtgaagcatgcagagtgctgtttctttttttttttttctcttgaccagaaaaagatttgtttacctaccatttcattggtagtatggcccacggtgaccatttttttgtgtgtacagcgtcatataggctttgcctttaatgatctcttacggttagaaaacacaataaaaacaaactgttcggctactggacaggttgtatattaccagatcatcactagcagatgtcagttgcacattgagtcctttatgaaattcataaataaagaattgttctttctttgtggttttaataagagttcaagaattgttcagagtcttgtaaatgttattttaataatccctttaaattttatctgttgctgttacctcttgaaatatgatttatttagattgctaatcccactcattcaggaaatgccaagaggtattccttggggaaatggtgcctcttacagtgtaaatttttcctcctttacctttgctaatatcatggcagaatttttcttatcccttgtgaggcagttgttgactgagtttttcatccttacaatcctgtcccatggtatttaacataaaaaaaaataaaactgttaacagattcttgctcgatagcttgtttgtgtctgtcgtgttattagagggaactccactatatatggtcacttgaaattatgatgcaaaggtttctcttgcattgaaaccctcttggatattacagtatttttaattgaaagtcctaattctgttaaggaaaggagttgattaaattttaaggtaccactggtattttgggagattataatcagtttgttttcaagataatagaaaataaggtccatgagaatagaagttatgtgatttcagtgagttgatgtgtacagcatggctgtgctccatctgatttaccccattcttaagttctgagagtatgttctcaaggaagatttaactctctttggttttaaattactttttaaccagcctaataaataagtcttactacttttcataatatttcataatagttaaaagtaggtgtttttttcgtgctcaatttggcactcaaaataatgttcattatggaagtttggtaatactgagcaagcctgtggaattttctttatgaaaaatgattttagcctttgcaaatgttaaccatgtgaaacacattttcagtataagtatgcgttacagggtttgatactttcctgcacttaggtttgtcctattcttcatttattcatactaggatagaaaattttggaatcagaaaatagatccagtgtttagctacatacaatctagtacaagtgaatttttattcttaaacataggtgtgttggctctttttttaaaagatgcgctctacctgaaaaggaaattggattttagaactggatgtggtgcagtgaagtattttaggcccaggtctgtgtacacattttatagaagaatgaagtactctgaagtattttggttgccttttcatttcaactgtgttttgaatttgtcagatcacacatatattgtgttattgggcgctgtggtatcttttataaaacctcttgcttgtgtgcaaaagttcctaaaaggaaacacaagtaatgcctatccattactagcatgctatgctgcatgctttactgccattgctgtatgctttactgtctttgtaaaaatccccctctccccttttctggtaactggaaaagcatgctaaaaatagtcttatattttcaccccataagtgcagaatcagtaattccttggcttaaagctcttatataatcaatattattggtggtaaataccaagtttggtatctcatagctatctttttttaaagaaattaagttcttgaaaatttagccaaatcccgttttatgggaatgctctttagaattcattttgttcagcccctttgttctatggttgagaaatctgaggccttacgaaggttaagagaactttccccgtgtctcacaggtaggtagaggcagagctggaactagatatctggtctgttgactctagctcagtgtcttctggtaactgttgaaaattgtcttagtttgagagatggctgaaataatgaacataaaatgctatttataataacaagtatatgtgaaatttcttattgtaagactactaccggcttactgttgaatagtttggttatagtgtttaggctagaaatgcctcccacattggtaataaacattacaaaatacaatgtatttttaggtaggcattttataaaatgcattatgccatggttgcttttgagatagattgtagtctgggtagcatctttaaaatgtatgtgggcttaactgttgttcatatcaggagatgctctgattgtataggtgagactctgtttctgttatttttaattgctgtatgaaatgtgatcagattattttactaccaacagttatagtttgaaagtccaactgtattaattgactgataatatgataatatagagattaaattgtttgtcttcattccttatatgtttagaagtttttgctttgtctgcctgcttacttgtatatgtaagcatgagggaaatacactgttgctaatactgaaattacaatcaagtaactaaggccttgagttcatatgtgacactgaatgcactagcttccttcgttctataactaatgtaccttaacttcccccattcttatatttacaagaagctaagtcattatgttctgagtgtgtggtatgttcccttaaaaaaaaatgacacttggaagaaaaatgtatgaaattcagaaattccgatcaaagaaaagtaattctttcttttttttttggagacagagtcttgctttgttgcccaggctggagggcagtggtgtgatctcacctcactgcagcttccgcctcctgggttcaagtgattctcatggctcagccgcctgagtagctgggattacaggtgtgagccaacaagcccggctaatttttgtatttttagtagagacaaggtttcaccatgttggtcaggctgggctcaaactcctgaatccgcctgcctcggcctcccaaagtgctgggattacaggtgtgagctgccgcacccagccaagaaaaataatactcttaaatacttagatgttcacctaaagttgatattatttggtatgggaattacttttgaactgtaatctttcagattacaccactttgaaaacaagttttaacagtagggtaaaaatatagtttttgagggtattcccaacttgtgatcttctaccactttagagacattcaagtaatagttttcttagagctttgcacattcctattcactgagattttaaaaatttcacctttattagagggaaggatcaatgcttattaccatttggaaaaacgaagatcagaaggtaaatgatctttattttctagctttaaagggaaattaaaccattcatgaataaactttaaaaatgtgaagtgtccttttccttttcacaatacaaaaaaaatttcaacagattgtgtggtttgtgcatttatatcctgttaagcattaatagctaatcactgggacttgaattctgatggcagatagtctcttgcttagtgagatggagttaactattttttagtaggaagtgagaacagctgattttcatgccacgtttcatagccccacttttggtagactaccaccacgcttcttcgcgtaacagttggcatcttgggaatgaatgcccagccgctcgtgggttggtgcaaagaagtataaacatatatcactaaggaaaaagaaagtttgtcttgcccttctgacacagtgtgtgcacttcaggcaatttttggaaaatataaaaaattccaaattctgcctttcagcagcatcaattgctaggaacatttcattcatttccctgtaatattaatgttctttaagcataatcactaattataagttgtatcctatttttttccagcttaatttctgtggtttattgaaaaccaagtataaatgtgactaaaagcattttgctttgtttttatagttaactttcttaaggttatggacattttataatgtaacatttgattggcctggcctcttgacaattcccttctagttatgcatatcctcctgttgccacatttcttgttttaaaactcagtttcttgttttccagttgttgctatgtataacacccatcttgaaagagagtatataggaagttattcagataacttttgtagtagtgatattcaactatagcagtaccttaactcatgatgagcttaggaacataaaagataattgttgcttgaatagcacccccagagatactgacctaattggtctggggtggagatctggcatggtagtttttttcaagctccaatcatcggccagacagttgctttatgtaggtttttaaatgccaaaggcagatatgaagtagatttaattaagacttgacttcagcaatacaggggaacttaaaatacttatttttctttaaactgcaggagtcactgttaggtattgcttaaaaaaaattgcataaaagctttgcttgtcaagttaggattgctggaataccactaaagatttttgacttgtgaataaatgagctgtcatcgcaaaaaggcgatttgagaaatgtgggcttcagtattaattgccattttgctgacacccagtgtacctacctacctgagaaatttattttgtccatcatgtatttctcaaagcaaaaggtggttttcaagtataatgtcgttttcaacatgcttattacttagttttacgtcagctcatttcatcatcattgataacttgtgaaatacttatctccatcctatggaataggggagacgggtttagacaggttcaattagctcaagtctacacagctgaagtagcagagaaagtgggatctagatggtctgatcctagtgatctaccatatgaaggacatagtttgtgtcctggtccaagtcaaatattgactcctcacaaacagtaagtatggcaattttgtgatgcctttgattccactttacatggagtactattatttgtgaaatgtctttaagatttttggtcttaaatttttgaagactgctttccccctttatctcccagaaaattgagaagaagtaaactcctgcccactaacaatctcagtccgtgaacaaaaccaacatgaacattcctaaacaagagtgtgtgttactctaagaagaaggctatagaatttatggaaatggcttatgtaacctacaagactggagaacagaatgtgactggccttttctaatggtcctttaagatttaatgattaaagcaagagttttttataattgactttgtggtctaaattcttgatactgtttataattctacaaagaacaaaaattgttacgtactataggcacttaagaaccctgaggaaaaataatacaatgtgtgtgtgtgagagagagagtgagttactgacattgttccaaaaaaaaaaaaaaaaaaaaaaaaaatgtggagggttgaaatggtaaggaattggaatcttttgtattttcgagcaataagaattcctattcttgtttcaaatagaggtttgttaggaattacagttgtggggagcaaactttcttttttgtgctgttttaatccaaaatgtatatccttaattgtatataatatgtagataaatatatgagggtattaagctactttgaattaaatttaaggatatatttcacatgaaaacaaatacaaacttgagaatcaaaataaagttttgcaaagtatttctttg

SEQ ID NO: 436395 - DNA, 1025 bp, Homo sapiens
tatacttaattaagaaagttgaaaatggtttgtgtcttactaataggactcacctgaagactctactttgccaagagggaatttttaactcaaagttgtgtcagccagcacggggtagagccatggtcctcatacttgctggcatccctcatctggtggtctgttaaagcacagattgctgggccgcaccctcagggtgtgtgattgtgtgattcagtattgctgggtggtgcccaaatgctccagttctaatgtattcccaggtgttgctgatgctggtgattgggtaccacattttgagaaccatggggcattggcaatcaacaaatgcaatgcttgtgacttgacgtgataaaagttcatttattgggcaggcaaagtcctctgcaggcctggaaaccctccgagacaattacttgcatggggtaacccagtaatactgtgggatgcaccttctagggcatggctgcctccttcctagaggcagcagggggagaaaacactggaagaggtcaccccaacaattccatcgtaccttggcctaggagtgacctcctcagtctcacaaccctttggctagaactagtcatgtgacctcacaggaggtggagcagtgtcgtcaatgttatcatccccctgcacctgcaaggaaggaggcccagatgtgtgtaggtgctggatgtctcttccccaaaacatataactctggatttggaaaacaaaactggatataacagaaaagaaaaggaggggagaaggaaagttgaagaaattggtgaaatcagaataggacagtgaaaggcataaagattttcttctgaaacgctaagatcggttgatatttgtctaatacagctttaaatagagtatcactttgggccaaagaaaattgatataaacatacataaagtggaactaagattgacttcttcctagacatctctgcctctgtccacaaaatggaaacttccatcaaggagtactggaggacagttcagtatttcttcttatttgctcctccctat

SEQ ID NO: 436396 - DNA, 1043 bp, Homo sapiens
tatacttaattaagaaagttgaaaatggtttgtgtcttactaataggactcacctgaagactctactttgccaagagggaatttttaactcaaagttgtgtcagccagcacggggtagagccatggtcctcatacttgctggcatccctcatctggtggtctgttaaagcacagattgctgggccgcaccctcagggtgtgtgattgtgtgattcagtattgctgggtggtgcccaaatgctccagttctaatgtattcccaggtgttgctgatgctggtgattgggtaccacattttgagaaccatggggcattggcaatcaacaaatgcaatgcttgtgacttgacgtgataaaagttcatttattgggcaggcaaagtcctctgcaggcctggaaaccctccgagacaattacttgcatggggtaacccagtaatactgtgggatgcaccttctagggcatggctgcctccttcctagaggcagcagggggagaaaacactggaagaggtcaccccaacaattccatcgtaccttggcctaggagtgacctcctcagtctcacaaccctttggctagaactagtcatgtgacctcacaggaggtggagcagtgtcgtcaatgttatcatccccctgcacctgcaaggaaggaggcccagatgtgtgtaggtgctggatgtctcttccccaaaacatataactctggatttggaaaacaaaactggatataacagaaaagaaaaggaggggagaaggaaagttgaagaaattggtgaaatcagaataggacagtgaaaggcataaagattttcttctgaaacgctaagatcggttgatatttgtctaatacagctttaaatagagtatcactttgggccaaagaaaattgatataaacatacataaagtggaactaagattgacttcttcctagacatctctgcctctgtccgcaggagggaacttcaccgtcagagtcgtggtgaccagaccccattcctagatgatgcctgctgatcgaactgtaagatcccccctgac

SEQ ID NO: 436397 - DNA, 1535 bp, Homo sapiens
cccaggtagctgggatacaggtgcacgccaccacacccaggctagtttttctaaatattggagttcccaaagagtattcaaactgatgtgatattttaaaagacattttgtaagcatcttttaggaatatcagtaagtggaagattattatgctaggtatcagcagagtgccctcttataatttgtgtgaaatggaaacaaaggtaacatcgtgttttcaattcacacatatatacaagtaatgagaggtccagaagaaatgtggcttcagctctgctgctactgtgcctcccttctcctgccccactcagcccacaaaataggctggacactcaaaaaacgttgcgtttatctaccttttagagagggtgaatagcagagaactggaggtgggaatggtaaggaactcccagcagggtagtggagggaatgggctgacgcatctaaggctgatgccaggtctgctccctatctgggtggcctcagcaaatgacgtccagcacatccaggggcaggctcaagggagaacagcccccaaagctaagatcctgccaagctaaatacagtagttctaatgaaatgtgagaggctataatcccatttgggaaattcctaaaaagtcatgaggcaggggattggtttatgttattatcatgacctgagagtcatggctcagagccaaatgttcaggattgaattcaacagcatttaaatgtctttagagcaggatggaaatatgttagcaatgcctgcagagtgccaagtaaacgcaaaagccaatgagatcataaaggaagttgttagctaacctaggtggagtcgccaacttccttctactctaataattaaaaataaaaataatacttgggaggtaactggaataaaggttctaaaatcaaaaccctctgaagggtgaaaactgggagcctcctgttcccatagtaaccacagcactcagggcactgtctcccagcgctggagtactgtcttatgaccagagatcctaagcaacctctgctcatctgagttgtccaccatattgtgggcatgagtccttgacaatagtaaatagcacctctgttcccttattgggtaaatgattttccaactctgggaatgtgtagaattcattatggaaataatgcaataattcaaatccataatattgatactttcatgttaagtttaggactaatcttgtgtatgctccttaagtgatttgaatctttaaaaagcttatgattccaatttgaaatgtgaaattgattttacgtttgtgatttgaagttgaaaggtataagaatatttaacttagctcatgaaaagtattagactagatttactataagtttaatgtattagatttacaagagatgcttaaatatatgagaatgttttgtcttaattggttataatcttgtcatatcaatgatttgaagtgctaaaatagaaaattaaatatgataaattacacaagaagtttagaatgtttaaaagattttaataaacaaagcctataactaagaaaaaaaaat

SEQ ID NO: 436398 - DNA, 925 bp, Homo sapiens
gattttcttctgaaacgctaagatcggttgatatttgtctaatacagctttaaatagagtatcactttgggccaaagaaaattgatataaacatacataaagtggaactaagattgacttcttcctagacatctctgcctctgtccacaaaatggaaacttccatcaaggagtactggaggacagttcagtatttcttcttatttgctcctccctatgaaaggaagagtgacttctctgctgcatgatattgggggtaaatagttattgcacatttgctcaaaccccagcaaagtgcaccccattttaagccaaatttacaaacttacaaagatgatccaccaatagttttctctatttactttattcttgctctgtcacccaggctagaatgcagtggtgtgattatagctcactgcagcctccaacttctggactcaagtgatcctcccaccttagcttcccaggtagctgggatacaggtgcacgccaccacacccaggctagtttttctaaatattggagttcccaaagagtattcaaactgatgtgatattttaaaagacattttgtaagcatcttttaggaatatcagtaagtggaagaaaaacacatagttatcagtggatattatgccagagaggcatgagaaatataattttattatgctaggtatcagcagagtgccctcttataatttgtgtgaaatggaaacaaaggtaacatcgtgttttcaattcacacatatatacaagtaatgagaggtccagaagaaatgtggcttcagctctgctgctactgtgcctcccttctcctgccccactcagcccacaaaataggctggacactcaaaaaacgttgcgtttatctaccttttagagagggtgaatagcagagaactggaggtgggaatggtaaggaactcc

SEQ ID NO: 436399 - DNA, 2280 bp, Homo sapiens
ggaggaagagagcagagtttggccgggcaccttccctgcgaaaaggcgggcggagccgaaaaccaaacaaacgacttctgagagattgggggcgggactgacggcggccggcttagcttccagagccaaggccttccgccgagttggtttttgggttgttgatcgcggtggccgggcggtctgcggtcgggctgagacacgcggagcaatggcgacctttgtgagcgagctggaggcggccaagaagaacttaagcgaggccctgggggacaacgtgaaacaatactgggctaacctaaagctgtggttcaagcagaagatcagcaaagaggagtttgaccttgaagctcatagacttctcacacaggataatgtccattctcacaatgatttcctcctggccattctcacgcgttgtcagattttggtttctacaccagatggtgctggatctttgccttggccagggggttccgcagcaaaacctggaaaacccaagggaaagaaaaagctttcttctgttcgtcagaaatttgatcatagattccagcctcaaaatcctctctcaggagcccagcaatttgtggcaaaggatccccaagatgatgacgacttgaaactttgttcccacacaatgatgcttcccactcgaggccagcttgaagggagaatgatagtgactgcttatgagcatgggctggacaatgtcaccgaggaggctgtttcagctgttgtctatgctgtggagaatcaccttaaagatatactgacgtcagttgtgtcaagaaggaaagcttatcggttacgagatggtcattttaaatatgcctttggcagtaacgtgaccccgcagccatacctgaagaatagtgtagtagcttacaacaacttaatagaaagccctccagcttttactgctccctgtgctggtcagaatccagcttctcacccaccccctgatgatgctgagcagcaggctgcactcctgctggcatgctccggagacactctacctgcatctttgcctccggtgaacatgtacgatctttttgaagctttgcaggtgcacagggaagtcatccctacacatactgtctatgctcttaacattgaaaggatcatcacgaaactctggcatccaaatcatgaagagctgcagcaagacaaagttcaccgccagcgcttggcagccaaggaggggcttttgctgtgctaaattaggatttgagggtgtgggaccctcaccgaattcattgattactgaaaattgaatgttttttgggtccacatttcaaggctgaagtgtatagtgtatatataacctttcctatggaaatgtgacattgagtacattttgtgttgctgttgtgaagccattaatataaatctttggtaatgacccatatctctatatgtatgtgttcccagttgtgggagcaggcactaatgaaatcctgtgcctggaatggagatatttaggtacctgaggcttagtgtcctgtggtctgcatgtaagatagatgacatcctagaacaaagaagctgttttaacttaatccccctgatcagcaggatatctgtgtgttcagtgacatcatacattctgtatctagaagtctaaaatttctgcctttctcctaaagaatgtgttcttgcattttggttgaaataacctacacagtgttaaaaatcagatacctcctttagtgaccagttcaaattttaatagcgataggtagcccctgagaaatttatcactataactccacaggaaatatgacttggaagtgctctgtgtactaaacaaaataaagcccctctttgcatttaaaaccaaagtcaaaacaaaactcttgtaatgcaattaattaactttatgtcttcccatgactcaagttttgttaaatatgcccaaaaactttgattggcagtttcttcggttaattattcctatagaatgtattttaagaaatctatacaaattggatatatgcttggtaattctccagtttctaggaggtacctatttctaccgtttcaagtgatgaagtgaaaataatttacattcgatagtgttactgataacaaacctacttaagagatatgttgctttttacttaagggatagtgttgatagataaattagaatgtatagataggtttgtgaaagtctaaataatggttgtatagatatgtatatatggttcacatatctggatctgtgtatttgattttgtactttaaatgtgacaaataaaccttttgggaaaaaaaaaaaaa

SEQ ID NO: 436400 - DNA, 2122 bp, Homo sapiens
ggaggaagagagcagagtttggccgggcaccttccctgcgaaaaggcgggcggagccgaaaaccaaacaaacgacttctgagagattgggggcgggactgacggcggccggcttagcttccagagccaaggccttccgccgagttggtttttgggttgttgatcgcggtggccgggcggtctgcggtcgggctgagacacgcggagcaatggcgacctttgtgagcgagctggaggcggccaagaagaacttaagcgaggccctgggggacaacgtgaaacaatggtgctggatctttgccttggccagggggttccgcagcaaaacctggaaaacccaagggaaagaaaaagctttcttctgttcgtcagaaatttgatcatagattccagcctcaaaatcctctctcaggagcccagcaatttgtggcaaaggatccccaagatgatgacgacttgaaactttgttcccacacaatgatgcttcccactcgaggccagcttgaagggagaatgatagtgactgcttatgagcatgggctggacaatgtcaccgaggaggctgtttcagctgttgtctatgctgtggagaatcaccttaaagatatactgacgtcagttgtgtcaagaaggaaagcttatcggttacgagatggtcattttaaatatgcctttggcagtaacgtgaccccgcagccatacctgaagaatagtgtagtagcttacaacaacttaatagaaagccctccagcttttactgctccctgtgctggtcagaatccagcttctcacccaccccctgatgatgctgagcagcaggctgcactcctgctggcatgctccggagacactctacctgcatctttgcctccggtgaacatgtacgatctttttgaagctttgcaggtgcacagggaagtcatccctacacatactgtctatgctcttaacattgaaaggatcatcacgaaactctggcatccaaatcatgaagagctgcagcaagacaaagttcaccgccagcgcttggcagccaaggaggggcttttgctgtgctaaattaggatttgagggtgtgggaccctcaccgaattcattgattactgaaaattgaatgttttttgggtccacatttcaaggctgaagtgtatagtgtatatataacctttcctatggaaatgtgacattgagtacattttgtgttgctgttgtgaagccattaatataaatctttggtaatgacccatatctctatatgtatgtgttcccagttgtgggagcaggcactaatgaaatcctgtgcctggaatggagatatttaggtacctgaggcttagtgtcctgtggtctgcatgtaagatagatgacatcctagaacaaagaagctgttttaacttaatccccctgatcagcaggatatctgtgtgttcagtgacatcatacattctgtatctagaagtctaaaatttctgcctttctcctaaagaatgtgttcttgcattttggttgaaataacctacacagtgttaaaaatcagatacctcctttagtgaccagttcaaattttaatagcgataggtagcccctgagaaatttatcactataactccacaggaaatatgacttggaagtgctctgtgtactaaacaaaataaagcccctctttgcatttaaaaccaaagtcaaaacaaaactcttgtaatgcaattaattaactttatgtcttcccatgactcaagttttgttaaatatgcccaaaaactttgattggcagtttcttcggttaattattcctatagaatgtattttaagaaatctatacaaattggatatatgcttggtaattctccagtttctaggaggtacctatttctaccgtttcaagtgatgaagtgaaaataatttacattcgatagtgttactgataacaaacctacttaagagatatgttgctttttacttaagggatagtgttgatagataaattagaatgtatagataggtttgtgaaagtctaaataatggttgtatagatatgtatatatggttcacatatctggatctgtgtatttgattttgtactttaaatgtgacaaataaaccttttgggaaaaaaaaaaaaa

SEQ ID NO: 436401 - DNA, 2226 bp, Homo sapiens
ggaggaagagagcagagtttggccgggcaccttccctgcgaaaaggcgggcggagccgaaaaccaaacaaacgacttctgagagattgggggcgggactgacggcggccggcttagcttccagagccaaggccttccgccgagttggtttttgggttgttgatcgcggtggccgggcggtctgcggtcgggctgagacacgcggagcaatggcgacctttgtgagcgagctggaggcggccaagaagaacttaagcgaggccctgggggacaacgtgaaacaatactgggctaacctaaagctgtggttcaagcagaagatcagcaaagaggagtttgaccttgaagctcatagacttctcacacaggataatgtccattctcacaatgatttcctcctggccattctcacgcgttgtcagattttggtttctacaccagatggtgctggatctttgccttggccagggggttccgcagcaaaacctggaaaacccaagggaaagaaaaagctttcttctgttcgtcagaaatttgatcatagattccagcctcaaaatcctctctcaggagcccagcaatttgtggcaaaggatccccaagatgatgacgacttgaaactttgttcccacacaatgatgcttcccactcgaggccagcttgaagggagaatgatagtgactgcttatgagcatgggctggacaatgtcaccgaggaggctgtttcagctgttgtctatgctgtggagaatcaccttaaagatatactgacgtcagttgtgtcaagaaggaaagcttatcggttacgagatggtcattttaaatatgcctttggcagtaacgtgaccccgcagccatacctgaagaatagtgtagtagcttacaacaacttaatagaaagccctccagcttttactgctccctgtgctggtcagaatccagcttctcacccaccccctgatgatgctgagcagcaggctgcactcctgctggcatgctccggagacactctacctgcatctttgcctccggtgaacatgtacgatctttttgaagctttgcaggtgcacagggaagtcatccctacacatactgtctatgctcttaacattgaaaggatcatcacgaaactctggcatccaaatcatgaagagctgcagcaagacaaagttcaccgccagcgcttggcagccaaggaggggcttttgctgtgctaaattaggatttgagggtgtgggaccctcaccgaattcattgattactgaaaattgaatgttttttgggtccacatttcaaggctgaagtgtatagtgtatatataacctttcctatggaaatgtgacattgagtacattttgtgttgctgttgtgaagccattaatataaatctttggtaatgacccatatctctatatgtatgtgttcccagttgtgggagcaggcactaatgaaatcctgtgcctggaatggagatatttaggtacctgaggcttagtgtcctgtggtctgcatgtaagatagatgacatcctagaacaaagaagctgttttaacttaatccccctgatcagcaggatatctgtgtgttcagtgacatcatacattctgtatctagaagtctaaaatttctgcctttctcctaaagaatgtgttcttgcattttggttgaaataacctacacagtgttaaaaatcagatacctcctttagtgaccagttcaaattttaatagcgataggtagcccctgagaaatttatcactataactccacaggaaatatgacttggaagtgctctgtgtactaaacaaaataaagcccctctttgcatttaaaaccaaagtcaaaacaaaactcttgtaatgcaattaattaactttatgtcttcccatgactcaagttttgttaaatatgcccaaaaatctatacaaattggatatatgcttggtaattctccagtttctaggaggtacctatttctaccgtttcaagtgatgaagtgaaaataatttacattcgatagtgttactgataacaaacctacttaagagatatgttgctttttacttaagggatagtgttgatagataaattagaatgtatagataggtttgtgaaagtctaaataatggttgtatagatatgtatatatggttcacatatctggatctgtgtatttgattttgtactttaaatgtgacaaataaaccttttgggaaaaaaaaaaaaa

SEQ ID NO: 436402 - DNA, 2077 bp, Homo sapiens
tttgaatgttatattcctgtagttaaggtctgttagttttttcaactggaagttcagtatcctgagctaggtaaatattttaacattgtggaagaaggagggtaaatatagttgtattatgttttatttccagcctttaaaaattaaaattacagattattcatgtctacaggagtagacattgaatggatttctaattcaattaaagattttttaaataagattctagcaggccactcctgtccttgttgctcagttgtctctgtgctgggactatttctgaaatttttattttcagccctccagcttttactgctccctgtgctggtcagaatccagcttctcacccaccccctgatgatgctgagcagcaggctgcactcctgctggcatgctccggagacactctacctgcatctttgcctccggtgaacatgtacgatctttttgaagctttgcaggtaagtcttggctccttaaagtttacctaggtttatggataggttaagagattctttaagtctacaaaggtattcactggttttttccacttcttggctttgtgtttttcagttttgtctgttataaaagccgttattaatactagcctcatttttcaaatcctgagcccatcttctatctccccaataaagaaagaaaagaaaaaaaatcccttgttctgctattcctgtttcagaagcttgttatttccttattattatccaattggtgattcattttagtgtatgactgaaagtttatagattgtgtgtatgttttgttgatataaacccttttatatgtcagaaaaataagtctactcaagtataattggacatgcgttaattttttaatcccaggtgcacagggaagtcatccctacacatactgtctatgctcttaacattgaaaggatcatcacgaaactctggcatccaaatcatgaagagctgcagcaagacaaagttcaccgccagcgcttggcagccaaggaggggcttttgctgtgctaaattaggatttgagggtgtgggaccctcaccgaattcattgattactgaaaattgaatgttttttgggtccacatttcaaggctgaagtgtatagtgtatatataacctttcctatggaaatgtgacattgagtacattttgtgttgctgttgtgaagccattaatataaatctttggtaatgacccatatctctatatgtatgtgttcccagttgtgggagcaggcactaatgaaatcctgtgcctggaatggagatatttaggtacctgaggcttagtgtcctgtggtctgcatgtaagatagatgacatcctagaacaaagaagctgttttaacttaatccccctgatcagcaggatatctgtgtgttcagtgacatcatacattctgtatctagaagtctaaaatttctgcctttctcctaaagaatgtgttcttgcattttggttgaaataacctacacagtgttaaaaatcagatacctcctttagtgaccagttcaaattttaatagcgataggtagcccctgagaaatttatcactataactccacaggaaatatgacttggaagtgctctgtgtactaaacaaaataaagcccctctttgcatttaaaaccaaagtcaaaacaaaactcttgtaatgcaattaattaactttatgtcttcccatgactcaagttttgttaaatatgcccaaaaactttgattggcagtttcttcggttaattattcctatagaatgtattttaagaaatctatacaaattggatatatgcttggtaattctccagtttctaggaggtacctatttctaccgtttcaagtgatgaagtgaaaataatttacattcgatagtgttactgataacaaacctacttaagagatatgttgctttttacttaagggatagtgttgatagataaattagaatgtatagataggtttgtgaaagtctaaataatggttgtatagatatgtatatatggttcacatatctggatctgtgtatttgattttgtactttaaatgtgacaaataaaccttttgggaaaaaaaaaaaaa

SEQ ID NO: 436403 - DNA, 640 bp, Homo sapiens
aaaaaaaagtcatttttgtgtacttcttttaaagccatctaaaactcatttttgagagagaggagccaatttagagatgtaaagacttttcaaatttcatgtatagcaagcccctcttaaagagaactattaatacatgaaaataagcatgtccccctctttcccataccctcctactcctttggtgtggctccgtggctcttcatgtgaacattcatttggttctagcatatactaacctattctgcatctccatctaaatgccaataaatgttttttggtcagtggaagttttatgatttgcttttaaagaggatatcatgctatttttctttttgtatgtttacagaatcaccttaaagatatactgacgtcagttgtgtcaagaaggaaagcttatcggttacgagatggtcattttaaatatgcctttggcagtaacgtgaccccgcagccatacctgaagaatagtgtagtagcttacaacaacttaatagaaaggtaaatgaagtttcttgtgattttctttccatcttttgctagttgtttatactcctcttatagaccattgttaaataattgattgtgttttcataggtttaagtacctttaataggagtacaattttattttttaaagt

SEQ ID NO: 436404 - DNA, 2679 bp, Homo sapiens
ggaggaagagagcagagtttggccgggcaccttccctgcgaaaaggcgggcggagccgaaaaccaaacaaacgacttctgagagattgggggcgggactgacggcggccggcttagcttccagagccaaggccttccgccgagttggtttttgggttgttgatcgcggtggccgggcggtctgcggtcgggctgagacacgcggagcaatggcgacctttgtgagcgagctggaggcggccaagaagaacttaagcgaggccctgggggacaacgtgaaacaatactgggctaacctaaagctgtggttcaagcagaagatcagcaaagaggagtttgaccttgaagctcatagacttctcacacaggataatgtccattctcacaatgatttcctcctggccattctcacgcgttgtcagattttggtttctacaccagatggtgctggatctttgccttggccagggggttccgcagcaaaacctggaaaacccaagggaaagaaaaagctttcttctgttcgtcagaaatttgatcatagattccagcctcaaaatcctctctcaggagcccagcaatttgtggcaaaggatccccaagatgatgacgacttgaaactttgttcccacacaatgatgcttcccactcgaggccagcttgaagggagaatgatagtgactgcttatgagcatgggctggacaatgtcaccgaggaggctgtttcagctgttgtctatgctgtggagaatcaccttaaagatatactgacgtcagttgtgtcaagaaggaaagcttatcggttacgagatggtcattttaaatatgcctttggcagtaacgtgaccccgcagccatacctgaagaatagtgtagtagcttacaacaacttaatagaaagccctccagcttttactgctccctgtgctggtcagaatccagcttctcacccaccccctgatgatgctgagcagcaggctgcactcctgctggcatgctccggagacactctacctgcatctttgcctccggtgaacatgtacgatctttttgaagctttgcaggtaagtcttggctccttaaagtttacctaggtttatggataggttaagagattctttaagtctacaaaggtattcactggttttttccacttcttggctttgtgtttttcagttttgtctgttataaaagccgttattaatactagcctcatttttcaaatcctgagcccatcttctatctccccaataaagaaagaaaagaaaaaaaatcccttgttctgctattcctgtttcagaagcttgttatttccttattattatccaattggtgattcattttagtgtatgactgaaagtttatagattgtgtgtatgttttgttgatataaacccttttatatgtcagaaaaataagtctactcaagtataattggacatgcgttaattttttaatcccaggtgcacagggaagtcatccctacacatactgtctatgctcttaacattgaaaggatcatcacgaaactctggcatccaaatcatgaagagctgcagcaagacaaagttcaccgccagcgcttggcagccaaggaggggcttttgctgtgctaaattaggatttgagggtgtgggaccctcaccgaattcattgattactgaaaattgaatgttttttgggtccacatttcaaggctgaagtgtatagtgtatatataacctttcctatggaaatgtgacattgagtacattttgtgttgctgttgtgaagccattaatataaatctttggtaatgacccatatctctatatgtatgtgttcccagttgtgggagcaggcactaatgaaatcctgtgcctggaatggagatatttaggtacctgaggcttagtgtcctgtggtctgcatgtaagatagatgacatcctagaacaaagaagctgttttaacttaatccccctgatcagcaggatatctgtgtgttcagtgacatcatacattctgtatctagaagtctaaaatttctgcctttctcctaaagaatgtgttcttgcattttggttgaaataacctacacagtgttaaaaatcagatacctcctttagtgaccagttcaaattttaatagcgataggtagcccctgagaaatttatcactataactccacaggaaatatgacttggaagtgctctgtgtactaaacaaaataaagcccctctttgcatttaaaaccaaagtcaaaacaaaactcttgtaatgcaattaattaactttatgtcttcccatgactcaagttttgttaaatatgcccaaaaactttgattggcagtttcttcggttaattattcctatagaatgtattttaagaaatctatacaaattggatatatgcttggtaattctccagtttctaggaggtacctatttctaccgtttcaagtgatgaagtgaaaataatttacattcgatagtgttactgataacaaacctacttaagagatatgttgctttttacttaagggatagtgttgatagataaattagaatgtatagataggtttgtgaaagtctaaataatggttgtatagatatgtatatatggttcacatatctggatctgtgtatttgattttgtactttaaatgtgacaaataaaccttttgggaaaaaaaaaaaaa

SEQ ID NO: 436405 - DNA, 3108 bp, Homo sapiens
gacgtaagatgctttatttgtaatatatttagattttgaaagttattgagagatgaatgtataaaagctaaattttcttttctgaagcagtgaaacaaaattggggtaacaaggaagctctgttgtggcaaacatgtctatgaggaatattaaaactaagcatactcccacaggctttaaactcaaactatgaacatttaaattaagttgttccttattttgcctatacccatttttatctttcattgtcgtttttgcttgacagtatggtgacagagtatttttatttggaaagtcctcagcaagatgaattagccaaaagcaataatggttcagattaaacaataaagtggaattgattcaatcccaggctcaactaagaacagtcgctctctggatctttcattttagacgatagataagttgagatgttgtaatatttatggggggttaagcctgtgtcagttatgggatgaagacttgtagtaccagtaccatcagtggtcatacttttttttaactttttactaaactaatacagttagacatttccactctatcgtgattatatttttatgatgggaaaataaaaacacttccatgtttttataaatagtctctgcaaagatttcagatgttattggtatctcggtttggcagtatctgaaaaattgagattgtctttgaaatgtttgtgctacttttacttaagtaaacccccactgtgcaagacccaggccggcttcagctaataccaaggtttctgtgtgcataatagtttacagagaacttaagagtaaggactgcggattaaaaacaaaactttttttaactttaaaatttttagtttttgttcaaagtacctgggtttataaagtcaaattcttttattagttcctttctcgtttaaattgactgatgttgctgatgaagcttaaagtcccaggcacggttgtggcgatatactgataaaattggtgcctagtggtgggaggagctccagtgtcaggacttttattaaaaggcccttgttttcccaaatgccaatctagccacatttagatttcattattcaataaaacagatgaaaaatcatcccataaatgaatgttgaggttaccaaagtacatcacctgctgaggaaggataaatcttcctgctttaagggagccctgtcatctctcctcttaatgcacgtttcccttggtattagtggaagctgtgttcaagatgggaagcctttcctgcagttcttagaaacacctgctttctaaggagagccttttctaggattagcttatgtgtgttttctctaggcgattttttatttcagttaccaatttaattttcaagttgacagatgctgtgtaaagtctctcataatgagagtagtccattaaattgttgaaagttgcactgcttttcatctttcaggtacctgaaatgagtgacatcaggtatttggaaggagtaagatcataaactgtattcattttcttccttgtacaaagtgatgacttctaatgcttatatctcaaggtattttttaaaaaagcaacggtccctaatagagtaaaatttggttttggtccaagttcccaataatgtatttaatgtttctgttgtttactggtgcctcccgttgcatcaggtagagattgcctgcctctttgtagggcagccttgtggcaccttatgtccaacttggaggatagtatatggcttctttgtgcctctactatcttttcaaaagccattttataaaaatcctaggtagcctattttaatatttaaatatatatatttgtgaaagaacttttagaacagaccttttctttttactttaaaattcctgtatttccatttttaagagtaaatttaatctccaggatttagaagtgtctttccagagaagcataatgagaaagtcagactgaggtaataagaccagaattaagtgatagaagaaactgttgtttggttaaaggacacagatttgaaggaaaaaaattttgatgtaacaattttttaaataaaattttgtttttctgtaatgtcatatttgctgctacagtagctcaatattttacagggctaacataaagctggctccatttaaaaactggagtacttcctagtgcagccagcctaggcggaaactgtacaccatggtcttccagatgggtgactgatggctttgggtagctgatgcatgctttaatatttgcctatagcccggcagcaaggaagtcggggcggggggacttttttaccctgccagttatagcattgtgattctttctgggcactggcattttgtgaaactctcaagggaaggtgatgcaggggagaaaatgtgaattaaattacatagatgggtgtttttatgtcttctacccctttcctagaattagtacaactcttaactgtgccagtccccagttcaccagctttgtatccagtcgtcatctcattcaagtatggctttacttggtgacactggccatagctaagttaacttggcatgtttgacttttgacaataacaaaaatggttttggatttgttttatttccaaaaaatgtatacaatatcagaacttcacattttatatactagtatctggctattagtattttacaggaaccatagttcttggtgactacatatatatatatatttttgtgaccttttttgtaaactaagtgccgtttcaacgttacaatcatttttagggttattgtaatcaatgtgaatatcatgttttttcaaatctgttctgagcctatagtgtttgctttgtgaacatgtgtattgtatatattctgtatagttatattgtactgaaattagcttgtttgatataaggaaaatatgtattgagtacctttttgctagcctgattgtttaatctttttaaaaaaggtttaaactttttttaaaaaaaaaatctttaaactggcctttattacatggtcacacataaagttgcagttaggaaagggatgggcagggaaaaactagttttgagtgtctttagatagaaacatgagactaaggtttgattttgttttcgttttctcattaaaatatcttatgctttatggaa

SEQ ID NO: 436406 - DNA, 3054 bp, Homo sapiens
gacgtaagatgctttatttgtaatatatttagattttgaaagttattgagagatgaatgtataaaagctaaattttcttttctgaagcagtgaaacaaaattggggtaacaaggaagctctgttgtggcaaacatgtctatgaggaatattaaaactaagcatactcccacaggctttaaactcaaactatgaacatttaaattaagttgttccttattttgcctatacccatttttatctttcattgtcgtttttgcttgacagtatggtgacagagtatttttatttggaaagtcctcagcaagatgaattagccaaaagcaataatggttcagattaaacaataaagtggaattgattcaatcccaggctcaactaagaacagtcgctctctggatctttcattttagacgatagataagttgagatgttgtaatatttatggggggttaagcctgtgtcagttatgggatgaagacttgtagtaccagtaccatcagtggtcatacttttttttaactttttactaaactaatacagttagacatttccactctatcgtgattatatttttatgatgggaaaataaaaacacttccatgtttttataaatagtctctgcaaagatttcagatgttattggtatctcggtttggcagtatctgaaaaattgagattgtctttgaaatgtttgtgctacttttacttaagtaaacccccactgtgcaagacccaggccggcttcagctaataccaaggtttctgtgtgcataatagtttacagagaacttaagagtaaggactgcggattaaaaacaaaactttttttaactttaaaatttttagtttttgttcaaagtacctgggtttataaagtcaaattcttttattagttcctttctcgtttaaattgactgatgttgctgatgaagcttaaagtcccaggcacggttgtggcgatatactgataaaattggtgcctagtggtgggaggagctccagtgtcaggacttttattaaaaggcccttgttttcccaaatgccaatctagccacatttagatttcattattcaataaaacagatgaaaaatcatcccataaatgaatgttgaggttaccaaagtacatcacctgctgaggaaggataaatcttcctgctttaagggagccctgtcatctctcctcttaatgcacgtttcccttggtattagtggaagctgtgttcaagatgggaagcctttcctgcagttcttagaaacacctgctttctaaggagagccttttctaggattagcttatgtgtgttttctctaggcgattttttatttcagttaccaatttaattttcaagttgacagatgctgtgtaaagtctctcataatgagagtagtccattaaattgttgaaagttgcactgcttttcatctttcaggtacctgaaatgagtgacatcaggtatttggaaggagtaagatcataaactgtattcattttcttccttgtacaaagtgatgacttctaatgcttatatctcaaggtattttttaaaaaagcaacggtccctaatagagtaaaatttggttttggtccaagttcccaataatgtatttaatgtttctgttgtttactggtgcctcccgttgcatcaggtagagattgcctgcctctttgtagggcagccttgtggcaccttatgtccaacttggaggatagtatatggcttctttgtgcctctactatcttttcaaaagccattttataaaaatcctaggtagcctattttaatatttaaatatatatatttgtgaaagaacttttagaacagaccttttctttttactttaaaattcctgtatttccatttttaagagtaaatttaatctccaggatttagaagtgtctttccagagaagcataatgagaaagtcagactgaggtaataagaccagaattaagtgatagaagaaactgttgtttggttaaaggacacagatttgaaggaaaaaaattttgatgtaacaattttttaaataaaattttgtttttctgtaatgtcatatttgctgctacagtagctcaatattttacagggctaacataaagctggctccatttaaaaactggagtacttcctagtgcagccagcctaggcggaaactgtacaccatggtcttccagatgggtgactgatggctttgggtagctgatgcatgctttaatatttgcctatagcccggcagcaaggaagtcggggcggggggacttttttaccctgccagttatagcattgtgattctttctgggcactggcattttgtgaaactctcaagggaaggtgatgcaggggagaaaatgtgaattaaattacatagatgggtgtttttatgtcttctacccctttcctagaattagtacaactcttaactgtgccagtccccagttcaccagctttgtatccagtcgtcatctcattcaagtatggctttacttggtgacactggccatagctaagttaacttggcatgtttgacttttgacaataacaaaaatggttttggatttgttttatttccaaatattttacaggaaccatagttcttggtgactacatatatatatatatttttgtgaccttttttgtaaactaagtgccgtttcaacgttacaatcatttttagggttattgtaatcaatgtgaatatcatgttttttcaaatctgttctgagcctatagtgtttgctttgtgaacatgtgtattgtatatattctgtatagttatattgtactgaaattagcttgtttgatataaggaaaatatgtattgagtacctttttgctagcctgattgtttaatctttttaaaaaaggtttaaactttttttaaaaaaaaaatctttaaactggcctttattacatggtcacacataaagttgcagttaggaaagggatgggcagggaaaaactagttttgagtgtctttagatagaaacatgagactaaggtttgattttgttttcgttttctcattaaaatatcttatgctttatggaa

SEQ ID NO: 436407 - DNA, 2129 bp, Homo sapiens
  misc_feature (2008)..(2008): n is a, c, g, or t
  misc_feature (2018)..(2018): n is a, c, g, or t
  misc_feature (2020)..(2021): n is a, c, g, or t
  misc_feature (2038)..(2039): n is a, c, g, or t
  misc_feature (2066)..(2066): n is a, c, g, or t
gacgtaagatgctttatttgtaatatatttagattttgaaagttattgagagatgaatgtataaaagctaaattttcttttctgaagcagtgaaacaaaattggggtaacaaggaagctctgttgtggcaaacatgtctatgaggaatattaaaactaagcatactcccacaggctttaaactcaaactatgaacatttaaattaagttgttccttattttgcctatacccatttttatctttcattgtcgtttttgcttgacagtatggtgacagagtatttttatttggaaagtcctcagcaagatgaattagccaaaagcaataatggttcagattaaacaataaagtggaattgattcaatcccaggctcaactaagaacagtcgctctctggatctttcattttagacgatagataagttgagatgttgtaatatttatggggggttaagcctgtgtcagttatgggatgaagacttgtagtaccagtaccatcagtggtcatacttttttttaactttttactaaactaatacagttagacatttccactctatcgtgattatatttttatgatgggaaaataaaaacacttccatgtttttataaatagtctctgcaaagatttcagatgttattggtatctcggtttggcagtatctgaaaaattgagattgtctttgaaatgtttgtgctacttttacttaagtaaacccccactgtgcaagacccaggccggcttcagctaataccaaggtttctgtgtgcataatagtttacagagaacttaagagtaaggactgcggattaaaaacaaaactttttttaactttaaaatttttagtttttgttcaaagtacctgggtttataaagtcaaattcttttattagttcctttctcgtttaaattgactgatgttgctgatgaagcttaaagtcccaggcacggttgtggcgatatactgataaaattggtgcctagtggtgggaggagctccagtgtcaggacttttattaaaaggcccttgttttcccaaatgccaatctagccacatttagatttcattattcaataaaacagatgaaaaatcatcccataaatgaatgttgaggttaccaaagtacatcacctgctgaggaaggataaatcttcctgctttaagggagccctgtcatctctcctcttaatgcacgtttcccttggtattagtggaagctgtgttcaagatgggaagcctttcctgcagttcttagaaacacctgctttctaaggagagccttttctaggattagcttatgtgtgttttctctaggcgattttttatttcagttaccaatttaattttcaagttgacagatgctgtgtaaagtctctcataatgagagtagtccattaaattgttgaaagttgcactgcttttcatctttcaggtacctgaaatgagtgacatcaggtatttggaaggagtaagatcataaactgtattcattttcttccttgtacaaagtgatgacttctaatgcttatatctcaaggtattttttaaaaaagcaacggtccctaatagagtaaaatttggttttggtccaagttcccaataatgtatttaatgtttctgttgtttactggtgcctcccgttgcatcaggtagagattgcctgcctctttgtagggcagccttgtggcaccttatgtccaacttggaggatagtatatggcttctttgtgcctctactatcttttcaaaagccattttataaaaatcctaggtagcctattttaatatttaaatatatatatttgtgaaagaacttttagaacagaccttttctttttactttaaaattcctgtatttccatttttaagagtaaatttaatctccaggatttagaagtgtctttccagagaagcataatgagaaagtcagactgaggtaataagaccagaattaagtgatagaagaaactgttgtttggttaaaggacacagatttgaaggaattntgatgtacantnntttatgctgctcattannactgagtcttctagtcagcagctagcngactgtcacatgcttcagatgtactgtgcttggtactatgctgctatattctatgccgagcag

SEQ ID NO: 436408 - DNA, 746 bp, Homo sapiens
atgaaatgaatgatcatcaaagtaccctctcctacatcctgattaacccatctccagataccagaatagagctgaatgatgttgtatacttaattcgaccagatccactggcctaccttccaaacagtgagcccagtcgaagaaacagcatctgcaatgtcactggtcaagattctcgggaggaaactcaactttgataaaaataaaatgagaaacttttttcctacaaagaccttgcttgaaaccacaaaagttttgctggcacgaaagaaactagatggaaatatatgtaattctctcatatttaaaaacgtaatctcttctcttagaagtatagatcattttgaaacttaatgtactacttactggtactctccctattaatatttgaaggacctcaatggaataaatttgaaaagctaaattaaaatacaaaaatttaaatctgacatttaattgttttataataatccaaactctatgaaagcaattttaaaaattattaaggttttatgaagttgacaaaatctaactatatttggtgcatcacaatgggacacaggaatgctgctgctcctcttaaaaattaaatgtgtcatattatattctttaaacttactgttttacaaaattgagctcatcgtaaatgtctaggtcttctcacatggaggtttacccacaacctgtgtgggcctgacttttgtgtaagaatcatagtttgctttagaatacaaatctttaagtca

SEQ ID NO: 436409 - DNA, 1301 bp, Homo sapiens
ttaagaaattctggtggattggagcccctggtagagctgctacgctccaagaatgatgaagtgaggaagcacgccagttgggcagtgatggtctgtgctggtgacgagctgacggccaatgaattatgcaggctcggggctttagatatccttgaagaagttaacgtatcaggaactcggaaaaataaattcagtgaggcagcttataataagttgctcaataacaatctttccctgaaatacagccagactggctatttgtcatcaagtaacataattaacgatggattctatgattatggtcggataaatcccggcaccaaactgttgcctttgaaggagctctgcttacaagaaccaagtgacctacgggctgtactcttaatcaacagtaaatcttacgtttctccaccttcatctatggaagataaatcagatgttggttatggacgaagtatttcttcttcatcttccttaagaagatcaagtaaagaaaagaataaaaaaaatagttatcattttagtgctggatttggatctcccatagaagacaaatcagagccagcttctggacgaaatactgttctcagcaaaagcgccaccaaagaaaaaggatggaggaaaagcaaaggaaaaaaagaagaggaaaaagtgaaagaggaggaagaggttatggtggtaccaaaatttgttggtgaaggaagctctgacaaagaatggtgtcctccctctgaccctgatttctctatgtatgtgtatgaggtgaccaaatcaatactgccaataaccaatattaaggaacagattgaggatctggcaaagtatgtagcagaaaaaatgggtggtaagattccaaaagagaaactacctgatttcagctgggaacttcacataagtgaactgaaatttcaacttaaatccaatgttataccgattggacatgtcaaaaaaggaatcttctaccatcgagctttgcttttcaaggctctggctgatagaattggcattggttgctccctagttcgcggagagtacggtagagcgtggaatgaagtcatgctgcagaatgactctcggaagggagtgattgggggcctccccgctcctgagatgtacgtgattgacctcatgttccatccaggtggactgatgaagttgagaagtcgagaggctgatctttacagattcatttaagccatcagacgaacacaagagaggctcaaacaagaaattcactgtgtacactctctaagacattctccaaattgattttatctctttaaataaaaactttaaataaa

SEQ ID NO: 436410 - DNA, 1064 bp, Homo sapiens
ttaagaaattctggtggattggagcccctggtagagctgctacgctccaagaatgatgaagtgaggaagcacgccagttgggcagtgatggtctgtgctggtgacgagctgacggccaatgaattatgcaggctcggggctttagatatccttgaagaagttaacgtatcaggaactcggaaaaataaattcagtgaggcagcttataataagttgctcaataacaatctttccctgaaatacagccagactggctatttgtcatcaagtaacataattaacgatggattctatgattatggtcggataaatcccggcaccaaactgttgcctttgaaggagctctgcttacaagaaccaagtgacctacgggctgtactcttaatcaacagtaaatcttacgtttctccaccttcatctatggaagataaatcagatgttggttatggacgaagtatttcttcttcatcttccttaagaagatcaagtaaagaaaagaataaaaaaaatagttatcattttagtgctggatttggatctcccatagaagacaaatcagagccagcttctggacgaaatactgttctcagcaaaagcgccaccaaagaaaaaggatggaggaaaagcaaaggaaaaaaagaagaggaaaaagtgaaagaggaggaagaggttatggtggtaccaaaatttgttggtgaaggaagctctgacaaagaatggtgtcctccctctgaccctgatttctctatgtatgtgtatgaggtgaccaaatcaatactgccaataaccaatattaaggaacagattgaggatctggcaaagtcatacgttcactaagaatcagagatagcagctggaaattgcttcaagaaaaatgcctgtcattttcttcagctagaccatgaaaagcatctttcaatgtgatcctgcagaagttatgaatgaatcaaaagtttgaagattaaatcatcccttaggtggatggggtgttcataagttaaaggaatcctactgtgaattatttgtaaactgataaattttctaatacaaatgtccaatgtctc

SEQ ID NO: 436411 - DNA, 361 bp, Homo sapiens
caaagaatggtgtcctccctctgaccctgatttctctatgtatgtgtatgaggtgaccaaatcaatactgccaataaccaatattaaggaacagattgaggatctggcaaagtaagttgtctatgtatatatgtgtttttaatttctgaaaaaattttagtgtcatatacattttagccatgttttagacaaatacaccataaataaaattgaagtttacagcactctgactctgacacagaaacacaatgaattggaaaagtcctcaacttctatttaggtcatacgttcactaagaatcagagatagcagctggaaattgcttcaagaaaaatgcctgtcattttcttcagctagacca

SEQ ID NO: 436412 - DNA, 1010 bp, Homo sapiens
ttaagaaattctggtggattggagcccctggtagagctgctacgctccaagaatgatgaagtgaggaagcacgccagttgggcagtgatggtctgtgctggtgacgagctgacggccaatgaattatgcaggctcggggctttagatatccttgaagaagttaacgtatcaggaactcggaaaaataaattcagtgaggcagcttataataagttgctcaataacaatctttccctgaaatacagccagactggctatttgtcatcaagtaacataattaacgatggattctatgattatggtcggataaatcccggcaccaaactgttgcctttgaaggagctctgcttacaagaaccaagtgacctacgggctgtactcttaatcaacagtaaatcttacgtttctccaccttcatctatggaagataaatcagatgttggttatggacgaagtatttcttcttcatcttccttaagaagatcaagtaaagaaaagaataaaaaaaatagttatcattttagtgctggatttggatctcccatagaagacaaatcagagccagcttctggacgaaatactgttctcagcaaaagcgccaccaaagaaaaaggatggagctcactccccacttcaagataaaccctgaagcactcctaggatttaagaggattgttggcatgaggagaacacagagactttggattcagacacaactgggccttggtcttctgaattgtaaatgaaaatgatgatccctgcctcaaagagctgctgtaagaggagagatggtgtcaggaaagtgcctgaccatcacctagcacacttaggggctcaatgtgcgacccttctctcttcccttcttagcctttggtccattgaggggtagattagccatagccctgttgtcctgttgcctgtcttttggtcaacccttcttgtcttatgactattaaaactttggactcctggaaatagaataaaatattttaactgcattcgtctgaaaa

SEQ ID NO: 436413 - DNA, 474 bp, Homo sapiens
aaaagcgcctaggtgttgctgacctttaaacagccttaaagctgtgaagttgcaagtgatgatgtttgtgttattctcgggtcttggttttggttattaagtcaaggaattgatacattatgtatatcatgtagatagacatacattctttgtatctttcgatttttaggggggatagaatactgggagcagaggcggagtggcaactttaaacaggtggaagccaagctaattgacaaactggatagcctgatgtcagaaggcaaaggtgacgaaacataccgcgagctcttcaacagtattctactaaagaaaattgagcgggaaacatggcgggaaagtggcgtttcattaattgctactgtaactcgtctaatggagaggttgttagattacagggactgcatgaaaatgggagaggtagatggcaaaaagattggctgcacagttagccttctgaacttctataagact

SEQ ID NO: 436414 - DNA, 5385 bp, Homo sapiens
atctgggattcctacttttacctcgcagtcatttttataaaccagttgtgtctgcagttggagatgttcacaccttccaagaagaaaaaggtgttagaaaagtatggtgacatgcgggtaacaatgggttgtgaaattttcagcatgtggcaaaacctaggagagcacaagcttcattttatccctgccctgattggccccttcctagaagtgaccttgataccccagccagatcttcggaatgtcatgattccaatttttcatgatatgatggactgggagcagaggcggagtggcaactttaaacaggtggaagccaagctaattgacaaactggatagcctgatgtcagaaggcaaaggtgacgaaacataccgcgagctcttcaacagtattctactaaagaaaattgagcgggaaacatggcgggaaagtggcgtttcattaattgctactgtaactcgtctaatggagaggttgttagattacagaacttctataagactgaactgaacaaggaggagatgtatatacgctacattcacaaactctatgatctgcatctcaaagcacagaactttacagaagctgcatataccctcctcttatatgacgagctactggaatggtctgatcggcccctcagggagttcctgacctaccccatgcaaacagaatggcagcgcaaagagcacctgcacctcaccatcatccagaactttgacagaggcaaatgttgggagaatggcattatcttgtgccggaagattgcagagcagtatgagagttattatgactacagaaacctgagcaagatgcggatgatggaagcctctttgtatgacaaaattatggaccagcaacgtcttgaaccagagttcttcagagttggattttatggaaaaaaatttccatttttcttaagaaataaggagtttgtgtgtcgagggcatgactacgagaggctggaagccttccaacagagaatgctgaacgagttcccccatgccatcgccatgcagcacgccaaccagcccgatgagaccatcttccaggcagaagctcagtatttgcagatatatgctgtgactcccattccagagagccaggaggtcctgcagagagagggtgttccggacaacatcaaaagcttctataaagtgaatcacatctggaaattccgctatgaccgaccatttcacaaaggcacaaaagataaagagaatgaattcaagagtctctgggtggagagaacgtcattatacttggtgcagagtttgcctggcatctctcgctggtttgaagtggaaaagcgtgaagtggtagaaatgagtcctctggaaaatgcaattgaagtgctagaaaataagaatcagcagctgaagactctgattagtcagtgtcagacaagacagatgcagaatattaatcccctgactatgtgcctgaatggagttatagatgctgcagttaatggtggcgtttccaggtatcaagaggcattctttgtcaaagaatatatcttaagtcaccctgaagatggggagaaaattgcacgattaagagagctgatgcttgagcaggcacagattctggaatttggtttggccgtgcatgagaagtttgtacctcaagatatgagaccccttcacaaaaagctggttgaccaattctttgtgatgaagtcgagcttagggatacaggagttctctgcttgtatgcaagccagtcctgtccattttcctaatggaagccctcgtgtgtgtagaaactcagcacctgcttctgtgagcccagatggtaccagggtaattcctagacgcagcccgttaagttacccagctgtcaaccgatattcttcctcctcactgtcctcacaagcttctgctgaagtaagcaatattacagggcaatcagaaagctctgatgaagtctttaacatgcagccaagtccatctacctcaagcttgagttctactcactcggcttcacctaatgtgacaagttctgctccatcgagtgccagagcttctcctttgttgtctgacaaacacaaacattcccgagaaaactcttgcctgtcaccaagagagagaccatgcagtgccatctatccaacacctgtggagccttcgcagaggatgctgtttaatcatattggagacggggccttgccacgcagtgacccaaatctctctgcacctgaaaaagcttcaccagcaagacacacgacatcagtatccccctcgcctgccgggcgatctccattgaagggctctgtgcagtctttcaccccctctccagtggagtaccactcgccaggactcatctccaactcccctgtcttgtcgggcagctacagcagtgggatttcttctctcagccggtgcagcacgtcggaaacctcaggctttgaaaatcaggtgaatgaacagtcggcccccctgccggtgccagtgccggtgcccgtgccgagctacggcggggaggagccagtgcgcaaggagagcaagactccgcccccgtacagcgtctacgagcggactctgcggcgccccgtcccgctacctcacagcctctccatccccgtcacgtcggagccgcccgcgctgccccccaagcctctggcagcgcgatccagccacctggagaatggggcccggaggactgaccccggcccgcggcccaggcccctgccccgcaaggtctctcagttataagtcacttttctatgtacctgcgatgcattctttgcccgtttacaaaataagaagtatgatgagaagacatttagtgtaggcactttaataacttactcagctccttcgatgaatggaattaaaacttgcttattaaatatcatgttgcacaatattaaaagttgctgatctaaaacgccagatgttaaatgaagtatggctgaatttcattaaaacgtttctcatttggaagtggtaaatagtgataaagactccttttgtacctttttatgttcacttttttttatatagtttaatcttaaaaccaatacgatattgtcaaacgatacaatgtgtgacaatgttgtatcgtttttactgaatacttgatacttggagaaagcttattaagtcagtgcacatcctaacacagtggtccttattttagaagacttctgtaaataaggcaaggtttatcagtgcagatcatcagaattaaagttcaagcaggcgagcaagacagtatacttaaggggttgcaaagcttgggactggaaattgttttgttcttgaaacaaaatacttctttaaggttgcttttgctgtttgactgctgtctacattcgtaaaattctattttgtgaattggtagctaaatcccttactaccctgacaccgtggtatctactgtatttcttttcaaggtgcaatttgcttcagagttccaatcagctagattaagcaagaggctccagaagaaatgtttacttgaattttgcgcttcctttcttgatagtttcctatataaaatttgtcattgaacaagagcaaatgctgaagtattaatgaggcacaaatgactgtgccccattagcaagaattcaggaatcaatacagacagtattaaattaatagcttaagtgaagaaaaaaaaaacttagtgaaaatgtattagcacgattaaatggcaaaaggacttataaaaggcaagggcattaactttcagtcctgcacaaaataaaaaattcctcacgactctccacttttaccagtggagtttgtcttagctgacctgtcgtctttctcttgaaggaggattgctgtagacttctctagcttgaatattgcaacatagcatcttaggtctagatagggatgctaatgccagttgtagaagtgtgaaaaaagcaccttgtatgtagtaatgtattttatatctttgttttttcttttactgactgtttataacactcaattgacaatagatatgaactgtattttaaatcatactgttaaatattttccctcttttgttgggaagctcattttagtttaaccatgtttgttttgttggtagcttacctggaaggcagtgaccacttttttatattctcttaatgaaaccattcagcaggtatatgctgttgaggctggttatagaggttttctataataaatgttcaagtatttttgtatataactggttaattttaataagagataccattatgtgtaaaaaaaagtaaaaataaacgcaaacagttgttgatgcagtatgattgttataattatgccaaatactttacgtatggaaaaagaatatttgtacatatgtgcttttaacaattctgccatattgactttacaattttgaatgtcggaaaaattaatatatgttaaatatttatgtttagtgaaagtgttcataattgagaaaaggaacatatgcattttagctttgtatcttgcaagttttgcagtcagaaattttttgaactagcttttgcttttgataacacttcgtgtttgtaaccacattcatatatatatacatatatatgtgaagctccatatttctgttgctttaaagaagtaaaaccttccatttaaataagatgacatgcataagataacaaagcttccttgatttccttttcctgtgtaatttaatagatttgttgactagtgcttgggcacattataaatcagtgttatttgctcttggagccattttttaaaaaaaattttggcagtgagcagttgaatttatcttgaatttatcatgtgtgtgtatttctgaagcagctacatagcagaacattttaagagattctgttagcccacatgttcatgttggttgctgctgaatggtaaatattaaataaaattaccagattaatcttaatatttctgtctttactcctatcatcagcatgtctttacttgtaatagaagcggctcttgatcttattatagtgagatttccagacttctttttagatagatcctgtttgtgttgtcctgccacgtagatgcatttcacactcactacggctcacttatgccatagggaacaatcaccagaaaggtaacaaacagtatgggttaatatcccatagaaagggtaacatttacctggttggctgaccattcattggcctaaccagagccaacttaacaagtcaaaccatcaaaatgtgtttgcatcagaaaacttgacataaaacagataacttccaagcatataagggcatggttaaatgctggttttgacagctgtggtaaaaatctatctgcatgccaactcttctccctggttttcataaaatgatagaaaatatacatgtgacatacactgaaaaacccactgactacaagatttctattaataaagcctggcttttaa

SEQ ID NO: 436415 - DNA, 2477 bp, Homo sapiens
atctgggattcctacttttacctcgcagtcatttttataaaccagttgtgtctgcagttggagatgttcacaccttccaagaagaaaaaggtgttagaaaagtatggtgacatgcgggtaacaatgggttgtgaaattttcagcatgtggcaaaacctaggagagcacaagcttcattttatccctgccctgattggccccttcctagaagtgaccttgataccccagccagatcttcggaatgtcatgattccaatttttcatgatatgatggactgggagcagaggcggagtggcaactttaaacaggtggaagccaagctaattgacaaactggatagcctgatgtcagaaggcaaaggtgacgaaacataccgcgagctcttcaacagtattctactaaagaaaattgagcgggaaacatggcgggaaagtggcgtttcattaattgctactgtaactcgtctaatggagaggttgttagattacagaacttctataagactgaactgaacaaggaggagatgtatatacgctacattcacaaactctatgatctgcatctcaaagcacagaactttacagaagctgcatataccctcctcttatatgacgagctactggaatggtctgatcggcccctcagggagttcctgacctaccccatgcaaacagaatggcagcgcaaagagcacctgcacctcaccatcatccagaactttgacagaggcaaatgttgggagaatggcattatcttgtgccggaagattgcagagcagtatgagagttattatgactacagaaacctgagcaagatgcggatgatggaagcctctttgtatgacaaaattatggaccagcaacgtcttgaaccagagttcttcagagttggattttatggaaaaaaatttccatttttcttaagaaataaggagtttgtgtgtcgagggcatgactacgagaggctggaagccttccaacagagaatgctgaacgagttcccccatgccatcgccatgcagcacgccaaccagcccgatgagaccatcttccaggcagaagctcagtatttgcagatatatgctgtgactcccattccagagagccaggaggtcctgcagagagagggtgttccggacaacatcaaaagcttctataaagtgaatcacatctggaaattccgctatgaccgaccatttcacaaaggcacaaaagataaagagaatgaattcaagagtctctgggtggagagaacgtcattatacttggtgcagagtttgcctggcatctctcgctggtttgaagtggaaaagcgtgaagtggtagaaatgagtcctctggaaaatgcaattgaagtgctagaaaataagaatcagcagctgaagactctgattagtcagtgtcagacaagacagatgcagaatattaatcccctgactatgtgcctgaatggagttatagatgctgcagttaatggtggcgtttccaggtatcaagaggcattctttgtcaaagaatatatcttaagtcaccctgaagatggggagaaaattgcacgattaagagagctgatgcttgagcaggcacagattctggaatttggtttggccgtgcatgagaagtttgtacctcaagatatgagaccccttcacaaaaagctggttgaccaattctttgtgatgaagtcgagcttagggatacaggagttctctgcttgtatgcaagccagtcctgtccattttcctaatggaagccctcgtgtgtgtagaaactcagcacctgcttctgtgagcccagatggtaccagggtaattcctagacgcagcccgttaagttacccagctgtcaaccgatattcttcctcctcactgtcctcacaagcttctgctgaagtaagcaatattacagggcaatcagaaagctctgatgaagtctttaacatgcagccaagtccatctacctcaagcttgagttctactcactcggcttcacctaatgtgacaagttctgctccatcgagtgccagaggtcagtgccagagtgtggggaagactgagggtgcccagagaaccttctagtcctgggaactgtggccagctgccacacgttcaggctctcgcctccaaacaggtgcagcaccactaccatgctgatgatcctctctctccttctcttcccagcttctcctttgttgtctgacaaacacaaacattcccgagaaaactcttgcctgtcaccaagagagagaccatgcagtgccatctatccaacacctgtggagccttcgcagaggatgctgtttaatcatattggagacggggccttgccacgcagtgacccaaatctctctgcacctgaaaaagctgtgaaccccacccctagcagctggagcctggacagtgggaaggaagccaagaacatgtcggatagtgggaaacttatctctccccctgtccctccaagacccacacagactg

SEQ ID NO: 436416 - DNA, 5154 bp, Homo sapiens
gggagaagctaggaaaaaatgtctttgagctgtgagatgcttgtatattttgaaaatatgattatatgcatgtgtttgtattttatgacttggataatctgaaaatcaatttgctttgtcaatgcttcctggattagaattccactatttggtccctatcctagtctactaaagaaaattgagcgggaaacatggcgggaaagtggcgtttcattaattgctactgtaactcgtctaatggagaggttgttagattacagaacttctataagactgaactgaacaaggaggagatgtatatacgctacattcacaaactctatgatctgcatctcaaagcacagaactttacagaagctgcatataccctcctcttatatgacgagctactggaatggtctgatcggcccctcagggagttcctgacctaccccatgcaaacagaatggcagcgcaaagagcacctgcacctcaccatcatccagaactttgacagaggcaaatgttgggagaatggcattatcttgtgccggaagattgcagagcagtatgagagttattatgactacagaaacctgagcaagatgcggatgatggaagcctctttgtatgacaaaattatggaccagcaacgtcttgaaccagagttcttcagagttggattttatggaaaaaaatttccatttttcttaagaaataaggagtttgtgtgtcgagggcatgactacgagaggctggaagccttccaacagagaatgctgaacgagttcccccatgccatcgccatgcagcacgccaaccagcccgatgagaccatcttccaggcagaagctcagtatttgcagatatatgctgtgactcccattccagagagccaggaggtcctgcagagagagggtgttccggacaacatcaaaagcttctataaagtgaatcacatctggaaattccgctatgaccgaccatttcacaaaggcacaaaagataaagagaatgaattcaagagtctctgggtggagagaacgtcattatacttggtgcagagtttgcctggcatctctcgctggtttgaagtggaaaagcgtgaagtggtagaaatgagtcctctggaaaatgcaattgaagtgctagaaaataagaatcagcagctgaagactctgattagtcagtgtcagacaagacagatgcagaatattaatcccctgactatgtgcctgaatggagttatagatgctgcagttaatggtggcgtttccaggtatcaagaggcattctttgtcaaagaatatatcttaagtcaccctgaagatggggagaaaattgcacgattaagagagctgatgcttgagcaggcacagattctggaatttggtttggccgtgcatgagaagtttgtacctcaagatatgagaccccttcacaaaaagctggttgaccaattctttgtgatgaagtcgagcttagggatacaggagttctctgcttgtatgcaagccagtcctgtccattttcctaatggaagccctcgtgtgtgtagaaactcagcacctgcttctgtgagcccagatggtaccagggtaattcctagacgcagcccgttaagttacccagctgtcaaccgatattcttcctcctcactgtcctcacaagcttctgctgaagtaagcaatattacagggcaatcagaaagctctgatgaagtctttaacatgcagccaagtccatctacctcaagcttgagttctactcactcggcttcacctaatgtgacaagttctgctccatcgagtgccagagcttctcctttgttgtctgacaaacacaaacattcccgagaaaactcttgcctgtcaccaagagagagaccatgcagtgccatctatccaacacctgtggagccttcgcagaggatgctgtttaatcatattggagacggggccttgccacgcagtgacccaaatctctctgcacctgaaaaagcttcaccagcaagacacacgacatcagtatccccctcgcctgccgggcgatctccattgaagggctctgtgcagtctttcaccccctctccagtggagtaccactcgccaggactcatctccaactcccctgtcttgtcgggcagctacagcagtgggatttcttctctcagccggtgcagcacgtcggaaacctcaggctttgaaaatcaggtgaatgaacagtcggcccccctgccggtgccagtgccggtgcccgtgccgagctacggcggggaggagccagtgcgcaaggagagcaagactccgcccccgtacagcgtctacgagcggactctgcggcgccccgtcccgctacctcacagcctctccatccccgtcacgtcggagccgcccgcgctgccccccaagcctctggcagcgcgatccagccacctggagaatggggcccggaggactgaccccggcccgcggcccaggcccctgccccgcaaggtctctcagttataagtcacttttctatgtacctgcgatgcattctttgcccgtttacaaaataagaagtatgatgagaagacatttagtgtaggcactttaataacttactcagctccttcgatgaatggaattaaaacttgcttattaaatatcatgttgcacaatattaaaagttgctgatctaaaacgccagatgttaaatgaagtatggctgaatttcattaaaacgtttctcatttggaagtggtaaatagtgataaagactccttttgtacctttttatgttcacttttttttatatagtttaatcttaaaaccaatacgatattgtcaaacgatacaatgtgtgacaatgttgtatcgtttttactgaatacttgatacttggagaaagcttattaagtcagtgcacatcctaacacagtggtccttattttagaagacttctgtaaataaggcaaggtttatcagtgcagatcatcagaattaaagttcaagcaggcgagcaagacagtatacttaaggggttgcaaagcttgggactggaaattgttttgttcttgaaacaaaatacttctttaaggttgcttttgctgtttgactgctgtctacattcgtaaaattctattttgtgaattggtagctaaatcccttactaccctgacaccgtggtatctactgtatttcttttcaaggtgcaatttgcttcagagttccaatcagctagattaagcaagaggctccagaagaaatgtttacttgaattttgcgcttcctttcttgatagtttcctatataaaatttgtcattgaacaagagcaaatgctgaagtattaatgaggcacaaatgactgtgccccattagcaagaattcaggaatcaatacagacagtattaaattaatagcttaagtgaagaaaaaaaaaacttagtgaaaatgtattagcacgattaaatggcaaaaggacttataaaaggcaagggcattaactttcagtcctgcacaaaataaaaaattcctcacgactctccacttttaccagtggagtttgtcttagctgacctgtcgtctttctcttgaaggaggattgctgtagacttctctagcttgaatattgcaacatagcatcttaggtctagatagggatgctaatgccagttgtagaagtgtgaaaaaagcaccttgtatgtagtaatgtattttatatctttgttttttcttttactgactgtttataacactcaattgacaatagatatgaactgtattttaaatcatactgttaaatattttccctcttttgttgggaagctcattttagtttaaccatgtttgttttgttggtagcttacctggaaggcagtgaccacttttttatattctcttaatgaaaccattcagcaggtatatgctgttgaggctggttatagaggttttctataataaatgttcaagtatttttgtatataactggttaattttaataagagataccattatgtgtaaaaaaaagtaaaaataaacgcaaacagttgttgatgcagtatgattgttataattatgccaaatactttacgtatggaaaaagaatatttgtacatatgtgcttttaacaattctgccatattgactttacaattttgaatgtcggaaaaattaatatatgttaaatatttatgtttagtgaaagtgttcataattgagaaaaggaacatatgcattttagctttgtatcttgcaagttttgcagtcagaaattttttgaactagcttttgcttttgataacacttcgtgtttgtaaccacattcatatatatatacatatatatgtgaagctccatatttctgttgctttaaagaagtaaaaccttccatttaaataagatgacatgcataagataacaaagcttccttgatttccttttcctgtgtaatttaatagatttgttgactagtgcttgggcacattataaatcagtgttatttgctcttggagccattttttaaaaaaaattttggcagtgagcagttgaatttatcttgaatttatcatgtgtgtgtatttctgaagcagctacatagcagaacattttaagagattctgttagcccacatgttcatgttggttgctgctgaatggtaaatattaaataaaattaccagattaatcttaatatttctgtctttactcctatcatcagcatgtctttacttgtaatagaagcggctcttgatcttattatagtgagatttccagacttctttttagatagatcctgtttgtgttgtcctgccacgtagatgcatttcacactcactacggctcacttatgccatagggaacaatcaccagaaaggtaacaaacagtatgggttaatatcccatagaaagggtaacatttacctggttggctgaccattcattggcctaaccagagccaacttaacaagtcaaaccatcaaaatgtgtttgcatcagaaaacttgacataaaacagataacttccaagcatataagggcatggttaaatgctggttttgacagctgtggtaaaaatctatctgcatgccaactcttctccctggttttcataaaatgatagaaaatatacatgtgacatacactgaaaaacccactgactacaagatttctattaataaagcctggcttttaa

SEQ ID NO: 436417 - DNA, 3858 bp, Homo sapiens
tgaaggaatgcactgctaactggtacgaagtcacagtgtatagctgaatctaacacgaaggcattcctttggcaggagtcaaaatctcagacttttcattaattcatgcagacttctttgtcaatctaagttattaagattttctatattgttaaacggacttttttttgctaatttgaaaaaaagttgatgattttgtttcaaatacgtcagtgtcgcgggaagcctttaatcagggtatgataatagctccctgtgtgtttccagccaagtccatctacctcaagcttgagttctactcactcggcttcacctaatgtgacaagttctgctccatcgagtgccagaggtcagtgccagagtgtggggaagactgagggtgcccagagaaccttctagtcctgggaactgtggccagctgccacacgttcaggctctcgcctccaaacaggtgcagcaccactaccatgctgatgatcctctctctccttctcttcccagcttctcctttgttgtctgacaaacacaaacattcccgagaaaactcttgcctgtcaccaagagagagaccatgcagtgccatctatccaacacctgtggagccttcgcagaggatgctgtttaatcatattggagacggggccttgccacgcagtgacccaaatctctctgcacctgaaaaagcttcaccagcaagacacacgacatcagtatccccctcgcctgccgggcgatctccattgaagggctctgtgcagtctttcaccccctctccagtggagtaccactcgccaggactcatctccaactcccctgtcttgtcgggcagctacagcagtgggatttcttctctcagccggtgcagcacgtcggaaacctcaggctttgaaaatcaggtgaatgaacagtcggcccccctgccggtgccagtgccggtgcccgtgccgagctacggcggggaggagccagtgcgcaaggagagcaagactccgcccccgtacagcgtctacgagcggactctgcggcgccccgtcccgctacctcacagcctctccatccccgtcacgtcggagccgcccgcgctgccccccaagcctctggcagcgcgatccagccacctggagaatggggcccggaggactgaccccggcccgcggcccaggcccctgccccgcaaggtctctcagttataagtcacttttctatgtacctgcgatgcattctttgcccgtttacaaaataagaagtatgatgagaagacatttagtgtaggcactttaataacttactcagctccttcgatgaatggaattaaaacttgcttattaaatatcatgttgcacaatattaaaagttgctgatctaaaacgccagatgttaaatgaagtatggctgaatttcattaaaacgtttctcatttggaagtggtaaatagtgataaagactccttttgtacctttttatgttcacttttttttatatagtttaatcttaaaaccaatacgatattgtcaaacgatacaatgtgtgacaatgttgtatcgtttttactgaatacttgatacttggagaaagcttattaagtcagtgcacatcctaacacagtggtccttattttagaagacttctgtaaataaggcaaggtttatcagtgcagatcatcagaattaaagttcaagcaggcgagcaagacagtatacttaaggggttgcaaagcttgggactggaaattgttttgttcttgaaacaaaatacttctttaaggttgcttttgctgtttgactgctgtctacattcgtaaaattctattttgtgaattggtagctaaatcccttactaccctgacaccgtggtatctactgtatttcttttcaaggtgcaatttgcttcagagttccaatcagctagattaagcaagaggctccagaagaaatgtttacttgaattttgcgcttcctttcttgatagtttcctatataaaatttgtcattgaacaagagcaaatgctgaagtattaatgaggcacaaatgactgtgccccattagcaagaattcaggaatcaatacagacagtattaaattaatagcttaagtgaagaaaaaaaaaacttagtgaaaatgtattagcacgattaaatggcaaaaggacttataaaaggcaagggcattaactttcagtcctgcacaaaataaaaaattcctcacgactctccacttttaccagtggagtttgtcttagctgacctgtcgtctttctcttgaaggaggattgctgtagacttctctagcttgaatattgcaacatagcatcttaggtctagatagggatgctaatgccagttgtagaagtgtgaaaaaagcaccttgtatgtagtaatgtattttatatctttgttttttcttttactgactgtttataacactcaattgacaatagatatgaactgtattttaaatcatactgttaaatattttccctcttttgttgggaagctcattttagtttaaccatgtttgttttgttggtagcttacctggaaggcagtgaccacttttttatattctcttaatgaaaccattcagcaggtatatgctgttgaggctggttatagaggttttctataataaatgttcaagtatttttgtatataactggttaattttaataagagataccattatgtgtaaaaaaaagtaaaaataaacgcaaacagttgttgatgcagtatgattgttataattatgccaaatactttacgtatggaaaaagaatatttgtacatatgtgcttttaacaattctgccatattgactttacaattttgaatgtcggaaaaattaatatatgttaaatatttatgtttagtgaaagtgttcataattgagaaaaggaacatatgcattttagctttgtatcttgcaagttttgcagtcagaaattttttgaactagcttttgcttttgataacacttcgtgtttgtaaccacattcatatatatatacatatatatgtgaagctccatatttctgttgctttaaagaagtaaaaccttccatttaaataagatgacatgcataagataacaaagcttccttgatttccttttcctgtgtaatttaatagatttgttgactagtgcttgggcacattataaatcagtgttatttgctcttggagccattttttaaaaaaaattttggcagtgagcagttgaatttatcttgaatttatcatgtgtgtgtatttctgaagcagctacatagcagaacattttaagagattctgttagcccacatgttcatgttggttgctgctgaatggtaaatattaaataaaattaccagattaatcttaatatttctgtctttactcctatcatcagcatgtctttacttgtaatagaagcggctcttgatcttattatagtgagatttccagacttctttttagatagatcctgtttgtgttgtcctgccacgtagatgcatttcacactcactacggctcacttatgccatagggaacaatcaccagaaaggtaacaaacagtatgggttaatatcccatagaaagggtaacatttacctggttggctgaccattcattggcctaaccagagccaacttaacaagtcaaaccatcaaaatgtgtttgcatcagaaaacttgacataaaacagataacttccaagcatataagggcatggttaaatgctggttttgacagctgtggtaaaaatctatctgcatgccaactcttctccctggttttcataaaatgatagaaaatatacatgtgacatacactgaaaaacccactgactacaagatttctattaataaagcctggcttttaa

SEQ ID NO: 436418 - DNA, 2325 bp, Homo sapiens
atctgggattcctacttttacctcgcagtcatttttataaaccagttgtgtctgcagttggagatgttcacaccttccaagaagaaaaaggtgttagaaaagtatggtgacatgcgggtaacaatgggttgtgaaattttcagcatgtggcaaaacctaggagagcacaagcttcattttatccctgccctgattggccccttcctagaagtgaccttgataccccagccagatcttcggaatgtcatgattccaatttttcatgatatgatggactgggagcagaggcggagtggcaactttaaacaggtggaagccaagctaattgacaaactggatagcctgatgtcagaaggcaaaggtgacgaaacataccgcgagctcttcaacagtattctactaaagaaaattgagcgggaaacatggcgggaaagtggcgtttcattaattgctactgtaactcgtctaatggagaggttgttagattacagaacttctataagactgaactgaacaaggaggagatgtatatacgctacattcacaaactctatgatctgcatctcaaagcacagaactttacagaagctgcatataccctcctcttatatgacgagctactggaatggtctgatcggcccctcagggagttcctgacctaccccatgcaaacagaatggcagcgcaaagagcacctgcacctcaccatcatccagaactttgacagaggcaaatgttgggagaatggcattatcttgtgccggaagattgcagagcagtatgagagttattatgactacagaaacctgagcaagatgcggatgatggaagcctctttgtatgacaaaattatggaccagcaacgtcttgaaccagagttcttcagagttggattttatggaaaaaaatttccatttttcttaagaaataaggagtttgtgtgtcgagggcatgactacgagaggctggaagccttccaacagagaatgctgaacgagttcccccatgccatcgccatgcagcacgccaaccagcccgatgagaccatcttccaggcagaagctcagtatttgcagatatatgctgtgactcccattccagagagccaggaggtcctgcagagagagggtgttccggacaacatcaaaagcttctataaagtgaatcacatctggaaattccgctatgaccgaccatttcacaaaggcacaaaagataaagagaatgaattcaagagtctctgggtggagagaacgtcattatacttggtgcagagtttgcctggcatctctcgctggtttgaagtggaaaagcgtgaagtggtagaaatgagtcctctggaaaatgcaattgaagtgctagaaaataagaatcagcagctgaagactctgattagtcagtgtcagacaagacagatgcagaatattaatcccctgactatgtgcctgaatggagttatagatgctgcagttaatggtggcgtttccaggtatcaagaggcattctttgtcaaagaatatatcttaagtcaccctgaagatggggagaaaattgcacgattaagagagctgatgcttgagcaggcacagattctggaatttggtttggccgtgcatgagaagtttgtacctcaagatatgagaccccttcacaaaaagctggttgaccaattctttgtgatgaagtcgagcttagggatacaggagttctctgcttgtatgcaagccagtcctgtccattttcctaatggaagccctcgtgtgtgtagaaactcagcacctgcttctgtgagcccagatggtaccagggtaattcctagacgcagcccgttaagttacccagctgtcaaccgatattcttcctcctcactgtcctcacaagcttctgctgaagtaagcaatattacagggcaatcagaaagctctgatgaagtctttaacatgcagccaagtccatctacctcaagcttgagttctactcactcggcttcacctaatgtgacaagttctgctccatcgagtgccagagcttctcctttgttgtctgacaaacacaaacattcccgagaaaactcttgcctgtcaccaagagagagaccatgcagtgccatctatccaacacctgtggagccttcgcagaggatgctgtttaatcatattggagacggggccttgccacgcagtgacccaaatctctctgcacctgaaaaagctgtgaaccccacccctagcagctggagcctggacagtgggaaggaagccaagaacatgtcggatagtgggaaacttatctctccccctgtccctccaagacccacacagactg

SEQ ID NO: 436419 - DNA, 772 bp, Homo sapiens
  misc_feature (594)..(595): n is a, c, g, or t
  misc_feature (597)..(597): n is a, c, g, or t
  misc_feature (629)..(629): n is a, c, g, or t
gggctaagatgaagcctgaactgattataaaaccttccttggctcagtgcccttcaccactgctggctttttgctgtagctccacattcctgtgcattgaggggttaacattaggctgggaagatgacaaaacttgaagagcatctggagggaattgtcaatatcttccaccaatactcagttcggaaggggcattttgacaccctctctaagggtgagctgaagcagctgcttacaaaggagcttgcaaacaccatcaagaatatcaaagataaagctgtcattgatgaaatattccaaggcctggatgctaatcaagatgaacaggtcgactttcaagaattcatatccctggtagccattgcgctgaaggctgcccattaccacacccacaaagagtaggtagctctctgaaggctttttacccagcaatgtcctcaatgagggtcttttctttccctcaccaaaacccagccttgcccgtggggagtaagagttaataaacacactcacgaaaagttaaaaaaaaaaaaaaaaaaaaaaaaaaaaaaaaaaaaaaaaaaaaaaaaaaaaaaaaaaaaaaaaaaaaaaaannanggggaaaaaaaaaaaaaaaaaaaaaaaaaaancccttgtgggccccttggccccatggatttttaaattgaagcaggttattccttgcggccgaatttgaagctcattggccaatttccccttatagggagcgatttcaaaattcattggccggggtttaaaagttgggacttga

SEQ ID NO: 436420 - DNA, 521 bp, Homo sapiens
gggctaagatgaagcctgaactgattataaaaccttccttggctcagtgcccttcaccactgctggctttttgctgtagctccacattcctgtgcattgaggggttaacattaggctgggaagatgacaaaacttgaagagcatctggagggaattgtcaatatcttccaccaatactcagttcggaaggggcattttgacaccctctctaagggtgagctgaagcagctgcttacaaaggagcttgcaaacaccatcaagaatatcaaagataaagctgtcattgatgaaatattccaaggcctggatgctaatcaagatgaacaggtcgactttcaagaattcatatccctggtagccattgcgctgaaggctgcccattaccacacccacaaagagtaggtagctctctgaaggctttttacccagcaatgtcctcaatgagggtcttttctttccctcaccaaaacccagccttgcccgtggggagtaagagttaataaacacactcacgaaaagtt

SEQ ID NO: 436421 - DNA, 1614 bp, Homo sapiens
gtgcccgagccaggccggcctccccgccccctccctggaaaggaaaggccccggcgacaacagagccagacccgctcatcccgatctcccagaaggcgactgacagctgactgccagaaggagatcgcgccaggagactgactgctctgtgcccacccggggacccgggcccgttcagccgggctggctggtgcgccctctgcaaagcctgcgccagggaggaggcaggctcaaccttcagattcccagggcctctctgtcgctgtcgccgtcgccgtcgcccgaggtcccagcggctctaccagattgttgtggaggcctctcacccgcacagatctcccctgcgaccatgtcttccattaagattgagtgtgttttgccagagaactgccggtgtggtgagtctccagtatgggaggaagtgtccaactctctgctctttgtagacattcctgcaaaaaaggtttgccggtgggattcattcaccaagcaagtacagcgagtgaccatggatgccccagtcagctccgtggctcttcgccagtcgggaggctatgttgccaccattggaacaaagttctgtgctttgaactggaaagaacaatcagcagttgtcttggccacggtggataacgacaagaaaaacaatcgcttcaatgatgggaaggtggatcccgccgggaggtactttgctggcaccatggctgaggaaacagctccagcagttcttgagcggcaccagggggccctgtactccctctttcctgatcaccacgtgaaaaagtactttgaccaggtggacatttccaatggtttggattggtcgctagaccacaaaatcttctattacattgacagcctgtcctactccgtggatgcctttgactatgacctgcagacaggacagatctccaaccgcagaagtgtttacaagctagaaaaggaagaacaaatcccagatggaatgtgtattgatgctgaggggaagctctgggtggcctgttacaatggaggaagagtgattcgtttagatcctgtgacagggaaaagacttcaaactgtgaagttgcctgttgataaaacaacttcatgctgctttggagggaagaattactctgaaatgtatgtgacctgcgcccgggatgggatggaccccgagggtcttttgaggcaacctgaagctggtggaattttcaagataactggtctgggggtcaaaggaattgctccctactcctatgcgggatgaggacaggtcttctttcctgccagagggagctctgaagacaactagagaattctgggcctgaaatttcaatctagttagaaagaaaaatgaggcaatgattttattaacagcgttaagttttaatttacaacttttaaaaggcagagcatttttaacaaggggtgacaggtggttttgataacacacttataaggctttctgtaaaaggtactatagaagggcgaagaatcgttcaactgtcaatcagcctcttgattctttgtaaattgccagggtgggtgggtacatatctcttcttgattctgcatttcatacttaactatattaaagcttcaaggaacaataaatagtaacctggtaatgac

SEQ ID NO: 436422 - DNA, 2234 bp, Homo sapiens
gtgcccgagccaggccggcctccccgccccctccctggaaaggaaaggccccggcgacaacagagccagacccgctcatcccgatctcccagaaggcgactgacagctgactgccagaaggagatcgcgccaggagactgactgctctgtgcccacccggggacccgggcccgttcagccgggctggctggtgcgccctctgcaaagcctgcgccagggaggaggcaggctcaaccttcagattcccagggcctctctgtcgctgtcgccgtcgccgtcgcccgaggtcccagcggctctaccagattgttgtggaggcctctcacccgcacagataatttttctctgtcttctcccagttcgctggtcatggtctctggcctaaagtcccagcatagactgttcctctcctgtggagtctaacactctttgccaaactggcacggtgtcttcctgggaagcaagaaatcactgagggcctgtcagttcctgccagggtggttcgatgctgtccttttctccactccttccatggtctgcgttggaaaatgtgtgttagttcgaattcagcgagttctcattggggtgaacatagtcctaaaaatgcagttcataaaaatcaaccacacagagaagaaaaataaataaatcagtaaagcagctcagaaaaatgcaggtgtggcgggccctggcctctgcaccctcatagaggggctcaacagcatcaacagaaggtgggggagcagaaggtgccctgcagacacccagaggggccaccaatgagcaaactgccagctccctgacccgccctggggcccagggtattgacataaaggacggccttgcactatttcaacagccagttctctgagggtcacaaacaccaaggagtggaggtcagagtgtcacttttttgttttctttttgaaagatcattcgagaaacacgtcactgatctcccctgcgaccatgtcttccattaagattgagtgtgttttgccagagaactgccggtgtggtgagtctccagtatgggaggaagtgtccaactctctgctctttgtagacattcctgcaaaaaaggtttgccggtgggattcattcaccaagcaagtacagcgagtgaccatggatgccccagtcagctccgtggctcttcgccagtcgggaggctatgttgccaccattggaacaaagttctgtgctttgaactggaaagaacaatcagcagttgtcttggccacggtggataacgacaagaaaaacaatcgcttcaatgatgggaaggtggatcccgccgggaggtactttgctggcaccatggctgaggaaacagctccagcagttcttgagcggcaccagggggccctgtactccctctttcctgatcaccacgtgaaaaagtactttgaccaggtggacatttccaatggtttggattggtcgctagaccacaaaatcttctattacattgacagcctgtcctactccgtggatgcctttgactatgacctgcagacaggacagatctccaaccgcagaagtgtttacaagctagaaaaggaagaacaaatcccagatggaatgtgtattgatgctgaggggaagctctgggtggcctgttacaatggaggaagagtgattcgtttagatcctgtgacagggaaaagacttcaaactgtgaagttgcctgttgataaaacaacttcatgctgctttggagggaagaattactctgaaatgtatgtgacctgcgcccgggatgggatggaccccgagggtcttttgaggcaacctgaagctggtggaattttcaagataactggtctgggggtcaaaggaattgctccctactcctatgcgggatgaggacaggtcttctttcctgccagagggagctctgaagacaactagagaattctgggcctgaaatttcaatctagttagaaagaaaaatgaggcaatgattttattaacagcgttaagttttaatttacaacttttaaaaggcagagcatttttaacaaggggtgacaggtggttttgataacacacttataaggctttctgtaaaaggtactatagaagggcgaagaatcgttcaactgtcaatcagcctcttgattctttgtaaattgccagggtgggtgggtacatatctcttcttgattctgcatttcatacttaactatattaaagcttcaaggaacaataaatagtaacctggtaatgac

SEQ ID NO: 436423 - DNA, 444 bp, Homo sapiens
ttttaaaaggcagagcatttttaacaaggggtgacaggtggttttgataacacacttataaggctttctgtaaaaggtactatagaagggcgaagaatcgttcaactgtcaatcagcctcttgattctttgtaaattgccagggtgggtgggtacatatctcttcttgattctgcatttcatacttaactatattaaagcttcaaggaacaataaatagtaacctggtaatgaccctattatgttcctttttattttcatcacaatcttataaaatataccacaatgctaactaacctacatagatatttcatctcctatatgttattttacaaactaaaatacggctggagggttagactcaaacatgctgtcaaaatccatggttccagctgccacctactggatgtaaaagtaatatgtctctttggaaagaatacttatt

SEQ ID NO: 436424 - DNA, 2184 bp, Homo sapiens
gtgcccgagccaggccggcctccccgccccctccctggaaaggaaaggccccggcgacaacagagccagacccgctcatcccgatctcccagaaggcgactgacagctgactgccagaaggagatcgcgccaggagactgactgctctgtgcccacccggggacccgggcccgttcagccgggctggctggtgcgccctctgcaaagcctgcgccagggaggaggcaggctcaaccttcagattcccagggcctctctgtcgctgtcgccgtcgccgtcgcccgaggtcccagcggctctaccagattgttgtggaggcctctcacccgcacagataatttttctctgtcttctcccagttcgctggtcatggtctctggcctaaagtcccagcatagactgttcctctcctgtggagtctaacactctttgccaaactggcacggtgtcttcctgggaagcaagaaatcactgagggcctgtcagttcctgccagggtggttcgatgctgtccttttctccactccttccatggtctgcgttggaaaatgtgtgttagttcgaattcagcgagttctcattggggtgaacatagtcctaaaaatgcagttcataaaaatcaaccacacagagaagaaaaataaataaatcagtaaagcagctcagaaaaatgcaggtgtggcgggccctggcctctgcaccctcatagaggggctcaacagcatcaacagaaggtgggggagcagaaggtgccctgcagacacccagaggggccaccaatgagcaaactgccagctccctgacccgccctggggcccagggtattgacataaaggacggccttgcactatttcaacagccagttctctgagggtcacaaacaccaaggagtggaggtcagagtgtcacttttttgttttctttttgaaagatcattcgagaaacacgtcactgatctcccctgcgaccatgtcttccattaagattgagtgtgttttgccagagaactgccggtgtggtgagtctccagtatgggaggaagtgtccaactctctgctctttgtagacattcctgcaaaaaaggtttgccggtgggattcattcaccaagcaagtacagcgagtgaccatggatgccccagtcagctccgtggctcttcgccagtcgggaggctatgttgccaccattggaacaaagttctgtgctttgaactggaaagaacaatcagcagttgtcttggccacggtggataacgacaagaaaaacaatcgcttcaatgatgggaaggtggatcccgccgggaggtactttgctggcaccatggctgaggaaacagctccagcagttcttgagcggcaccagggggccctgtactccctctttcctgatcaccacgtgaaaaagtactttgaccaggtggacatttccaatggtttggattggtcgctagaccacaaaatcttctattacattgacagcctccaaccgcagaagtgtttacaagctagaaaaggaagaacaaatcccagatggaatgtgtattgatgctgaggggaagctctgggtggcctgttacaatggaggaagagtgattcgtttagatcctgtgacagggaaaagacttcaaactgtgaagttgcctgttgataaaacaacttcatgctgctttggagggaagaattactctgaaatgtatgtgacctgcgcccgggatgggatggaccccgagggtcttttgaggcaacctgaagctggtggaattttcaagataactggtctgggggtcaaaggaattgctccctactcctatgcgggatgaggacaggtcttctttcctgccagagggagctctgaagacaactagagaattctgggcctgaaatttcaatctagttagaaagaaaaatgaggcaatgattttattaacagcgttaagttttaatttacaacttttaaaaggcagagcatttttaacaaggggtgacaggtggttttgataacacacttataaggctttctgtaaaaggtactatagaagggcgaagaatcgttcaactgtcaatcagcctcttgattctttgtaaattgccagggtgggtgggtacatatctcttcttgattctgcatttcatacttaactatattaaagcttcaaggaacaataaatagtaacctggtaatgac

SEQ ID NO: 436425 - DNA, 2232 bp, Homo sapiens
cctgaagctccggactacagctcccaggcctctccaagcccctaccgcacaggctcatagccccaagcccggaggaggtggctacattgtgtctattgtatcccttggctggtgtatttgtacatctctcgggacgtgaaattgacagtgaaaagtatggcagatgagcaagaaatcatgtgcaaattggaaagcattaaagagatcaggaacaagaccctgcagatggagaagatcaaggctcgtttgaaggctgagtttgaggcacttgagtcagaggaaaggcacctgaaggaatacaagcaggagatggaccttctgctacaggagaagatggcccatgtggaggaactccgactgatccacgctgacatcaatgtgatggaaaacactatcaaacaatctgagaatgacctaaacaagctgctagagtctacaaggaggctgcatgatgagtataagccactgaaagaacatgtggatgccctgcgcatgactctgggcctgcagaggctccctgacttgtgtgaagaagaggagaagctttccttggattactttgagaagcagaaagcagaatggcagacagaacctcaggagccccccatccctgagtccctggccgctgcagccgctgccgcccaacagctccaagtggctaggaagcaggatactcggcagacggccaccttcaggcagcagcccccacctatgaaggcctgcttgtcatgtcaccagcaaattcaccggaatgcacctatatgccctctttgcaaggccaagagtcggtcccggaaccccaaaaagccgaaacggaagcaggatgaataaagaaagggagagcacatgaagctttgctaattataacccctcaccttgaccagagtcattgatgtcctgatgtgaaacaacccttgcccaaccccacgaagtctcctatttaatgtgatggaagcacaacccctctctcactttgctcctatttctttctgctcttgggatttctggtttaggaagagatgtggttcaggtgctaaacagtgtgtctgatgatcccttctctcccactcacatttcaacccctgcccttgtttggagctaagggaagggcaaaaggctcagatatgattctctatctcttgtgcctgaggcctggagcctaaggagctgtagggtctgaggggcaggggaggcccatatcttgtttcaggtaaaggacccagtatttcccctccttgtacttttgccttaggttctcaagggacaatagtcttcatgttggattctccaacaggctgggtgcatgtatccccctactcctaccctcatctcatccttaaggcccagaggtagcttggacaagccctccttttcataatcatttgggaggcatggctgtaattctttagctttctccacttctgtctcccacatatactaaaattcttaggtactaggctgtgtgtcttgggatcttaagatcaatgaacctttccccaatatctagtctttgcaaattctagtagaagatttccacagtgaaatcagtgagccagaccaactctacatctcctgcctaacctactgcctaagtcattagggctgagggctcggctgtaggggcttccttaggctgagagtgcccccaggctgacatctgtgttggcttttgttcagaaccattactctggcacatgctcaatggtatattgcagggaggagaggagtagatttagatttgagtaaatgccaatcactttacacatgaaggtgggtgggactttccttccattcatcccttgctctcttggatctgaactcttctggagcctcagctcaggatagctgctggccactcctgtcctgtggattgtgcaggtggcctttcctcccaaaagaaaaggcatcaggctccccaagccccacagctctcctttccaccaaagccaggtttcctggtaaggtcactcgaagataagggatggggatgggggctgactgacaaaaaattttagccccaggtctcagtacctggctggggagggggatatttttccttccttaagtagttttacattgccacagtgtgtatgtgttcactatataaaatgttcctctgctctttgaaagtaagagtgttgtgtctgtacaaatccttttaacatgcattcattggagtaaattctgagtatctactgtgtattggataatacaaaagatgtaatgtcattt

SEQ ID NO: 436426 - DNA, 2213 bp, Homo sapiens
  misc_feature (7)..(11): n is a, c, g, or t
aggggannnnnagaaacatacggctaggtacgaggctgggtggtcaagcccggaggaggtggctacattgtgtctattgtatcccttggctggtgtatttgtacatctctcgggacgtgaaattgacagtgaaaagtatggcagatgagcaagaaatcatgtgcaaattggaaagcattaaagagatcaggaacaagaccctgcagatggagaagatcaaggctcgtttgaaggctgagtttgaggcacttgagtcagaggaaaggcacctgaaggaatacaagcaggagatggaccttctgctacaggagaagatggcccatgtggaggaactccgactgatccacgctgacatcaatgtgatggaaaacactatcaaacaatctgagaatgacctaaacaagctgctagagtctacaaggaggctgcatgatgagtataagccactgaaagaacatgtggatgccctgcgcatgactctgggcctgcagaggctccctgacttgtgtgaagaagaggagaagctttccttggattactttgagaagcagaaagcagaatggcagacagaacctcaggagccccccatccctgagtccctggccgctgcagccgctgccgcccaacagctccaagtggctaggaagcaggatactcggcagacggccaccttcaggcagcagcccccacctatgaaggcctgcttgtcatgtcaccagcaaattcaccggaatgcacctatatgccctctttgcaaggccaagagtcggtcccggaaccccaaaaagccgaaacggaagcaggatgaataaagaaagggagagcacatgaagctttgctaattataacccctcaccttgaccagagtcattgatgtcctgatgtgaaacaacccttgcccaaccccacgaagtctcctatttaatgtgatggaagcacaacccctctctcactttgctcctatttctttctgctcttgggatttctggtttaggaagagatgtggttcaggtgctaaacagtgtgtctgatgatcccttctctcccactcacatttcaacccctgcccttgtttggagctaagggaagggcaaaaggctcagatatgattctctatctcttgtgcctgaggcctggagcctaaggagctgtagggtctgaggggcaggggaggcccatatcttgtttcaggtaaaggacccagtatttcccctccttgtacttttgccttaggttctcaagggacaatagtcttcatgttggattctccaacaggctgggtgcatgtatccccctactcctaccctcatctcatccttaaggcccagaggtagcttggacaagccctccttttcataatcatttgggaggcatggctgtaattctttagctttctccacttctgtctcccacatatactaaaattcttaggtactaggctgtgtgtcttgggatcttaagatcaatgaacctttccccaatatctagtctttgcaaattctagtagaagatttccacagtgaaatcagtgagccagaccaactctacatctcctgcctaacctactgcctaagtcattagggctgagggctcggctgtaggggcttccttaggctgagagtgcccccaggctgacatctgtgttggcttttgttcagaaccattactctggcacatgctcaatggtatattgcagggaggagaggagtagatttagatttgagtaaatgccaatcactttacacatgaaggtgggtgggactttccttccattcatcccttgctctcttggatctgaactcttctggagcctcagctcaggatagctgctggccactcctgtcctgtggattgtgcaggtggcctttcctcccaaaagaaaaggcatcaggctccccaagccccacagctctcctttccaccaaagccaggtttcctggtaaggtcactcgaagataagggatggggatgggggctgactgacaaaaaattttagccccaggtctcagtacctggctggggagggggatatttttccttccttaagtagttttacattgccacagtgtgtatgtgttcactatataaaatgttcctctgctctttgaaagtaagagtgttgtgtctgtacaaatccttttaacatgcattcattggagtaaattctgagtatctactgtgtattggataatacaaaagatgtaatgtcattt

SEQ ID NO: 436427 - DNA, 2793 bp, Homo sapiens
  misc_feature (7)..(11): n is a, c, g, or t
aggggannnnnagaaacatacggctaggtacgaggctgggtggtcaagcccggaggaggtggctacattgtgtctattgtatcccttggctggtgtatttgtacatctctcgggacgtgaaattgacagtgaaaagtatggcagatgagcaagaaatcatgtgcaaattggaaagcattaaagagatcaggaacaagaccctgcagatggagaagatcaaggctcgtttgaaggctgagtttgaggcacttgagtcagaggaaaggcacctgaaggaatacaagcaggagatggaccttctgctacaggagaagatggcccatgtggaggaactccgactgatccacgctgacatcaatgtgatggaaaacactatcaaacaatctgagaatgacctaaacaagctgctagagtctacaaggaggctgcatgatgagtataagccactgaaagaacatgtggatgccctgcgcatgactctgggcctgcagaggctccctgacttgtgtgaagaagaggagaagctttccttggattactttgagaagcagaaagcagaatggcagacagaacctcaggagccccccatccctgagtccctggccgctgcagccgctgccgcccaacagctccaagtggctaggaagcaggatactcggcagacggccaccttcaggcagcagcccccacctatgaaggcctgcttgtcatgtcaccagcaaattcaccggaatgcacctatatgccctctttgcaaggccaagagtcggtcccggaaccccaaaaagccgaaacggaagcaggatgaataaagaaagggagagcacatgaagctttgctaattataacccctcaccttgaccagagtcattgatgtcctgatgtgaaacaacccttgcccaaccccacgaagtctcctatttaatgtgatggaagcacaacccctctctcactttgctcctatttctttctgctcttgggatttctggtttaggaagagatgtggttcaggtgctaaacagtgtgtctgatgatcccttctctcccactcacatttcaacccctgcccttgtttggagctaagggaagggcaaaaggctcagatatgattctctatctcttgtgcctgaggcctggagcctaaggagctgtagggtctgaggggcaggggaggcccatatcttgtttcaggtaaaggacccagtatttcccctccttgtacttttgccttaggttctcaagggacaatagtcttcatgttggattctccaacaggctgggtgcatgtatccccctactcctaccctcatctcatccttaaggcccagaggtagcttggacaagccctccttttcataatcatttgggaggcatggctgtaattctttagctttctccacttctgtctcccacatatactaaaattcttaggtactaggctgtgtgtcttgggatcttaagatcaatgaacctttccccaatatctagtctttgcaaattctagtagaagatttccacagtgaaatcagtgagccagaccaactctacatctcctgcctaacctactgcctaagtcattagggctgagggctcggctgtaggggcttccttaggctgagagtgcccccaggctgacatctgtgttggcttttgttcagaaccattactctggcacatgctcaatggtatattgcagggaggagaggagtagatttagatttgagtaaatgccaatcactttacacatgaaggtgggtgggactttccttccattcatcccttgctctcttggatctgaactcttctggagcctcagctcaggatagctgctggccactcctgtcctgtggattgtgcaggtggcctttcctcccaaaagaaaaggcatcaggctccccaagccccacagctctcctttccaccaaagccaggtttcctggtaaggtcactcgaagataagggatggggatgggggctgactgacaaaaaattttagccccaggtctcagtacctggctggggagggggatatttttccttccttaagtagttttacattgccacagtgtgtatgtgttcactatataaaatgttcctctgctctttgaaagtaagagtgttgtgtctgtacaaatccttttaacatgcattcattggagtaaattctgagtatctactgtgtattggataatacaaaagatgtaatgtcatttacctttctgggtagctcttgtttgctcttattcattccaccttacaaatgagaaagccaggcaccaaggacaataatttacctaattatcacaataatttccatttatttagcacctactctgtgccaggtacctatgcaagttgcttaatataaatgattgtatttgacttccaaaataccttacaagctaagtattcttatcaccattttaaaaaaaaagggatactgaacctccaaaaacttaaaagctttttcagagttaaacagctagtaagaggaaattgcaggatttggagccagctttgtccaactccagagctcatttttttctacttcttctccatgatcatttttaagaaaacctttctccctttcagaatggcttgatgatgagagtggttgaaataactttggaactgaaatcaagaactgggtgtcaaatgactgattcagggatataaaggccaagggctctctaaataatatcctgtacactaatctgtctctgtgcttgtcagggaattcaacagctaaataaaacctctctgtgcctcagtgtcctcatctggaaaatgggg

SEQ ID NO: 436428 - DNA, 4255 bp, Homo sapiens
cctgaagctccggactacagctcccaggcctctccaagcccctaccgcacaggctcatagccccaagcccggaggaggtggctacattgtgtctattgtatcccttggctggtgtatttgtacatctctcgggacgtgaaattgacagtgaaaagtatggcagatgagcaagaaatcatgtgcaaattggaaagcattaaagagatcaggaacaagaccctgcagatggagaagatcaaggctcgtttgaaggctgagtttgaggcacttgagtcagaggaaaggcacctgaaggaatacaagcaggagatggaccttctgctacaggagaagatggcccatgtggaggaactccgactgatccacgctgacatcaatgtgatggaaaacactatcaaacaatctgagaatgacctaaacaagctgctagagtctacaaggaggctgcatgatgagtataagccactgaaagaacatgtggatgccctgcgcatgactctgggcctgcagaggctccctgacttgtgtgaagaagaggagaagctttccttggagtaagctacctgcccccagtccctacaacataccctccctccgacccacatacatacttacatacctacacacacacgggcaggtatacatacacaaagcctagcctgaaagtcagagtgcctagttttagtcccaggcctttcagtggcttactcactgtgtgatcttgggcaagtctctgtgccagcttgttaaaacagaaggaggattattaaactggatgaattactagatgaattagaacaactactaggtggctttttaaattctttgtgtgatattgacaatacaagactatgtctataactcttaagagatcatttcccaagtcagggtctagaaggcgatatctagaaacctctaaaaacaaaaaagactgagctttcctggtcttcaggaagtggcctgggacttacttcatctcctggctcagagttaagaactaggcttgccttgcagagagacagaatttgacctggtagaggaaatcatttcctaaaggtagagcaaggtgtctgtggagtttgtgagcttcctactcttagagatatgtcaccagaggccttaggacacttaataggaatactcaaaagagcatgagatagcagataggactgaataccctttaaggatcttgctagccctaagatttcttggtcttcttggcctatcagagctaaggacaaagaggattacccttctcatcagacattgggcctagtacccagggacaatagccttgtgcttgggaaggtgtggggaccttctagaatgagccacagctcaacccttggttgtatggcatggagtctttaagaggagcaaggttctcattgctttcagaatgatctagccagtgtctctcatctccaaagttactttgagaagcagaaagcagaatggcagacagaacctcaggagccccccatccctgagtccctggccgctgcagccgctgccgcccaacagctccaagtggctaggaagcaggatactcggcagacggccaccttcaggcagcagcccccacctatgaagaggtaagtgagctgggtaatggttgtggaggaagcaaagtatcctcccatggaagggccgtggaaggctagttctgggtctttggctttatttatgctgggccttcttttaatggcctttgcttgtgacacagtggaaggggtgacatgggtgtgctgtgttggacacacacagcacaggttttgttgccccatgttcccagaggtgttagaatgcagggagattttcaggccctgctagagtgcaattctaaaagttagaaatgactcttacacaaagatgtaatgagcatgtatcataaatgagggaaccagcaggattataaagctggttccaggagcatttggaacaaatatctatatagtcaagaaaggagaggaaggctgaaacaaatttgcaaagttagatgcaaaactggtttacatcccacaggacaataaaactgtaactttatagttactttttcttccaaacagaagtaatttgcatctctactgggcaaaagccatttgcagcttatcagtgtaacatcacagagcctgggtcctaatcaattggtaaatagtcaaacaaagagacattcttctagagcaggggtcatcaaattacagcctacaggtcaaatctaatctgttccctgttttcgttaaagttttattggcccacatgcatgtctgtgtttgcaagctattgcaaacaacatgcatgcaagctattgtctatcacttctttcatgcaaaacagaattgagtagttgcagcaagtttatatgatgtaaaaagtctaaagtatttgctgtcctggcctttacagaaaatgtttgttgacccctgttctagaaaattaaatagtccttaagtgggcctgttagacaatgcttcattataatgacgaaaagatgtgtagttctcattttgccttactttctagttttgtatactttttctcaacaccattctctgaactgggttatgtccttccttcccatcttccatggcatccaagaatacttgagtctactcactgattattgctctcttctgatgggaaatcactttgctttctgggcccctggggaatcagaagtctaagttgttgcctggaagaatctgactactaactttctttttcctgtgtccctcaccaggcctgcttgtcatgtcaccagcaaattcaccggaatgcacctatatgccctctttgcaaggccaagagtcggtcccggaaccccaaaaagccgaaacggaagcaggatgaataaagaaagggagagcacatgaagctttgctaattataacccctcaccttgaccagagtcattgatgtcctgatgtgaaacaacccttgcccaaccccacgaagtctcctatttaatgtgatggaagcacaacccctctctcactttgctcctatttctttctgctcttgggatttctggtttaggaagagatgtggttcaggtgctaaacagtgtgtctgatgatcccttctctcccactcacatttcaacccctgcccttgtttggagctaagggaagggcaaaaggctcagatatgattctctatctcttgtgcctgaggcctggagcctaaggagctgtagggtctgaggggcaggggaggcccatatcttgtttcaggtaaaggacccagtatttcccctccttgtacttttgccttaggttctcaagggacaatagtcttcatgttggattctccaacaggctgggtgcatgtatccccctactcctaccctcatctcatccttaaggcccagaggtagcttggacaagccctccttttcataatcatttgggaggcatggctgtaattctttagctttctccacttctgtctcccacatatactaaaattcttaggtactaggctgtgtgtcttgggatcttaagatcaatgaacctttccccaatatctagtctttgcaaattctagtagaagatttccacagtgaaatcagtgagccagaccaactctacatctcctgcctaacctactgcctaagtcattagggctgagggctcggctgtaggggcttccttaggctgagagtgcccccaggctgacatctgtgttggcttttgttcagaaccattactctggcacatgctcaatggtatattgcagggaggagaggagtagatttagatttgagtaaatgccaatcactttacacatgaaggtgggtgggactttccttccattcatcccttgctctcttggatctgaactcttctggagcctcagctcaggatagctgctggccactcctgtcctgtggattgtgcaggtggcctttcctcccaaaagaaaaggcatcaggctccccaagccccacagctctcctttccaccaaagccaggtttcctggtaaggtcactcgaagataagggatggggatgggggctgactgacaaaaaattttagccccaggtctcagtacctggctggggagggggatatttttccttccttaagtagttttacattgccacagtgtgtatgtgttcactatataaaatgttcctctgctctttgaaagtaagagtgttgtgtctgtacaaatccttttaacatgcattcattggagtaaattctgagtatctactgtgtattggataatacaaaagatgtaatgtcattt

SEQ ID NO: 436429 - DNA, 2672 bp, Homo sapiens
  misc_feature (7)..(11): n is a, c, g, or t
aggggannnnnagaaacatacggctaggtacgaggctgggtggtgtttcctgctttttgcaaattgcaggaacaagaccctgcagatggagaagatcaaggctcgtttgaaggctgagtttgaggcacttgagtcagaggaaaggcacctgaaggaatacaagcaggagatggaccttctgctacaggagaagatggcccatgtggaggaactccgactgatccacgctgacatcaatgtgatggaaaacactatcaaacaatctgagaatgacctaaacaagctgctagagtctacaaggaggctgcatgatgagtataagccactgaaagaacatgtggatgccctgcgcatgactctgggcctgcagaggctccctgacttgtgtgaagaagaggagaagctttccttggattactttgagaagcagaaagcagaatggcagacagaacctcaggagccccccatccctgagtccctggccgctgcagccgctgccgcccaacagctccaagtggctaggaagcaggatactcggcagacggccaccttcaggcagcagcccccacctatgaaggcctgcttgtcatgtcaccagcaaattcaccggaatgcacctatatgccctctttgcaaggccaagagtcggtcccggaaccccaaaaagccgaaacggaagcaggatgaataaagaaagggagagcacatgaagctttgctaattataacccctcaccttgaccagagtcattgatgtcctgatgtgaaacaacccttgcccaaccccacgaagtctcctatttaatgtgatggaagcacaacccctctctcactttgctcctatttctttctgctcttgggatttctggtttaggaagagatgtggttcaggtgctaaacagtgtgtctgatgatcccttctctcccactcacatttcaacccctgcccttgtttggagctaagggaagggcaaaaggctcagatatgattctctatctcttgtgcctgaggcctggagcctaaggagctgtagggtctgaggggcaggggaggcccatatcttgtttcaggtaaaggacccagtatttcccctccttgtacttttgccttaggttctcaagggacaatagtcttcatgttggattctccaacaggctgggtgcatgtatccccctactcctaccctcatctcatccttaaggcccagaggtagcttggacaagccctccttttcataatcatttgggaggcatggctgtaattctttagctttctccacttctgtctcccacatatactaaaattcttaggtactaggctgtgtgtcttgggatcttaagatcaatgaacctttccccaatatctagtctttgcaaattctagtagaagatttccacagtgaaatcagtgagccagaccaactctacatctcctgcctaacctactgcctaagtcattagggctgagggctcggctgtaggggcttccttaggctgagagtgcccccaggctgacatctgtgttggcttttgttcagaaccattactctggcacatgctcaatggtatattgcagggaggagaggagtagatttagatttgagtaaatgccaatcactttacacatgaaggtgggtgggactttccttccattcatcccttgctctcttggatctgaactcttctggagcctcagctcaggatagctgctggccactcctgtcctgtggattgtgcaggtggcctttcctcccaaaagaaaaggcatcaggctccccaagccccacagctctcctttccaccaaagccaggtttcctggtaaggtcactcgaagataagggatggggatgggggctgactgacaaaaaattttagccccaggtctcagtacctggctggggagggggatatttttccttccttaagtagttttacattgccacagtgtgtatgtgttcactatataaaatgttcctctgctctttgaaagtaagagtgttgtgtctgtacaaatccttttaacatgcattcattggagtaaattctgagtatctactgtgtattggataatacaaaagatgtaatgtcatttacctttctgggtagctcttgtttgctcttattcattccaccttacaaatgagaaagccaggcaccaaggacaataatttacctaattatcacaataatttccatttatttagcacctactctgtgccaggtacctatgcaagttgcttaatataaatgattgtatttgacttccaaaataccttacaagctaagtattcttatcaccattttaaaaaaaaagggatactgaacctccaaaaacttaaaagctttttcagagttaaacagctagtaagaggaaattgcaggatttggagccagctttgtccaactccagagctcatttttttctacttcttctccatgatcatttttaagaaaacctttctccctttcagaatggcttgatgatgagagtggttgaaataactttggaactgaaatcaagaactgggtgtcaaatgactgattcagggatataaaggccaagggctctctaaataatatcctgtacactaatctgtctctgtgcttgtcagggaattcaacagctaaataaaacctctctgtgcctcagtgtcctcatctggaaaatgggg

SEQ ID NO: 436430 - DNA, 2079 bp, Homo sapiens
  misc_feature (3)..(3): n is a, c, g, or t
  misc_feature (14)..(14): n is a, c, g, or t
  misc_feature (26)..(26): n is a, c, g, or t
canctaggctagtngaggcccgtgtnaatcggccgaggccaagcccggaggaggtggctacattgtgtctattgtatcccttggctggtgtatttgtacatctctcgggacgtgaaattgacagtgaaaagtatggcagatgagcaagaaatcatgtgcaaattggaaagcattaaagagatcaggaacaagaccctgcagatggagaagatcaaggctcgtttgaaggctgagtttgaggcacttgagtcagaggaaaggcacctgaaggaatacaagcaggagatggaccttctgctacaggagaagatggcccatgtggaggaactccgactgatccacgctgacatcaatgtgatggaaaacactatcaaacaatctgagaatgacctaaacaagctgctagagtctacaaggaggctgcatgatgagtataagccactgaaagaacatgtggatgccctgcgcatgactctgggcctgcagaggctccctgacttgtgtgaagaagaggagaagctttccttggattactttgagaggcagcagcccccacctatgaaggcctgcttgtcatgtcaccagcaaattcaccggaatgcacctatatgccctctttgcaaggccaagagtcggtcccggaaccccaaaaagccgaaacggaagcaggatgaataaagaaagggagagcacatgaagctttgctaattataacccctcaccttgaccagagtcattgatgtcctgatgtgaaacaacccttgcccaaccccacgaagtctcctatttaatgtgatggaagcacaacccctctctcactttgctcctatttctttctgctcttgggatttctggtttaggaagagatgtggttcaggtgctaaacagtgtgtctgatgatcccttctctcccactcacatttcaacccctgcccttgtttggagctaagggaagggcaaaaggctcagatatgattctctatctcttgtgcctgaggcctggagcctaaggagctgtagggtctgaggggcaggggaggcccatatcttgtttcaggtaaaggacccagtatttcccctccttgtacttttgccttaggttctcaagggacaatagtcttcatgttggattctccaacaggctgggtgcatgtatccccctactcctaccctcatctcatccttaaggcccagaggtagcttggacaagccctccttttcataatcatttgggaggcatggctgtaattctttagctttctccacttctgtctcccacatatactaaaattcttaggtactaggctgtgtgtcttgggatcttaagatcaatgaacctttccccaatatctagtctttgcaaattctagtagaagatttccacagtgaaatcagtgagccagaccaactctacatctcctgcctaacctactgcctaagtcattagggctgagggctcggctgtaggggcttccttaggctgagagtgcccccaggctgacatctgtgttggcttttgttcagaaccattactctggcacatgctcaatggtatattgcagggaggagaggagtagatttagatttgagtaaatgccaatcactttacacatgaaggtgggtgggactttccttccattcatcccttgctctcttggatctgaactcttctggagcctcagctcaggatagctgctggccactcctgtcctgtggattgtgcaggtggcctttcctcccaaaagaaaaggcatcaggctccccaagccccacagctctcctttccaccaaagccaggtttcctggtaaggtcactcgaagataagggatggggatgggggctgactgacaaaaaattttagccccaggtctcagtacctggctggggagggggatatttttccttccttaagtagttttacattgccacagtgtgtatgtgttcactatataaaatgttcctctgctctttgaaagtaagagtgttgtgtctgtacaaatccttttaacatgcattcattggagtaaattctgagtatctactgtgtattggataatacaaaagatgtaatgtcattt

SEQ ID NO: 436431 - DNA, 772 bp, Homo sapiens
  misc_feature (3)..(3): n is a, c, g, or t
  misc_feature (14)..(14): n is a, c, g, or t
  misc_feature (26)..(26): n is a, c, g, or t
canctaggctagtngaggcccgtgtnaatcggccgaggcatatctagtctttgcaaattctagtagaagatttccacagtgaaatcagtgagccagaccaactctacatctcctgcctaacctactgcctaagtcattagggctgagggctcggctgtaggggcttccttaggctgagagtgcccccaggctgacatctgtgttggcttttgttcagaaccattactctggcacatgctcaatggtatattgcagggaggagaggagtagatttagatttgagtaaatgccaatcactttacacatgaaggtgggtgggactttccttccattcatcccttgctctcttggatctgaactcttctggagcctcagctcaggatagctgctggccactcctgtcctgtggattgtgcaggtggcctttcctcccaaaagaaaaggcatcaggctccccaagccccacagctctcctttccaccaaagccaggtttcctggtaaggtcactcgaagataagggatggggatgggggctgactgacaaaaaattttagccccaggtctcagtacctggctggggagggggatatttttccttccttaagtagttttacattgccacagtgtgtatgtgttcactatataaaatgttcctctgctctttgaaagtaagagtgttgtgtctgtacaaatccttttaacatgcattcattggagtaaattctgagtatctactgtgtattggataatacaaaagatgtaatgtcattt

SEQ ID NO: 436432 - DNA, 1086 bp, Homo sapiens
actagttctctctctctcgtctctgctgagtttgaggcacttgagtcagaggaaaggcacctgaaggaatacaagcaggagatggaccttctgctacaggagaagatggcccatgtggaggaactccgactgatccacgctgacatcaatgtgatggaaaacactatcaaacaatctgagaatgacctaaacaaccccacagctctcctttccaccaaagccaggtttcctggtaaggtcactcgaagataagggatggggatgggggctgactgacaaaaaattttagccccaggtctcagtacctggctggggagggggatatttttccttccttaagtagttttacattgccacagtgtgtatgtgttcactatataaaatgttcctctgctctttgaaagtaagagtgttgtgtctgtacaaatccttttaacatgcattcattggagtaaattctgagtatctactgtgtattggataatacaaaagatgtaatgtcatttacctttctgggtagctcttgtttgctcttattcattccaccttacaaatgagaaagccaggcaccaaggacaataatttacctaattatcacaataatttccatttatttagcacctactctgtgccaggtacctatgcaagttgcttaatataaatgattgtatttgacttccaaaataccttacaagctaagtattcttatcaccattttaaaaaaaaagggatactgaacctccaaaaacttaaaagctttttcagagttaaacagctagtaagaggaaattgcaggatttggagccagctttgtccaactccagagctcatttttttctacttcttctccatgatcatttttaagaaaacctttctccctttcagaatggcttgatgatgagagtggttgaaataactttggaactgaaatcaagaactgggtgtcaaatgactgattcagggatataaaggccaagggctctctaaataatatcctgtacactaatctgtctctgtgcttgtcagggaattcaacagctaaataaaacctctctgtgcctcagtgtcctcatctggaaaatgggg

SEQ ID NO: 436433 - DNA, 2415 bp, Homo sapiens
actgtgcgcatgcgccccacccctgtcggcgactgctgccaccgctggcgccgctgtcggagctcagaccagcaggcctacgacctagaaagtgctcaaaaccccacttcctaaggcctagaaggagcgacgtgaagatataaggtctcactatgttgcccatgctggtttcaaactcctgggctcaagtgatcctcctgcctctgtcttccaaattgctgagattactggcatgagccattgcacctggccttcttttttgagatggcctcaggttggctctgcctggagagggggaagcttgtaaagatggcttagaaaaaaagtcctggctccatttctattttctcccttcttttgctggcctgtttcctgctttttgcaaattgcaggaacaagaccctgcagatggagaagatcaaggctcgtttgaaggctgagtttgaggcacttgagtcagaggaaaggcacctgaaggaatacaagcaggagatggaccttctgctacaggagaagatggcccatgtggaggaactccgactgatccacgctgacatcaatgtgatggaaaacactatcaaacaatctgagaatgacctaaacaagctgctagagtctacaaggaggctgcatgatgagtataagccactgaaagaacatgtggatgccctgcgcatgactctgggcctgcagaggctccctgacttgtgtgaagaagaggagaagctttccttggattactttgagaagcagaaagcagaatggcagacagaacctcaggagccccccatccctgagtccctggccgctgcagccgctgccgcccaacagctccaagtggctaggaagcaggatactcggcagacggccaccttcaggcagcagcccccacctatgaaggcctgcttgtcatgtcaccagcaaattcaccggaatgcacctatatgccctctttgcaaggccaagagtcggtcccggaaccccaaaaagccgaaacggaagcaggatgaataaagaaagggagagcacatgaagctttgctaattataacccctcaccttgaccagagtcattgatgtcctgatgtgaaacaacccttgcccaaccccacgaagtctcctatttaatgtgatggaagcacaacccctctctcactttgctcctatttctttctgctcttgggatttctggtttaggaagagatgtggttcaggtgctaaacagtgtgtctgatgatcccttctctcccactcacatttcaacccctgcccttgtttggagctaagggaagggcaaaaggctcagatatgattctctatctcttgtgcctgaggcctggagcctaaggagctgtagggtctgaggggcaggggaggcccatatcttgtttcaggtaaaggacccagtatttcccctccttgtacttttgccttaggttctcaagggacaatagtcttcatgttggattctccaacaggctgggtgcatgtatccccctactcctaccctcatctcatccttaaggcccagaggtagcttggacaagccctccttttcataatcatttgggaggcatggctgtaattctttagctttctccacttctgtctcccacatatactaaaattcttaggtactaggctgtgtgtcttgggatcttaagatcaatgaacctttccccaatatctagtctttgcaaattctagtagaagatttccacagtgaaatcagtgagccagaccaactctacatctcctgcctaacctactgcctaagtcattagggctgagggctcggctgtaggggcttccttaggctgagagtgcccccaggctgacatctgtgttggcttttgttcagaaccattactctggcacatgctcaatggtatattgcagggaggagaggagtagatttagatttgagtaaatgccaatcactttacacatgaaggtgggtgggactttccttccattcatcccttgctctcttggatctgaactcttctggagcctcagctcaggatagctgctggccactcctgtcctgtggattgtgcaggtggcctttcctcccaaaagaaaaggcatcaggctccccaagccccacagctctcctttccaccaaagccaggtttcctggtaaggtcactcgaagataagggatggggatgggggctgactgacaaaaaattttagccccaggtctcagtacctggctggggagggggatatttttccttccttaagtagttttacattgccacagtgtgtatgtgttcactatataaaatgttcctctgctctttgaaagtaagagtgttgtgtctgtacaaatccttttaacatgcattcattggagtaaattctgagtatctactgtgtattggataatacaaaagatgtaatgtcattt

SEQ ID NO: 436434 - DNA, 2208 bp, Homo sapiens
  misc_feature (3)..(3): n is a, c, g, or t
  misc_feature (14)..(14): n is a, c, g, or t
  misc_feature (26)..(26): n is a, c, g, or t
canctaggctagtngaggcccgtgtnaatcggccgaggccaagcccggaggaggtggctacattgtgtctattgtatcccttggctggtgtatttgtacatctctcgggacgtgaaattgacagtgaaaagtatggcagatgagcaagaaatcatgtgcaaattggaaagcattaaagagatcaggaacaagaccctgcagatggagaagatcaaggctcgtttgaaggctgagtttgaggcacttgagtcagaggaaaggcacctgaaggaatacaagcaggagatggaccttctgctacaggagaagatggcccatgtggaggaactccgactgatccacgctgacatcaatgtgatggaaaacactatcaaacaatctgagaatgacctaaacaagctgctagagtctacaaggaggctgcatgatgagtataagccactgaaagaacatgtggatgccctgcgcatgactctgggcctgcagaggctccctgacttgtgtgaagaagaggagaagctttccttggattactttgagaagcagaaagcagaatggcagacagaacctcaggagccccccatccctgagtccctggccgctgcagccgctgccgcccaacagctccaagtggctaggaagcaggatactcggcagacggccaccttcaggcagcagcccccacctatgaaggcctgcttgtcatgtcaccagcaaattcaccggaatgcacctatatgccctctttgcaaggccaagagtcggtcccggaaccccaaaaagccgaaacggaagcaggatgaataaagaaagggagagcacatgaagctttgctaattataacccctcaccttgaccagagtcattgatgtcctgatgtgaaacaacccttgcccaaccccacgaagtctcctatttaatgtgatggaagcacaacccctctctcactttgctcctatttctttctgctcttgggatttctggtttaggaagagatgtggttcaggtgctaaacagtgtgtctgatgatcccttctctcccactcacatttcaacccctgcccttgtttggagctaagggaagggcaaaaggctcagatatgattctctatctcttgtgcctgaggcctggagcctaaggagctgtagggtctgaggggcaggggaggcccatatcttgtttcaggtaaaggacccagtatttcccctccttgtacttttgccttaggttctcaagggacaatagtcttcatgttggattctccaacaggctgggtgcatgtatccccctactcctaccctcatctcatccttaaggcccagaggtagcttggacaagccctccttttcataatcatttgggaggcatggctgtaattctttagctttctccacttctgtctcccacatatactaaaattcttaggtactaggctgtgtgtcttgggatcttaagatcaatgaacctttccccaatatctagtctttgcaaattctagtagaagatttccacagtgaaatcagtgagccagaccaactctacatctcctgcctaacctactgcctaagtcattagggctgagggctcggctgtaggggcttccttaggctgagagtgcccccaggctgacatctgtgttggcttttgttcagaaccattactctggcacatgctcaatggtatattgcagggaggagaggagtagatttagatttgagtaaatgccaatcactttacacatgaaggtgggtgggactttccttccattcatcccttgctctcttggatctgaactcttctggagcctcagctcaggatagctgctggccactcctgtcctgtggattgtgcaggtggcctttcctcccaaaagaaaaggcatcaggctccccaagccccacagctctcctttccaccaaagccaggtttcctggtaaggtcactcgaagataagggatggggatgggggctgactgacaaaaaattttagccccaggtctcagtacctggctggggagggggatatttttccttccttaagtagttttacattgccacagtgtgtatgtgttcactatataaaatgttcctctgctctttgaaagtaagagtgttgtgtctgtacaaatccttttaacatgcattcattggagtaaattctgagtatctactgtgtattggataatacaaaagatgtaatgtcattt

SEQ ID NO: 436435 - DNA, 3043 bp, Homo sapiens
  misc_feature (3)..(3): n is a, c, g, or t
  misc_feature (14)..(14): n is a, c, g, or t
  misc_feature (26)..(26): n is a, c, g, or t
canctaggctagtngaggcccgtgtnaatcggccgaggccaagcccggaggaggtggctacattgtgtctattgtatcccttggctggtgtatttgtacatctctcgggacgtgaaattgacagtgaaaagtatggcagatgagcaagaaatcatgtgcaaattggaaagcattaaagagatcagatataaggtctcactatgttgcccatgctggtttcaaactcctgggctcaagtgatcctcctgcctctgtcttccaaattgctgagattactggcatgagccattgcacctggccttcttttttgagatggcctcaggttggctctgcctggagagggggaagcttgtaaagatggcttagaaaaaaagtcctggctccatttctattttctcccttcttttgctggcctgtttcctgctttttgcaaattgcaggaacaagaccctgcagatggagaagatcaaggctcgtttgaaggctgagtttgaggcacttgagtcagaggaaaggcacctgaaggaatacaagcaggagatggaccttctgctacaggagaagatggcccatgtggaggaactccgactgatccacgctgacatcaatgtgatggaaaacactatcaaacaatctgagaatgacctaaacaagctgctagagtctacaaggaggctgcatgatgagtataagccactgaaagaacatgtggatgccctgcgcatgactctgggcctgcagaggctccctgacttgtgtgaagaagaggagaagctttccttggattactttgagaagcagaaagcagaatggcagacagaacctcaggagccccccatccctgagtccctggccgctgcagccgctgccgcccaacagctccaagtggctaggaagcaggatactcggcagacggccaccttcaggcagcagcccccacctatgaaggcctgcttgtcatgtcaccagcaaattcaccggaatgcacctatatgccctctttgcaaggccaagagtcggtcccggaaccccaaaaagccgaaacggaagcaggatgaataaagaaagggagagcacatgaagctttgctaattataacccctcaccttgaccagagtcattgatgtcctgatgtgaaacaacccttgcccaaccccacgaagtctcctatttaatgtgatggaagcacaacccctctctcactttgctcctatttctttctgctcttgggatttctggtttaggaagagatgtggttcaggtgctaaacagtgtgtctgatgatcccttctctcccactcacatttcaacccctgcccttgtttggagctaagggaagggcaaaaggctcagatatgattctctatctcttgtgcctgaggcctggagcctaaggagctgtagggtctgaggggcaggggaggcccatatcttgtttcaggtaaaggacccagtatttcccctccttgtacttttgccttaggttctcaagggacaatagtcttcatgttggattctccaacaggctgggtgcatgtatccccctactcctaccctcatctcatccttaaggcccagaggtagcttggacaagccctccttttcataatcatttgggaggcatggctgtaattctttagctttctccacttctgtctcccacatatactaaaattcttaggtactaggctgtgtgtcttgggatcttaagatcaatgaacctttccccaatatctagtctttgcaaattctagtagaagatttccacagtgaaatcagtgagccagaccaactctacatctcctgcctaacctactgcctaagtcattagggctgagggctcggctgtaggggcttccttaggctgagagtgcccccaggctgacatctgtgttggcttttgttcagaaccattactctggcacatgctcaatggtatattgcagggaggagaggagtagatttagatttgagtaaatgccaatcactttacacatgaaggtgggtgggactttccttccattcatcccttgctctcttggatctgaactcttctggagcctcagctcaggatagctgctggccactcctgtcctgtggattgtgcaggtggcctttcctcccaaaagaaaaggcatcaggctccccaagccccacagctctcctttccaccaaagccaggtttcctggtaaggtcactcgaagataagggatggggatgggggctgactgacaaaaaattttagccccaggtctcagtacctggctggggagggggatatttttccttccttaagtagttttacattgccacagtgtgtatgtgttcactatataaaatgttcctctgctctttgaaagtaagagtgttgtgtctgtacaaatccttttaacatgcattcattggagtaaattctgagtatctactgtgtattggataatacaaaagatgtaatgtcatttacctttctgggtagctcttgtttgctcttattcattccaccttacaaatgagaaagccaggcaccaaggacaataatttacctaattatcacaataatttccatttatttagcacctactctgtgccaggtacctatgcaagttgcttaatataaatgattgtatttgacttccaaaataccttacaagctaagtattcttatcaccattttaaaaaaaaagggatactgaacctccaaaaacttaaaagctttttcagagttaaacagctagtaagaggaaattgcaggatttggagccagctttgtccaactccagagctcatttttttctacttcttctccatgatcatttttaagaaaacctttctccctttcagaatggcttgatgatgagagtggttgaaataactttggaactgaaatcaagaactgggtgtcaaatgactgattcagggatataaaggccaagggctctctaaataatatcctgtacactaatctgtctctgtgcttgtcagggaattcaacagctaaataaaacctctctgtgcctcagtgtcctcatctggaaaatgggg

SEQ ID NO: 436436 - DNA, 2740 bp, Homo sapiens
actgtgcgcatgcgccccacccctgtcggcgactgctgccaccgctggcgccgctgtcggagctcagaccagcaggcctacgacctagaaagtgctcaaaaccccacttcctaaggcctagaaggagcgacgtgaaggaacaagaccctgcagatggagaagatcaaggctcgtttgaaggctgagtttgaggcacttgagtcagaggaaaggcacctgaaggaatacaagcaggagatggaccttctgctacaggagaagatggcccatgtggaggaactccgactgatccacgctgacatcaatgtgatggaaaacactatcaaacaatctgagaatgacctaaacaagctgctagagtctacaaggaggctgcatgatgagtataagccactgaaagaacatgtggatgccctgcgcatgactctgggcctgcagaggctccctgacttgtgtgaagaagaggagaagctttccttggattactttgagaagcagaaagcagaatggcagacagaacctcaggagccccccatccctgagtccctggccgctgcagccgctgccgcccaacagctccaagtggctaggaagcaggatactcggcagacggccaccttcaggcagcagcccccacctatgaaggcctgcttgtcatgtcaccagcaaattcaccggaatgcacctatatgccctctttgcaaggccaagagtcggtcccggaaccccaaaaagccgaaacggaagcaggatgaataaagaaagggagagcacatgaagctttgctaattataacccctcaccttgaccagagtcattgatgtcctgatgtgaaacaacccttgcccaaccccacgaagtctcctatttaatgtgatggaagcacaacccctctctcactttgctcctatttctttctgctcttgggatttctggtttaggaagagatgtggttcaggtgctaaacagtgtgtctgatgatcccttctctcccactcacatttcaacccctgcccttgtttggagctaagggaagggcaaaaggctcagatatgattctctatctcttgtgcctgaggcctggagcctaaggagctgtagggtctgaggggcaggggaggcccatatcttgtttcaggtaaaggacccagtatttcccctccttgtacttttgccttaggttctcaagggacaatagtcttcatgttggattctccaacaggctgggtgcatgtatccccctactcctaccctcatctcatccttaaggcccagaggtagcttggacaagccctccttttcataatcatttgggaggcatggctgtaattctttagctttctccacttctgtctcccacatatactaaaattcttaggtactaggctgtgtgtcttgggatcttaagatcaatgaacctttccccaatatctagtctttgcaaattctagtagaagatttccacagtgaaatcagtgagccagaccaactctacatctcctgcctaacctactgcctaagtcattagggctgagggctcggctgtaggggcttccttaggctgagagtgcccccaggctgacatctgtgttggcttttgttcagaaccattactctggcacatgctcaatggtatattgcagggaggagaggagtagatttagatttgagtaaatgccaatcactttacacatgaaggtgggtgggactttccttccattcatcccttgctctcttggatctgaactcttctggagcctcagctcaggatagctgctggccactcctgtcctgtggattgtgcaggtggcctttcctcccaaaagaaaaggcatcaggctccccaagccccacagctctcctttccaccaaagccaggtttcctggtaaggtcactcgaagataagggatggggatgggggctgactgacaaaaaattttagccccaggtctcagtacctggctggggagggggatatttttccttccttaagtagttttacattgccacagtgtgtatgtgttcactatataaaatgttcctctgctctttgaaagtaagagtgttgtgtctgtacaaatccttttaacatgcattcattggagtaaattctgagtatctactgtgtattggataatacaaaagatgtaatgtcatttacctttctgggtagctcttgtttgctcttattcattccaccttacaaatgagaaagccaggcaccaaggacaataatttacctaattatcacaataatttccatttatttagcacctactctgtgccaggtacctatgcaagttgcttaatataaatgattgtatttgacttccaaaataccttacaagctaagtattcttatcaccattttaaaaaaaaagggatactgaacctccaaaaacttaaaagctttttcagagttaaacagctagtaagaggaaattgcaggatttggagccagctttgtccaactccagagctcatttttttctacttcttctccatgatcatttttaagaaaacctttctccctttcagaatggcttgatgatgagagtggttgaaataactttggaactgaaatcaagaactgggtgtcaaatgactgattcagggatataaaggccaagggctctctaaataatatcctgtacactaatctgtctctgtgcttgtcagggaattcaacagctaaataaaacctctctgtgcctcagtgtcctcatctggaaaatgggg

SEQ ID NO: 436437 - DNA, 2051 bp, Homo sapiens
  misc_feature (7)..(11): n is a, c, g, or t
aggggannnnnagaaacatacggctaggtacgaggctgggtggtcaagcccggaggaggtggctacattgtgtctattgtatcccttggctggtgtatttgtacatctctcgggacgtgaaattgacagtgaaaagtatggcagatgagcaagaaatcatgtgcaaattggaaagcattaaagagatcaggaacaagaccctgcagatggagaagatcaaggctcgtttgaaggctgagtttgaggcacttgagtcagaggaaaggcacctgaaggaatacaagcaggagatggaccttctgctacaggagaagatggcccatgtggaggaactccgactgatccacgctgacatcaatgtgatggaaaacactatcaaacaatctgagaatgacctaaacaagctgctagagtctacaaggaggctgcatgatgagtataagccactgaaagaacatgtggatgccctgcgcatgactctgggcctgcagaggctccctgacttgtgtgaagaagaggagaagctttccttggattactttgagaagcagaaagcagaatggcagacagaacctcaggagccccccatccctgagtccctggccgctgcagccgctgccgcccaacagctccaagtggctaggaagcaggatactcggcagacggccaccttcaggcagcagcccccacctatgaaggcctgcttgtcatgtcaccagcaaattcaccggaatgcacctatatgccctctttgcaaggccaagagtcggtcccggaaccccaaaaagccgaaacggaagcaggatgaataaagaaagggagagcacatgaagctttgctaattataacccctcaccttgaccagagtcattgatgtcctgatgtgaaacaacccttgcccaaccccacgaagtctcctatttaatgtgatggaagcacaacccctctctcactttgctcctatttctttctgctcttgggatttctggtttaggaagagatgtggttcaggtgctaaacagtgtgtctgatgatcccttctctcccactcacatttcaacccctgcccttgtttggagctaagggaagggcaaaaggctcagatatgattctctatctcttgtgcctgaggcctggagcctaaggagctgtagggtctgaggggcaggggaggcccatatcttgtttcaggtaaaggacccagtatttcccctccttgtacttttgccttaggttctcaagggacaatagtcttcatgttggattctccaacaggctgggtgcatgtatccccctactcctaccctcatctcatccttaaggcccagaggtagcttggacaagccctccttttcataatcatttgggaggcatggctgtaattctttagctttctccacttctgtctcccacatatactaaaattcttaggtactaggctgtgtgtcttgggatcttaagatcaatgaacctttccccaatatctagtctttgcaaattctagtagaagatttccacagtgaaatcagtgagccagaccaactctacatctcctgcctaacctactgcctaagtcattagggctgagggctcggctgtaggggcttccttaggctgagagtgcccccaggctgacatctgtgttggcttttgttcagaaccattactctggcacatgctcaatggtatattgcagggaggagaggagtagatttagatttgagtaaatgccaatcactttacacatgaaggtgggtgggactttccttccattcatcccttgctctcttggatctgaactcttctggagcctcagctcaggatagctgctggccactcctgtcctgtggattgtgcaggtggcctttcctcccaaaagaaaaggcatcaggctccccaagccccacagctctcctttccaccaaagccaggtttcctggtaaggtcactcgaagataagggatgggatgaaagcactcgatatgaatcatatccagcgccttcatgccgtggtaaattgcttttgtaagttgtattgggggtaccgagct

SEQ ID NO: 436438 - DNA, 3387 bp, Homo sapiens
agcacagctgcaccgccgagctgcgagcggctgcgagcgagagagcgtaagagcaagagagctagagagcgagcaacgggcactcgccccacgcctcccctcagccccaccgcgcgctccgcttgcctctccaccccgcccgactctacccggcccggtccctgcgcgggcacagcccagagctctggggcggtgcaggcagcctcgggactctccggcgcgccgccgcgtccccagacaaaggcttggccggcggccccggcccgctgcgccctcgctccccgcctccccagctcttctccgctcttcccccccgcgcttggctcggcgcgctccggccggccgcaaagtttcccgggcggcagcggcggctgcgcctcgcttcagcgatggccgcggagctgagcatggggccagagctgcccaccagcccgctggccatggagtatgtcaacgacttcgacctgctcaagttcgacgtgaagaaggagccactggggcgcgcggagcgtccgggcaggccctgcacacgcctgcagccagccggctcggtgtcctccacaccgctcagcactccgtgtagctccgtgccctcgtcgcccagcttcagcccgaccgaacagaagacacacctcgaggatctgtactggatggcgagcaactaccagcagatgaaccccgaggcgctcaacctgacgcccgaggacgcggtggaagcgctcatcggctcgcacccagtgccacagccgctgcaaagcttcgacagctttcgcggcgctcaccaccaccaccatcaccaccaccctcacccgcaccacgcgtacccgggcgccggcgtggcccacgacgagctgggcccgcacgctcacccgcaccatcaccatcatcaccaagcgtcgccgccgccgtccagcgccgctagcccggcgcaacagctgcccactagccaccccgggcccgggccgcacgcgacggcctcggcgacggcggcgggcggcaacggcagcgtggaggaccgcttctccgacgaccagctcgtgtccatgtccgtgcgcgagctgaaccgccacctgcggggcttcaccaaggacgaggtgatccgcctgaagcagaagcggcggaccctgaagaaccggggctacgcccagtcttgcaggtataaacgcgtccagcagaagcaccacctggagaatgagaagacgcagctcattcagcaggtggagcagcttaagcaggaggtgtcccggctggcccgcgagagagacgcctacaaggtcaagtgcgagaaactcgccaactccggcttcagggaggcgggctccaccagcgacagcccctcctctcccgagttctttctgtgagtcgtggccggtcctggcccccgcccttgccccggcccggactccctgtcccacgtccctagtcccagactaccccggaccctgtccctgccgcggccccagccttgacctgtttgacttgagcgagagggaggaagggcgcgcgggccgcgggcgacgggcgggtgcgcgggcgggcaggggaccttggctaaggcgagagtagcgcacgccagcgccgcctcctagactcgagcagagccggagagagagacgagagggtgggaggtcccggagtaacttctctccaggctgaagggcggcgaggcatagtcccgagaagtcaccaaggccatctggagactcctggctttctgaactttgcgcgttaagccgggacagctgctttgctgcccggagagtagtccgcgccaggaagagagcaacgaggaaaggagagggactctggcgtcccggcaggcgagaggcgaggctgagcgaaagaaggaaggacagacggacctgtctgtcagagttcggagaacactggctctcagccctgagacacaggcctcagttaggacgctcggcgcccaaatctcatcagttttattgcctgctcgattatatagaaaaatacaaaaaatctgcattaaaaatattaatcctgcatgctggacatgtatggtaataatttctattttgtaccattttcttgtttaactttagcatgttgttgatcatggatcatactccccttgtttctttgggtgagaagggatcgcagtttggaaactccggcggctgcgtgcggggtttcagtcccagctgtaggcttgtaaatacccgccccgccaaaccgcatagagaacgtggcagcaagctgagggtctttgtttgggtttattattacggtatttttgtttgtaagttaaaaagaaaaaaaaaaagaaaaagttccgggcattttgcatcagaaaacaactttgtcttggggcacacttggaagttgcatgttttctttccttcccttatccccattcggtcctctttttcctctctcgctttagttttcaaccttgttggtgctgagagagagaaccgagaggtcccagtacaagggcagggcagggcagggaagctgccaagctccgcaccccagaggagtgttctggactacagccttgtcttatggtcaaattgatacccttaataagaaaggaaaggaaaggaaaacagatcctcccctctgctttttattgtaaccagaatcaccctgaggtcccttctgaaccctctgggcctgcgctaattgtaggagccacagcgctcctagggtgagaggcttagccatccctgaccctggcagtgcactggtaagcagacactgcactgaaccaactgctatgctcagaatgtaccagaaacccaaacattggcaagtaattttgcaactttcaagtgcgttctttagaccaatgcattgcgtttctttccctgcttttgagatagtaggaagagttcttggtggtgtccccccccttcaattcttcagttgtatagtagttatagggaagatatgggtgtttttctttattattacttttttttttctgcaggtcagtaaaaggatttaagttgcactgacaaaaataccaaaataaaagtgtatttttaagttcccatttgaaattgctggcgctgctggccggatgcatttttgagtttgtattagttgataaattaacagtaataacaagattgtatgaaccgcatggtgcttgcagttttaaatattgtggatatttgtcctgcatcagaaacgagctttggtttttacagattcaactgtgttgaaatcaaacctgccgcaacagaaattgtttttatttcatgtaaaataagggatcaatttcaaaccctgcttatgatatgaaaatattaaaacctagtctattgtagttttattcagactggtttctgttttttggttattaaaatggtttcctattttgcttattaaaaccatggaaatggtgtttattta

SEQ ID NO: 436439 - DNA, 3254 bp, Homo sapiens
agcacagctgcaccgccgagctgcgagcggctgcgagcgagagagcgtaagagcaagagagctagagagcgagcaacgggcactcgccccacgcctcccctcagccccaccgcgcgctccgcttgcctctccaccccgcccgactctacccggcccggtccctgcgcgggcacagcccagagctctggggcggtgcaggcagcctcgggactctccggcgcgccgccgcgtccccagacaaaggcttggccggcggccccggcccgctgcgccctcgctccccgcctccccagctcttctccgctcttcccccccgcgcttggctcggcgcgctccggccggccgcaaagtttcccgggcggcagcggcggctgcgcctcgcttcagcgatggccgcggagctgagcatggggccagagctgcccaccagcccgctggccatggagtatgtcaacgacttcgacctgctcaagttcgacgtgaagaaggagccactggggcgcgcggagcgtccgggcaggccctgcacacgcctgcagccagccggctcggtgtcctccacaccgctcagcactccgtgtagctccgtgccctcgtcgcccagcttcagcccgaccgaacagaagacacacctcgaggatctgtactggatggcgagcaactaccagcagatgaaccccgaggcgctcaacctgacgcccgaggacgcggtggaagcgctcatcggctcgcacccagtgccacagccgctgcaaagcttcgacagctttcgcggcgctcaccaccaccaccatcaccaccaccctcacccgcaccacgcgtacccgggcgccggcgtggcccacgacgagctgggcccgcacgctcacccgcaccatcaccatcatcaccaagcgtcgccgccgccgtccagcgccgctagcccggcgcaacagctgcccactagccaccccgggcccgggccgcacgcgacggcctcggcgacggcggcgggcggcaacggcagcgtggaggaccgcttctccgacgaccagctcgtgtccatgtccgtgcgcgagctgaaccgccacctgcggggcttcaccaaggacgaggtgatccgcctgaagcagaagcggcggaccctgaagaaccggggctacgcccagtcttgcaggtataaacgcgtccagcagaagcaccacctggagaatgagaagacgcagctcattcagcaggtggagcagcttaagcaggaggtgtcccggctggcccgcgagagagacgcctacaaggtcaagtgcgagaaactcgccaactccggcttcagggaggcgggctccaccagcgacagcccctcctctcccgagttctttctgtgagtcgtggccggtcctggccccagccttgacctgtttgacttgagcgagagggaggaagggcgcgcgggccgcgggcgacgggcgggtgcgcgggcgggcaggggaccttggctaaggcgagagtagcgcacgccagcgccgcctcctagactcgagcagagccggagagagagacgagagggtgggaggtcccggagtaacttctctccaggctgaagggcggcgaggcatagtcccgagaagtcaccaaggccatctggagactcctggctttctgaactttgcgcgttaagccgggacagctgctttgctgcccggagagtagtccgcgccaggaagagagcaacgaggaaaggagagggactctggcgtcccggcaggcgagaggcgaggctgagcgaaagaaggaaggacagacggacctgtctgtcagagttcggagaacactggctctcagccctgagacacaggcctcagttaggacgctcggcgcccaaatctcatcagttttattgcctgctcgattatatagaaaaatacaaaaaatctgcattaaaaatattaatcctgcatgctggacatgtatggtaataatttctattttgtaccattttcttgtttaactttagcatgttgttgatcatggatcatactccccttgtttctttgggtgagaagggatcgcagtttggaaactccggcggctgcgtgcggggtttcagtcccagctgtaggcttgtaaatacccgccccgccaaaccgcatagagaacgtggcagcaagctgagggtctttgtttgggtttattattacggtatttttgtttgtaagttaaaaagaaaaaaaaaaagaaaaagttccgggcattttgcatcagaaaacaactttgtcttggggcacacttggaagttgcatgttttctttccttcccttatccccattcggtcctctttttcctctctcgctttagttttcaaccttgttggtgctgagagagagaaccgagaggtcccagtacaagggcagggcagggcagggaagctgccaagctccgcaccccagaggagtgttctggactacagccttgtcttatggtcaaattgatacccttaataagaaaggaaaggaaaggttctgaaccctctgggcctgcgctaattgtaggagccacagcgctcctagggtgagaggcttagccatccctgaccctggcagtgcactggtaagcagacactgcactgaaccaactgctatgctcagaatgtaccagaaacccaaacattggcaagtaattttgcaactttcaagtgcgttctttagaccaatgcattgcgtttctttccctgcttttgagatagtaggaagagttcttggtggtgtccccccccttcaattcttcagttgtatagtagttatagggaagatatgggtgtttttctttattattacttttttttttctgcaggtcagtaaaaggatttaagttgcactgacaaaaataccaaaataaaagtgtatttttaagttcccatttgaaattgctggcgctgctggccggatgcatttttgagtttgtattagttgataaattaacagtaataacaagattgtatgaaccgcatggtgcttgcagttttaaatattgtggatatttgtcctgcatcagaaacgagctttggtttttacagattcaactgtgttgaaatcaaacctgccgcaacagaaattgtttttatttcatgtaaaataagggatcaatttcaaaccctgcttatgatatgaaaatattaaaacctagtctattgtagttttattcagactggtttctgttttttggttattaaaatggtttcctattttgcttattaaaaccatggaaatggtgtttattta

SEQ ID NO: 436440 - DNA, 3308 bp, Homo sapiens
agcacagctgcaccgccgagctgcgagcggctgcgagcgagagagcgtaagagcaagagagctagagagcgagcaacgggcactcgccccacgcctcccctcagccccaccgcgcgctccgcttgcctctccaccccgcccgactctacccggcccggtccctgcgcgggcacagcccagagctctggggcggtgcaggcagcctcgggactctccggcgcgccgccgcgtccccagacaaaggcttggccggcggccccggcccgctgcgccctcgctccccgcctccccagctcttctccgctcttcccccccgcgcttggctcggcgcgctccggccggccgcaaagtttcccgggcggcagcggcggctgcgcctcgcttcagcgatggccgcggagctgagcatggggccagagctgcccaccagcccgctggccatggagtatgtcaacgacttcgacctgctcaagttcgacgtgaagaaggagccactggggcgcgcggagcgtccgggcaggccctgcacacgcctgcagccagccggctcggtgtcctccacaccgctcagcactccgtgtagctccgtgccctcgtcgcccagcttcagcccgaccgaacagaagacacacctcgaggatctgtactggatggcgagcaactaccagcagatgaaccccgaggcgctcaacctgacgcccgaggacgcggtggaagcgctcatcggctcgcacccagtgccacagccgctgcaaagcttcgacagctttcgcggcgctcaccaccaccaccatcaccaccaccctcacccgcaccacgcgtacccgggcgccggcgtggcccacgacgagctgggcccgcacgctcacccgcaccatcaccatcatcaccaagcgtcgccgccgccgtccagcgccgctagcccggcgcaacagctgcccactagccaccccgggcccgggccgcacgcgacggcctcggcgacggcggcgggcggcaacggcagcgtggaggaccgcttctccgacgaccagctcgtgtccatgtccgtgcgcgagctgaaccgccacctgcggggcttcaccaaggacgaggtgatccgcctgaagcagaagcggcggaccctgaagaaccggggctacgcccagtcttgcaggtataaacgcgtccagcagaagcaccacctggagaatgagaagacgcagctcattcagcaggtggagcagcttaagcaggaggtgtcccggctggcccgcgagagagacgcctacaaggtcaagtgcgagaaactcgccaactccggcttcagggaggcgggctccaccagcgacagcccctcctctcccgagttctttctgtgagtcgtggccggtcctggccccagccttgacctgtttgacttgagcgagagggaggaagggcgcgcgggccgcgggcgacgggcgggtgcgcgggcgggcaggggaccttggctaaggcgagagtagcgcacgccagcgccgcctcctagactcgagcagagccggagagagagacgagagggtgggaggtcccggagtaacttctctccaggctgaagggcggcgaggcatagtcccgagaagtcaccaaggccatctggagactcctggctttctgaactttgcgcgttaagccgggacagctgctttgctgcccggagagtagtccgcgccaggaagagagcaacgaggaaaggagagggactctggcgtcccggcaggcgagaggcgaggctgagcgaaagaaggaaggacagacggacctgtctgtcagagttcggagaacactggctctcagccctgagacacaggcctcagttaggacgctcggcgcccaaatctcatcagttttattgcctgctcgattatatagaaaaatacaaaaaatctgcattaaaaatattaatcctgcatgctggacatgtatggtaataatttctattttgtaccattttcttgtttaactttagcatgttgttgatcatggatcatactccccttgtttctttgggtgagaagggatcgcagtttggaaactccggcggctgcgtgcggggtttcagtcccagctgtaggcttgtaaatacccgccccgccaaaccgcatagagaacgtggcagcaagctgagggtctttgtttgggtttattattacggtatttttgtttgtaagttaaaaagaaaaaaaaaaagaaaaagttccgggcattttgcatcagaaaacaactttgtcttggggcacacttggaagttgcatgttttctttccttcccttatccccattcggtcctctttttcctctctcgctttagttttcaaccttgttggtgctgagagagagaaccgagaggtcccagtacaagggcagggcagggcagggaagctgccaagctccgcaccccagaggagtgttctggactacagccttgtcttatggtcaaattgatacccttaataagaaaggaaaggaaaggaaaacagatcctcccctctgctttttattgtaaccagaatcaccctgaggtcccttctgaaccctctgggcctgcgctaattgtaggagccacagcgctcctagggtgagaggcttagccatccctgaccctggcagtgcactggtaagcagacactgcactgaaccaactgctatgctcagaatgtaccagaaacccaaacattggcaagtaattttgcaactttcaagtgcgttctttagaccaatgcattgcgtttctttccctgcttttgagatagtaggaagagttcttggtggtgtccccccccttcaattcttcagttgtatagtagttatagggaagatatgggtgtttttctttattattacttttttttttctgcaggtcagtaaaaggatttaagttgcactgacaaaaataccaaaataaaagtgtatttttaagttcccatttgaaattgctggcgctgctggccggatgcatttttgagtttgtattagttgataaattaacagtaataacaagattgtatgaaccgcatggtgcttgcagttttaaatattgtggatatttgtcctgcatcagaaacgagctttggtttttacagattcaactgtgttgaaatcaaacctgccgcaacagaaattgtttttatttcatgtaaaataagggatcaatttcaaaccctgcttatgatatgaaaatattaaaacctagtctattgtagttttattcagactggtttctgttttttggttattaaaatggtttcctattttgcttattaaaaccatggaaatggtgtttattta

SEQ ID NO: 436441 - DNA, 2939 bp, Homo sapiens
ctcggtgtctccacaccgctcagcactccgtgtatgctccgtgcctggctggctgcaggagcgtccgggcaggccctgcacacgcctgcagccagccggctcggtgtcctccacaccgctcagcactccgtgtagctccgtgccctcgtcgcccagcttcagcccgaccgaacagaagacacacctcgaggatctgtactggatggcgagcaactaccagcagatgaaccccgaggcgctcaacctgacgcccgaggacgcggtggaagcgctcatcggctcgcacccagtgccacagccgctgcaaagcttcgacagctttcgcggcgctcaccaccaccaccatcaccaccaccctcacccgcaccacgcgtacccgggcgccggcgtggcccacgacgagctgggcccgcacgctcacccgcaccatcaccatcatcaccaagcgtcgccgccgccgtccagcgccgctagcccggcgcaacagctgcccactagccaccccgggcccgggccgcacgcgacggcctcggcgacggcggcgggcggcaacggcagcgtggaggaccgcttctccgacgaccagctcgtgtccatgtccgtgcgcgagctgaaccgccacctgcggggcttcaccaaggacgaggtgatccgcctgaagcagaagcggcggaccctgaagaaccggggctacgcccagtcttgcaggtataaacgcgtccagcagaagcaccacctggagaatgagaagacgcagctcattcagcaggtggagcagcttaagcaggaggtgtcccggctggcccgcgagagagacgcctacaaggtcaagtgcgagaaactcgccaactccggcttcagggaggcgggctccaccagcgacagcccctcctctcccgagttctttctgtgagtcgtggccggtcctggcccccgcccttgccccggcccggactccctgtcccacgtccctagtcccagactaccccggaccctgtccctgccgcggccccagccttgacctgtttgacttgagcgagagggaggaagggcgcgcgggccgcgggcgacgggcgggtgcgcgggcgggcaggggaccttggctaaggcgagagtagcgcacgccagcgccgcctcctagactcgagcagagccggagagagagacgagagggtgggaggtcccggagtaacttctctccaggctgaagggcggcgaggcatagtcccgagaagtcaccaaggccatctggagactcctggctttctgaactttgcgcgttaagccgggacagctgctttgctgcccggagagtagtccgcgccaggaagagagcaacgaggaaaggagagggactctggcgtcccggcaggcgagaggcgaggctgagcgaaagaaggaaggacagacggacctgtctgtcagagttcggagaacactggctctcagccctgagacacaggcctcagttaggacgctcggcgcccaaatctcatcagttttattgcctgctcgattatatagaaaaatacaaaaaatctgcattaaaaatattaatcctgcatgctggacatgtatggtaataatttctattttgtaccattttcttgtttaactttagcatgttgttgatcatggatcatactccccttgtttctttgggtgagaagggatcgcagtttggaaactccggcggctgcgtgcggggtttcagtcccagctgtaggcttgtaaatacccgccccgccaaaccgcatagagaacgtggcagcaagctgagggtctttgtttgggtttattattacggtatttttgtttgtaagttaaaaagaaaaaaaaaaagaaaaagttccgggcattttgcatcagaaaacaactttgtcttggggcacacttggaagttgcatgttttctttccttcccttatccccattcggtcctctttttcctctctcgctttagttttcaaccttgttggtgctgagagagagaaccgagaggtcccagtacaagggcagggcagggcagggaagctgccaagctccgcaccccagaggagtgttctggactacagccttgtcttatggtcaaattgatacccttaataagaaaggaaaggaaaggaaaacagatcctcccctctgctttttattgtaaccagaatcaccctgaggtcccttctgaaccctctgggcctgcgctaattgtaggagccacagcgctcctagggtgagaggcttagccatccctgaccctggcagtgcactggtaagcagacactgcactgaaccaactgctatgctcagaatgtaccagaaacccaaacattggcaagtaattttgcaactttcaagtgcgttctttagaccaatgcattgcgtttctttccctgcttttgagatagtaggaagagttcttggtggtgtccccccccttcaattcttcagttgtatagtagttatagggaagatatgggtgtttttctttattattacttttttttttctgcaggtcagtaaaaggatttaagttgcactgacaaaaataccaaaataaaagtgtatttttaagttcccatttgaaattgctggcgctgctggccggatgcatttttgagtttgtattagttgataaattaacagtaataacaagattgtatgaaccgcatggtgcttgcagttttaaatattgtggatatttgtcctgcatcagaaacgagctttggtttttacagattcaactgtgttgaaatcaaacctgccgcaacagaaattgtttttatttcatgtaaaataagggatcaatttcaaaccctgcttatgatatgaaaatattaaaacctagtctattgtagttttattcagactggtttctgttttttggttattaaaatggtttcctattttgcttattaaaaccatggaaatggtgtttattta

SEQ ID NO: 436442 - DNA, 1708 bp, Homo sapiens
gatcccgcccccctcggagcgcccctgtggtctgacttcagcagcactttccggcaggagactgggcactcgctgtcacccgcgagctgcctccctcagcgagatctgagcatctttccggaggctaacagacctgggcttcggggtgaccactgtgcttgcctcagtttccttttctggagcaggggaaggcccggctccctgcccaaaggcggctgtgcgctaagtggcagacgctcggggagagccggcgcggggcggaccccagcgccagtagtgacaggggcgaacgccgccgggagactccagccggcgggcgagcaggcctgtcgttgctggtggcggcatggtcttctgtctgtcgagcgaggagccgcgccgcccgctgcgaagcgacatggtccacttccaggcctcggaagtccagcagctgctacacaacaagttcgtggtcatcttgggggactccattcagagggctgtgtacaaggacctggtgctcttgctccagaaagactcactgctcacagctgcccagctgaaagccaagagtaccttgaggatgttctggaagagctgacatatggacctgccccggacctggtgatcatcaactcctgcctctgggatctctccagatatggtcgctgctcaatggagagctaccgggagaacctggagcgggtgtttgtgcgcatggaccaagtattgccagactcctgcctgctggtgtggaacatggcgatgcccctcggggaacgtatcactgggggtttcctcctgccagagctccagcccctggcaggctccctgcggcgggatgtggttgaagggaacttctacagtgctacgctggccggggaccactgctttgatgtcctagacctccactttcacttccggcatgcagtacagcaccgtcatcgggatggtgtccactgggaccagcatgcacaccgccacctctcacacctgcttctgacccatgtggctgacgcctggggcgtggagctgcccaagcgtggctatccccctgacccgtggattgaggactgggcagagatgaatcatccattccagggaagccataggcagaccccagacttcggggagcacctggccttgctcccacccccaccttcttctttgcctcctcccatgccttttccctacccgcttcctcagccctcgccacctcccctcttcccacccctgccccaggataccccttttttcccaggccagcccttcccaccccatgaattcttcaactataatccagtggaggacttctcgatgccaccccacttaggatgtggccctggagtgaactttgtgcctggccctctgccacctccaatccctggccctaatccccatggtcagcactggggcccagtggtccaccgggggatgccacgctatgttcctaacagcccctaccatgtgcggagaatgggggggccctgcaggcagcggctcagacactcagagagactgatccacacatacaaactggacagacggcctcctgcccattcggggacatggcctgggtagactggatcttgggctgggactggatgtgccaatggcccttcagggcctgcctggcacctcaggtactgggctagggtgtctgctatgcctggtattgttcttgtccattgctgtcaccaataaaggcatggaagaacagagtgacaaa

SEQ ID NO: 436443 - DNA, 486 bp, Homo sapiens
ctctctctgtggggccaggaatctatggggctgggtttctaccatctccagctggctgagaagtagcagccaaacaggagctagttcttgcaaaagtgggggctgtctcaggactcctcttttccaacaatatccataccttcctcactcctcagtcccagactcaggccctggaggttttggaagagcccctccgacgctctcaatgggggggccctgcaggcagcggctcagacactcagagagactgatccacacatccgtactggcccggacgctctctctgtgggggaagctctctctgtgggggacgctctctctgtggggggaaagagaaggaccctgcttgaccgcgacaggtccccttgtatcctgttccctctccatcttattttctccacagtgctctagggcagctgtggagccaatgatgaaaaccacatgtttctggcagccctgctgtgcaccagtgcccccacagagaga

SEQ ID NO: 436444 - DNA, 2008 bp, Homo sapiens
cacgtggcgaggccgccgccgcggccatcaccactgtgggcagcctcacttggctgccgccccgagaccccagcccgtacctgggcttcgcgcccgccaagtgggcccagccctggctcctgcgccctgtggcggccacctccatcgccttgctttcccttcgggcactgggggtcgctcagggcgggacatgggtgaacggaagtggaagctgtgagcgtcgcagcccgaggcgccgaggcctgaggcgccgtcggggccaccgcgacgctcgcatggagagcgctgggcgctgggctgtgcaccgacggctaacctggacccacggtctctgcggggcgggagctttgcagaaccgactggccgactggggcgcgggaacatgaggcttggctaggagcccgctgcgggccaggcgcgcggtgcgcaggcatacccgggtcgcgggtgaacaccgcggagccccgggacttgcctgtcgttgctggtggcggcatggtcttctgtctgtcgagcgaggagccgcgccgcccgctgcgaagcgacatggtccacttccaggcctcggaagtccagcagctgctacacaacaagttcgtggtcatcttgggggactccattcagagggctgtgtacaaggacctggtgctcttgctccagaaagactcactgctcacagctgcccagctgaaagccaagggggagctgagctttgaacaggaccagctggtggctgggggccagctgggcgagctgcacaacgggacacagtatcgtgaggtccgccagttctgctcgggctctggccaccaccttgtgcgcttctacttcctcactcgtgtttactccgagtaccttgaggatgttctggaagagctgacatatggacctgccccggacctggtgatcatcaactcctgcctctgggatctctccagatatggtcgctgctcaatggagagctaccgggagaacctggagcgggtgtttgtgcgcatggaccaagtattgccagactcctgcctgctggtgtggaacatggcgatgcccctcggggaacgtatcactgggggtttcctcctgccagagctccagcccctggcaggctccctgcggcgggatgtggttgaagggaacttctacagtgctacgctggccggggaccactgctttgatgtcctagacctccactttcacttccggcatgcagtacagcaccgtcatcgggatggtgtccactgggaccagcatgcacaccgccacctctcacacctgcttctgacccatgtggctgacgcctggggcgtggagctgcccaagcgtggctatccccctgacccgtggattgaggactgggcagagatgaatcatccattccagggaagccataggcagaccccagacttcggggagcacctggccttgctcccacccccaccttcttctttgcctcctcccatgccttttccctacccgcttcctcagccctcgccacctcccctcttcccacccctgccccaggataccccttttttcccaggccagcccttcccaccccatgaattcttcaactataatccagtggaggacttctcgatgccaccccacttaggatgtggccctggagtgaactttgtgcctggccctctgccacctccaatccctggccctaatccccatggtcagcactggggcccagtggtccaccgggggatgccacgctatgttcctaacagcccctaccatgtgcggagaatgggggggccctgcaggcagcggctcagacactcagagagactgatccacacatacaaactggacagacggcctcctgcccattcggggacatggcctgggtagactggatcttgggctgggactggatgtgccaatggcccttcagggcctgcctggcacctcaggtactgggctagggtgtctgctatgcctggtattgttcttgtccattgctgtcaccaataaaggcatggaagaacagagtgacaaa

SEQ ID NO: 436445 - DNA, 2337 bp, Homo sapiens
cacgtggcgaggccgccgccgcggccatcaccactgtgggcagcctcacttggctgccgccccgagaccccagcccgtacctgggcttcgcgcccgccaagtgggcccagccctggctcctgcgccctgtggcggccacctccatcgccttgctttcccttcgggcactgggggtcgctcagggcgggacatgggtgaacggaagtggaagctgtgagcgtcgcagcccgaggcgccgaggcctgaggcgccgtcggggccaccgcgacgctcgcatggagagcgctgggcgctgggctgtgcaccgacggctaacctggacccacggtctctgcggggcgggagctttgcagaaccgactggccgactggggcgcgggaacatgaggcttggctaggagcccgctgcgggccaggcgcgcggtgcgcaggcatacccgggtcgcgggtgaacaccgcggagccccgggacttgcctgtcgttgctggtggcggcatggtcttctgtctgtcgagcgaggagccgcgccgcccgctgcgaagcgacatggtccacttccaggcctcggaagtccagcagctgctacacaacaagttcgtggtcatcttgggggactccattcagagggctgtgtacaaggacctggtgctcttgctccagaaagactcactgctcacagctgcccagctgaaagccaagggggagctgagctttgaacaggaccagctggtggctgggggccagctgggcgagctgcacaacgggacacagtatcgtgaggtccgccagttctgctcgggctctggccaccaccttgtgcgcttctacttcctcactcgtgtttactccgagtaccttgaggatgttctggaagagctgacatatggacctgccccggacctggtgatcatcaactcctgcctctgggatctctccagatatggtcgctgctcaatggagagctaccgggagaacctggagcgggtgtttgtgcgcatggaccaagtattgccagactcctgcctgctggtgtggaacatggcgatgcccctcggggaacgtatcactgggggtttcctcctgccagagctccagcccctggcaggctccctgcggcgggatgtggttgaagggaacttctacagtgctacgctggccggggaccactgctttgatgtcctagacctccactttcacttccggcatgcagtacagcaccgtcatcgggatggtgtccactgggaccagcatgcacaccgccacctctcacacctgcttctgacccatgtggctgacgcctggggcgtggagctgcccaagcgtggctatccccctgacccgtggattgaggactgggcagagatgaatcatccattccagggaagccataggcagaccccagacttcggggagcacctggccttgctcccacccccaccttcttctttgcctcctcccatgccttttccctacccgcttcctcagccctcgccacctcccctcttcccacccctgccccaggataccccttttttcccaggccagcccttcccaccccatgaattcttcaactataatccagtggaggacttctcgatgccaccccacttaggtaggtgcttctgcagctcccccaccctcttgtacctccccttacccagcctcctatgcctaggtgagctgagaggagttgggtagctccttgtgcccctagcactgggtttggtcacagcagtccctgagtctgaaacatcatctgtaggttcattaatcagctcactggttgtcactgtttcaccgtctgaaggtaggggaaggactatcccttttttgtagatagggaaacagagaagctcacctggaggacaagagttgcttcaaggcagagctgcactcactctggccagaagcctgctcttataatgactggttcttttgtaggatgtggccctggagtgaactttgtgcctggccctctgccacctccaatccctggccctaatccccatggtcagcactggggcccagtggtccaccgggggatgccacgctatgttcctaacagcccctaccatgtgcggagaatgggggggccctgcaggcagcggctcagacactcagagagactgatccacacatacaaactggacagacggcctcctgcccattcggggacatggcctgggtagactggatcttgggctgggactggatgtgccaatggcccttcagggcctgcctggcacctcaggtactgggctagggtgtctgctatgcctggtattgttcttgtccattgctgtcaccaataaaggcatggaagaacagagtgacaaa

SEQ ID NO: 436446 - DNA, 1859 bp, Homo sapiens
gatcccgcccccctcggagcgcccctgtggtctgacttcagcagcactttccggcaggagactgggcactcgctgtcacccgcgagctgcctccctcagcgagatctgagcatctttccggaggctaacagacctgggcttcggggtgaccactgtgcttgcctcagtttccttttctggagcaggggaaggcccggctccctgcccaaaggcggctgtgcgctaagtggcagacgctcggggagagccggcgcggggcggaccccagcgccagtagtgacaggggcgaacgccgccgggagactccagccggcgggcgagcaggcctgtcgttgctggtggcggcatggtcttctgtctgtcgagcgaggagccgcgccgcccgctgcgaagcgacatggtccacttccaggcctcggaagtccagcagctgctacacaacaagttcgtggtcatcttgggggactccattcagagggctgtgtacaaggacctggtgctcttgctccagaaagactcactgctcacagctgcccagctgaaagccaagggggagctgagctttgaacaggaccagctggtggctgggggccagctgggcgagctgcacaacgggacacagtatcgtgaggtccgccagttctgctcgggctctggccaccaccttgtgcgcttctacttcctcactcgtgtttactccgagtaccttgaggatgttctggaagagctgacatatggacctgccccggacctggtgatcatcaactcctgcctctgggatctctccagatatggtcgctgctcaatggagagctaccgggagaacctggagcgggtgtttgtgcgcatggaccaagtattgccagactcctgcctgctggtgtggaacatggcgatgcccctcggggaacgtatcactgggggtttcctcctgccagagctccagcccctggcaggctccctgcggcgggatgtggttgaagggaacttctacagtgctacgctggccggggaccactgctttgatgtcctagacctccactttcacttccggcatgcagtacagcaccgtcatcgggatggtgtccactgggaccagcatgcacaccgccacctctcacacctgcttctgacccatgtggctgacgcctggggcgtggagctgcccaagcgtggctatccccctgacccgtggattgaggactgggcagagatgaatcatccattccagggaagccataggcagaccccagacttcggggagcacctggccttgctcccacccccaccttcttctttgcctcctcccatgccttttccctacccgcttcctcagccctcgccacctcccctcttcccacccctgccccaggataccccttttttcccaggccagcccttcccaccccatgaattcttcaactataatccagtggaggacttctcgatgccaccccacttaggatgtggccctggagtgaactttgtgcctggccctctgccacctccaatccctggccctaatccccatggtcagcactggggcccagtggtccaccgggggatgccacgctatgttcctaacagcccctaccatgtgcggagaatgggggggccctgcaggcagcggctcagacactcagagagactgatccacacatacaaactggacagacggcctcctgcccattcggggacatggcctgggtagactggatcttgggctgggactggatgtgccaatggcccttcagggcctgcctggcacctcaggtactgggctagggtgtctgctatgcctggtattgttcttgtccattgctgtcaccaataaaggcatggaagaacagagtgacaaa

SEQ ID NO: 436447 - DNA, 1777 bp, Homo sapiens
cacgtggcgaggccgccgccgcggccatcaccactgtgggcagcctcacttggctgccgccccgagaccccagcccgtacctgggcttcgcgcccgccaagtgggcccagccctggctcctgcgccctgtggcggccacctccatcgccttgctttcccttcgggcactgggggtcgctcagggcgggacatgggtgaacggaagtggaagctgtgagcgtcgcagcccgaggcgccgaggcctgaggcgccgtcggggccaccgcgacgctcgcatggagagcgctgggcgctgggctgtgcaccgacggctaacctggacccacggtctctgcggggcgggagctttgcagaaccgactggccgactggggcgcgggaacatgaggcttggctaggagcccgctgcgggccaggcgcgcggtgcgcaggcatacccgggtcgcgggtgaacaccgcggagccccgggacttgcctgtcgttgctggtggcggcatggtcttctgtctgtcgagcgaggagccgcgccgcccgctgcgaagcgacatggtccacttccaggcctcggaagtccagcagctgctacacaacaagttcgtggtcatcttgggggactccaagtaccttgaggatgttctggaagagctgacatatggacctgccccggacctggtgatcatcaactcctgcctctgggatctctccagatatggtcgctgctcaatggagagctaccgggagaacctggagcgggtgtttgtgcgcatggaccaagtattgccagactcctgcctgctggtgtggaacatggcgatgcccctcggggaacgtatcactgggggtttcctcctgccagagctccagcccctggcaggctccctgcggcgggatgtggttgaagggaacttctacagtgctacgctggccggggaccactgctttgatgtcctagacctccactttcacttccggcatgcagtacagcaccgtcatcgggatggtgtccactgggaccagcatgcacaccgccacctctcacacctgcttctgacccatgtggctgacgcctggggcgtggagctgcccaagcgtggctatccccctgacccgtggattgaggactgggcagagatgaatcatccattccagggaagccataggcagaccccagacttcggggagcacctggccttgctcccacccccaccttcttctttgcctcctcccatgccttttccctacccgcttcctcagccctcgccacctcccctcttcccacccctgccccaggataccccttttttcccaggccagcccttcccaccccatgaattcttcaactataatccagtggaggacttctcgatgccaccccacttaggatgtggccctggagtgaactttgtgcctggccctctgccacctccaatccctggccctaatccccatggtcagcactggggcccagtggtccaccgggggatgccacgctatgttcctaacagcccctaccatgtgcggagaatgggggggccctgcaggcagcggctcagacactcagagagactgatccacacatacaaactggacagacggcctcctgcccattcggggacatggcctgggtagactggatcttgggctgggactggatgtgccaatggcccttcagggcctgcctggcacctcaggtactgggctagggtgtctgctatgcctggtattgttcttgtccattgctgtcaccaataaaggcatggaagaacagagtgacaaa

SEQ ID NO: 436448 - DNA, 2560 bp, Homo sapiens
ggcagtgtggcagaagcaaagaagcccacagctggggggtgggggtacagtcaactggcagggtgtggaacagggatgttgcatcgggaaggccagccttatggacttgggctcaatggacagtgttccataggcttcttagttcagcctcagagtcccactgtgactggtgcagcttggtgtagctctcctcgggccccatctctgggcctttggtggaggcttctgagggccccactcccccttgttttgaggcactgctccccatcacatctcaactgtaacactctgctgcagaacctctgtttccatgtcaacaccctagtccctgcatgcacacaaagagggcaccatggctgattgtctccatggctgcttctcccctgcatcgtgtccttaaagggcaagtttcctgctgcacttgttgacgactcacccctttcagccccagtgtctagcacaatttccctgtacacagtatcaacagaattgtatttgttgaatgggaggcacgagtcatgttagaaggccgattatggcagcacaagaggatgtgggggcacagagagtccaggaatatcatagagacagacctgtaacacttggtagccaggagttggagcatcagggaggtgaatacagattttggttaaacatccccattttcttgtttagatgtaataattgatccccagcaaatgatgggatgccctgaaggttgtaaggctagttttgatggcttaggcctttgaaatccaatttggagctacagaagttagggccatgaaaagggagagttgatttggggtggaaggatgagttggtgagtttggtcacagcagattgatttgaggttctttggaaatacagagtagatttgcagtcattggtacccagcagagagattaaaactgagggcacagtggcagctgtgagggagacagaacgatgctcatgctttggattggcaggaaagaggggctatggcggaaacaaaaggagatgagggcaggggcacttttaggaaggactgaggctgctggcagtgtcacatgactgttgagaagaagggaatttgttagcaagtggttacatttagtaggaaaagtgttgagggcatgggtttggattaaaggagggagtgagcaattgaggaggaagtggaaattgggcaaaacattccttttggaagtttggatggtaaaaggaagttgttggggaagggaataacaggatctttatgtttggcttatttactggtctatggggaggaggtgggcgaggaaaaagctagatacaagacctgggcaaacaaagaaggctctggagggaagtgtaggttagaacaaaggtaagtctgagaggtaagagagaaggaacacactttgggcttggcctgaaatgagagggaatgaggaaaactgggtagagggcaaggatgctccagcctggtggctctgctctccaagaggaaggaatagagctttagaagtgtggatggccagagttcagggcagcctggctcccaagcctacctaaaacaaccatcccattcctagacccgtggattgaggactgggcagagatgaatcatccattccagggaagccataggcagaccccagacttcggggagcacctggccttgctcccacccccaccttcttctttgcctcctcccatgccttttccctacccgcttcctcagccctcgccacctcccctcttcccacccctgccccaggataccccttttttcccaggccagcccttcccaccccatgaattcttcaactataatccagtggaggacttctcgatgccaccccacttaggtaggtgcttctgcagctcccccaccctcttgtacctccccttacccagcctcctatgcctaggtgagctgagaggagttgggtagctccttgtgcccctagcactgggtttggtcacagcagtccctgagtctgaaacatcatctgtaggttcattaatcagctcactggttgtcactgtttcaccgtctgaaggtaggggaaggactatcccttttttgtagatagggaaacagagaagctcacctggaggacaagagttgcttcaaggcagagctgcactcactctggccagaagcctgctcttataatgactggttcttttgtaggatgtggccctggagtgaactttgtgcctggccctctgccacctccaatccctggccctaatccccatggtcagcactggggcccagtggtccaccgggggatgccacgctatgttcctaacagcccctaccatgtgcggagaatgggggggccctgcaggcagcggctcagacactcagagagactgatccacacatacaaactggacagacggcctcctgcccattcggggacatggcctgggtagactggatcttgggctgggactggatgtgccaatggcccttcagggcctgcctggcacctcaggtactgggctagggtgtctgctatgcctggtattgttcttgtccattgctgtcaccaataaaggcatggaagaacagagtgacaaa

SEQ ID NO: 436449 - DNA, 2231 bp, Homo sapiens
ggcagtgtggcagaagcaaagaagcccacagctggggggtgggggtacagtcaactggcagggtgtggaacagggatgttgcatcgggaaggccagccttatggacttgggctcaatggacagtgttccataggcttcttagttcagcctcagagtcccactgtgactggtgcagcttggtgtagctctcctcgggccccatctctgggcctttggtggaggcttctgagggccccactcccccttgttttgaggcactgctccccatcacatctcaactgtaacactctgctgcagaacctctgtttccatgtcaacaccctagtccctgcatgcacacaaagagggcaccatggctgattgtctccatggctgcttctcccctgcatcgtgtccttaaagggcaagtttcctgctgcacttgttgacgactcacccctttcagccccagtgtctagcacaatttccctgtacacagtatcaacagaattgtatttgttgaatgggaggcacgagtcatgttagaaggccgattatggcagcacaagaggatgtgggggcacagagagtccaggaatatcatagagacagacctgtaacacttggtagccaggagttggagcatcagggaggtgaatacagattttggttaaacatccccattttcttgtttagatgtaataattgatccccagcaaatgatgggatgccctgaaggttgtaaggctagttttgatggcttaggcctttgaaatccaatttggagctacagaagttagggccatgaaaagggagagttgatttggggtggaaggatgagttggtgagtttggtcacagcagattgatttgaggttctttggaaatacagagtagatttgcagtcattggtacccagcagagagattaaaactgagggcacagtggcagctgtgagggagacagaacgatgctcatgctttggattggcaggaaagaggggctatggcggaaacaaaaggagatgagggcaggggcacttttaggaaggactgaggctgctggcagtgtcacatgactgttgagaagaagggaatttgttagcaagtggttacatttagtaggaaaagtgttgagggcatgggtttggattaaaggagggagtgagcaattgaggaggaagtggaaattgggcaaaacattccttttggaagtttggatggtaaaaggaagttgttggggaagggaataacaggatctttatgtttggcttatttactggtctatggggaggaggtgggcgaggaaaaagctagatacaagacctgggcaaacaaagaaggctctggagggaagtgtaggttagaacaaaggtaagtctgagaggtaagagagaaggaacacactttgggcttggcctgaaatgagagggaatgaggaaaactgggtagagggcaaggatgctccagcctggtggctctgctctccaagaggaaggaatagagctttagaagtgtggatggccagagttcagggcagcctggctcccaagcctacctaaaacaaccatcccattcctagacccgtggattgaggactgggcagagatgaatcatccattccagggaagccataggcagaccccagacttcggggagcacctggccttgctcccacccccaccttcttctttgcctcctcccatgccttttccctacccgcttcctcagccctcgccacctcccctcttcccacccctgccccaggataccccttttttcccaggccagcccttcccaccccatgaattcttcaactataatccagtggaggacttctcgatgccaccccacttaggatgtggccctggagtgaactttgtgcctggccctctgccacctccaatccctggccctaatccccatggtcagcactggggcccagtggtccaccgggggatgccacgctatgttcctaacagcccctaccatgtgcggagaatgggggggccctgcaggcagcggctcagacactcagagagactgatccacacatacaaactggacagacggcctcctgcccattcggggacatggcctgggtagactggatcttgggctgggactggatgtgccaatggcccttcagggcctgcctggcacctcaggtactgggctagggtgtctgctatgcctggtattgttcttgtccattgctgtcaccaataaaggcatggaagaacagagtgacaaa

SEQ ID NO: 436450 - DNA, 1442 bp, Homo sapiens
cacgtggcgaggccgccgccgcggccatcaccactgtgggcagcctcacttggctgccgccccgagaccccagcccgtacctgggcttcgcgcccgccaagtgggcccagccctggctcctgcgccctgtggcggccacctccatcgccttgctttcccttcgggcactgggggtcgctcagggcgggacatgggtgaacggaagtggaagctgtgagcgtcgcagcccgaggcgccgaggcctgaggcgccgtcggggccaccgcgacgctcgcatggagagcgctgggcgctgggctgtgcaccgacggctaacctggacccacggtctctgcggggcgggagctttgcagaaccgactggccgactggggcgcgggaacatgaggcttggctaggagcccgctgcgggccaggcgcgcggtgcgcaggcatacccgggtcgcgggtgaacaccgcggagccccgggacttgcctgtcgttgctggtggcggcatggtcttctgtctgtcgagcgaggagccgcgccgcccgctgcgaagcgacatggtccacttccaggcctcggaagtccagcagctgctacacaacaagttcgtggtcatcttgggggactccattcagagggctgtgtacaaggacctggtgctcttgctccagaaagactcactgctcacagctgcccagctgaaagccaagggggagctgagctttgaacaggaccagctggtggctgggggccagctgggcgagctgcacaacgggacacagtatcgtgaggtccgccagttctgctcgggctctggccaccaccttgtgcgcttctacttcctcactcgtgtttactccgagtaccttgaggatgttctggaagagctgacatatggacctgccccggacctggtgatcatcaactcctgcctctgggatctctccagatatggtcgctgctcaatggagagctaccgggagaacctggagcgggtgtttgtgcgcatggaccaagtattgccagactcctgcctgctggtgtggaacatggcgatgcccctcggggaacgtatcactgggggtttcctcctgccagagctccagcccctggcaggctccctgcggcgggatgtggttgaagggaacttctacagtgctacgctggccggggaccactgctttgatgtcctagacctccactttcacttccggcatgcagtacagcaccgtcatcgggatggtgtccactgggaccagcatgcacaccgccacctctcacacctgcttctgacccatgtggctgacgcctggggcgtggagctgcccaagcgtggctatccccctggtgagccctaccataagtgggggggtagtgatgcactggggccctcagaggacagggctcagaaacagaatgggacacagccactcaagggaagtagaggtccctt

SEQ ID NO: 436451 - DNA, 1406 bp, Homo sapiens
cacgtggcgaggccgccgccgcggccatcaccactgtgggcagcctcacttggctgccgccccgagaccccagcccgtacctgggcttcgcgcccgccaagtgggcccagccctggctcctgcgccctgtggcggccacctccatcgccttgctttcccttcgggcactgggggtcgctcagggcgggacatgggtgaacggaagtggaagctgtgagcgtcgcagcccgaggcgccgaggcctgaggcgccgtcggggccaccgcgacgctcgcatggagagcgctgggcgctgggctgtgcaccgacggctaacctggacccacggtctctgcggggcgggagctttgcagaaccgactggccgactggggcgcgggaacatgaggcttggctaggagcccgctgcgggccaggcgcgcggtgcgcaggcatacccgggtcgcgggtgaacaccgcggagccccgggacttgcctgtcgttgctggtggcggcatggtcttctgtctgtcgagcgaggagccgcgccgcccgctgcgaagcgacatggtccacttccaggcctcggaagtccagcagctgctacacaacaagttcgtggtcatcttgggggactccattcagagggctgtgtacaaggacctggtgctcttgctccagaaagactcactgctcacagctgcccagctgaaagccaagagtaccttgaggatgttctggaagagctgacatatggacctgccccggacctggtgatcatcaactcctgcctctgggatctctccagatatggtcgctgctcaatggagagctaccgggagaacctggagcgggtgtttgtgcgcatggaccaagtattgccagactcctgcctgctggtgtggaacatggcgatgcccctcggggaacgtatcactgggggtttcctcctgccagaggccagcccttcccaccccatgaattcttcaactataatccagtggaggacttctcgatgccaccccacttaggatgtggccctggagtgaactttgtgcctggccctctgccacctccaatccctggccctaatccccatggtcagcactggggcccagtggtccaccgggggatgccacgctatgttcctaacagcccctaccatgtgcggagaatgggggggccctgcaggcagcggctcagacactcagagagactgatccacacatacaaactggacagacggcctcctgcccattcggggacatggcctgggtagactggatcttgggctgggactggatgtgccaatggcccttcagggcctgcctggcacctcaggtactgggctagggtgtctgctatgcctggtattgttcttgtccattgctgtcaccaataaaggcatggaagaacagagtgacaaa

SEQ ID NO: 436452 - DNA, 936 bp, Homo sapiens
cacgtggcgaggccgccgccgcggccatcaccactgtgggcagcctcacttggctgccgccccgagaccccagcccgtacctgggcttcgcgcccgccaagtgggcccagccctggctcctgcgccctgtggcggccacctccatcgccttgctttcccttcgggcactgggggtcgctcagggcgggacatgggtgaacggaagtggaagctgtgagcgtcgcagcccgaggcgccgaggcctgaggcgccgtcggggccaccgcgacgctcgcatggagagcgctgggcgctgggctgtgcaccgacggctaacctggacccacggtctctgcggggcgggagctttgcagaaccgactggccgactggggcgcgggaacatgaggcttggctaggagcccgctgcgggccaggcgcgcggtgcgcaggcatacccgggtcgcgggtgaacaccgcggagccccgggacttgcctgtcgttgctggtggcggcatggtcttctgtctgtcgagcgaggagccgcgccgcccgctgcgaagcgacatggtccacttccaggcctcggaagtccagcagctgctacacaacaagttcgtggtcatcttgggggactccagtgagtgcctcttctagggtgacgcttccagtcccacaccttgcacccctaccatgtgcggagaatgggggggccctgcaggcagcggctcagacactcagagagactgatccacacatacaaactggacagacggcctcctgcccattcggggacatggcctgggtagactggatcttgggctgggactggatgtgccaatggcccttcagggcctgcctggcacctcaggtactgggctagggtgtctgctatgcctggtattgttcttgtccattgctgtcaccaataaaggcatggaagaacagagtgacaaa

SEQ ID NO: 436453 - DNA, 1435 bp, Homo sapiens
gatcccgcccccctcggagcgcccctgtggtctgacttcagcagcactttccggcaggagactgggcactcgctgtcacccgcgagctgcctccctcagcgagatctgagcatctttccggaggctaacagacctgggcttcggggtgaccactgtgcttgcctcagtttccttttctggagcaggggaaggcccggctccctgcccaaaggcggctgtgcgctaagtggcagacgctcggggagagccggcgcggggcggaccccagcgccagtagtgacaggggcgaacgccgccgggagactccagccggcgggcgagcaggcctgtcgttgctggtggcggcatggtcttctgtctgtcgagcgaggagccgcgccgcccgctgcgaagcgacatggtccacttccaggcctcggaagtccagcagctgctacacaacaagttcgtggtcatcttgggggactccattcagagggctgtgtacaaggacctggtgctcttgctccagaaagactcactgctcacagctgcccagctgaaagccaagagtaccttgaggatgttctggaagagctgacatatggacctgccccggacctggtgatcatcaactcctgcctctgggatctctccagatatggtcgctgctcaatggagagctaccgggagaacctggagcgggtgtttgtgcgcatggaccaagtattgccagactcctgcctgctggtgtggaacatggcgatgcccctcggggaacgtatcactgggggtttcctcctgccagagctccagcccctggcaggctccctgcggcgggatgtggttgaagggaacttctacagtgctacgctggccggggaccactgctttgatgtcctagacctccactttcacttccggcatgcagtacagcaccgtcatcgggatggtgtccactgggaccagcatgcacaccgccacctctcacacctgcttctgacccatgaattcttcaactataatccagtggaggacttctcgatgccaccccacttaggatgtggccctggagtgaactttgtgcctggccctctgccacctccaatccctggccctaatccccatggtcagcactggggcccagtggtccaccgggggatgccacgctatgttcctaacagcccctaccatgtgcggagaatgggggggccctgcaggcagcggctcagacactcagagagactgatccacacatacaaactggacagacggcctcctgcccattcggggacatggcctgggtagactggatcttgggctgggactggatgtgccaatggcccttcagggcctgcctggcacctcaggtactgggctagggtgtctgctatgcctggtattgttcttgtccattgctgtcaccaataaaggcatggaagaacagagtgacaaa

SEQ ID NO: 436454 - DNA, 307 bp, Homo sapiens
ggcagtgtggcagaagcaaagaagcccacagctggggggtgggggtacagtcaactggcagggtgtggaacagggatgttgcatcgggaaggccagccttatggacttgggctcaatggacagtgttccataggcttcttagttcagcctcagagtcccactgtgactggtgcagcttggtgtagctctcctcgggccccatctctgggcctttggtggaggcttctgagggcccctccaactcttcctcccctatcatcccctgtggaatgttggtctcactctctggggaagtcaggggagaagt

SEQ ID NO: 436455 - DNA, 1857 bp, Homo sapiens
cacgtggcgaggccgccgccgcggccatcaccactgtgggcagcctcacttggctgccgccccgagaccccagcccgtacctgggcttcgcgcccgccaagtgggcccagccctggctcctgcgccctgtggcggccacctccatcgccttgctttcccttcgggcactgggggtcgctcagggcgggacatgggtgaacggaagtggaagctgtgagcgtcgcagcccgaggcgccgaggcctgaggcgccgtcggggccaccgcgacgctcgcatggagagcgctgggcgctgggctgtgcaccgacggctaacctggacccacggtctctgcggggcgggagctttgcagaaccgactggccgactggggcgcgggaacatgaggcttggctaggagcccgctgcgggccaggcgcgcggtgcgcaggcatacccgggtcgcgggtgaacaccgcggagccccgggacttgcctgtcgttgctggtggcggcatggtcttctgtctgtcgagcgaggagccgcgccgcccgctgcgaagcgacatggtccacttccaggcctcggaagtccagcagctgctacacaacaagttcgtggtcatcttgggggactccattcagagggctgtgtacaaggacctggtgctcttgctccagaaagactcactgctcacagctgcccagctgaaagccaagagtaccttgaggatgttctggaagagctgacatatggacctgccccggacctggtgatcatcaactcctgcctctgggatctctccagatatggtcgctgctcaatggagagctaccgggagaacctggagcgggtgtttgtgcgcatggaccaagtattgccagactcctgcctgctggtgtggaacatggcgatgcccctcggggaacgtatcactgggggtttcctcctgccagagctccagcccctggcaggctccctgcggcgggatgtggttgaagggaacttctacagtgctacgctggccggggaccactgctttgatgtcctagacctccactttcacttccggcatgcagtacagcaccgtcatcgggatggtgtccactgggaccagcatgcacaccgccacctctcacacctgcttctgacccatgtggctgacgcctggggcgtggagctgcccaagcgtggctatccccctgacccgtggattgaggactgggcagagatgaatcatccattccagggaagccataggcagaccccagacttcggggagcacctggccttgctcccacccccaccttcttctttgcctcctcccatgccttttccctacccgcttcctcagccctcgccacctcccctcttcccacccctgccccaggataccccttttttcccaggccagcccttcccaccccatgaattcttcaactataatccagtggaggacttctcgatgccaccccacttaggatgtggccctggagtgaactttgtgcctggccctctgccacctccaatccctggccctaatccccatggtcagcactggggcccagtggtccaccgggggatgccacgctatgttcctaacagcccctaccatgtgcggagaatgggggggccctgcaggcagcggctcagacactcagagagactgatccacacatacaaactggacagacggcctcctgcccattcggggacatggcctgggtagactggatcttgggctgggactggatgtgccaatggcccttcagggcctgcctggcacctcaggtactgggctagggtgtctgctatgcctggtattgttcttgtccattgctgtcaccaataaaggcatggaagaacagagtgacaaa

SEQ ID NO: 436456 - DNA, 1398 bp, Homo sapiens
cttacgcgcgtctgctggcccttacgcgcgtctgctggcccttacgcgcgtctgctggcccttacgcgcgtctgctggcccttacgcgcggggagctgagctttgaacaggaccagctggtggctgggggccagctgggcgagctgcacaacgggacacagtatcgtgaggtccgccagttctgctcgggctctggccaccaccttgtgcgcttctacttcctcactcgtgtttactccgagtaccttgaggatgttctggaagagctgacatatggacctgccccggacctggtgatcatcaactcctgcctctgggatctctccagatatggtcgctgctcaatggagagctaccgggagaacctggagcgggtgtttgtgcgcatggaccaagtattgccagactcctgcctgctggtgtggaacatggcgatgcccctcggggaacgtatcactgggggtttcctcctgccagagctccagcccctggcaggctccctgcggcgggatgtggttgaagggaacttctacagtgctacgctggccggggaccactgctttgatgtcctagacctccactttcacttccggcatgcagtacagcaccgtcatcgggatggtgtccactgggaccagcatgcacaccgccacctctcacacctgcttctgacccatgtggctgacgcctggggcgtggagctgcccaagcgtggctatccccctgacccgtggattgaggactgggcagagatgaatcatccattccagggaagccataggcagaccccagacttcggggagcacctggccttgctcccacccccaccttcttctttgcctcctcccatgccttttccctacccgcttcctcagccctcgccacctcccctcttcccacccctgccccaggataccccttttttcccaggccagcccttcccaccccatgaattcttcaactataatccagtggaggacttctcgatgccaccccacttaggatgtggccctggagtgaactttgtgcctggccctctgccacctccaatccctggccctaatccccatggtcagcactggggcccagtggtccaccgggggatgccacgctatgttcctaacagcccctaccatgtgcggagaatgggggggccctgcaggcagcggctcagacactcagagagactgatccacacatacaaactggacagacggcctcctgcccattcggggacatggcctgggtagactggatcttgggctgggactggatgtgccaatggcccttcagggcctgcctggcacctcaggtactgggctagggtgtctgctatgcctggtattgttcttgtccattgctgtcaccaataaaggcatggaagaacagagtgacaaa

SEQ ID NO: 436457 - DNA, 1735 bp, Homo sapiens
cacgtggcgaggccgccgccgcggccatcaccactgtgggcagcctcacttggctgccgccccgagaccccagcccgtacctgggcttcgcgcccgccaagtgggcccagccctggctcctgcgccctgtggcggccacctccatcgccttgctttcccttcgggcactgggggtcgctcagggcgggacatgggtgaacggaagtggaagctgtgagcgtcgcagcccgaggcgccgaggcctgaggcgccgtcggggccaccgcgacgctcgcatggagagcgctgggcgctgggctgtgcaccgacggctaacctggacccacggtctctgcggggcgggagctttgcagaaccgactggccgactggggcgcgggaacatgaggcttggctaggagcccgctgcgggccaggcgcgcggtgcgcaggcatacccgggtcgcgggtgaacaccgcggagccccgggacttgcctgtcgttgctggtggcggcatggtcttctgtctgtcgagcgaggagccgcgccgcccgctgcgaagcgacatggtccacttccaggcctcggaagtccagcagctgctacacaacaagttcgtggtcatcttgggggactccattcagagggctgtgtacaaggacctggtgctcttgctccagaaagactcactgctcacagctgcccagctgaaagccaagggggagctgagctttgaacaggaccagctggtggctgggggccagctgggcgagctgcacaacgggacacagtatcgtgaggtccgccagttctgctcgggctctggccaccaccttgtgcgcttctacttcctcactcgtgtttactccgagtaccttgaggatgttctggaagagctgacatatggacctgccccggacctggtgatcatcaactcctgcctctgggatctctccagatatggtcgctgctcaatggagagctaccgggagaacctggagcgggtgtttgtgcgcatggaccaagtattgccagactcctgcctgctggtgtggaacatggcgatgcccctcggggaacgtatcactgggggtttcctcctgccagagctccagcccctggcaggctccctgcggcgggatgtggttgaagggaacttctacagtgctacgctggccggggaccactgctttgatgtcctagacctccactttcacttccggcatgcagtacagcaccgtcatcgggatggtgtccactgggaccagcatgcacaccgccacctctcacacctgcttctgacccatgaattcttcaactataatccagtggaggacttctcgatgccaccccacttaggatgtggccctggagtgaactttgtgcctggccctctgccacctccaatccctggccctaatccccatggtcagcactggggcccagtggtccaccgggggatgccacgctatgttcctaacagcccctaccatgtgcggagaatgggggggccctgcaggcagcggctcagacactcagagagactgatccacacatacaaactggacagacggcctcctgcccattcggggacatggcctgggtagactggatcttgggctgggactggatgtgccaatggcccttcagggcctgcctggcacctcaggtactgggctagggtgtctgctatgcctggtattgttcttgtccattgctgtcaccaataaaggcatggaagaacagagtgacaaa

SEQ ID NO: 436458 - DNA, 1183 bp, Homo sapiens
gcgccagaggatccttcggggttgtgcatcagttatgctttatgtgcccatcagttcaaagaaactgccccggacctggtgatcatcaactcctgcctctgggatctctccagatatggtcgctgctcaatggagagctaccgggagaacctggagcgggtgtttgtgcgcatggaccaagtattgccagactcctgcctgctggtgtggaacatggcgatgcccctcggggaacgtatcactgggggtttcctcctgccagagctccagcccctggcaggctccctgcggcgggatgtggttgaagggaacttctacagtgctacgctggccggggaccactgctttgatgtcctagacctccactttcacttccggcatgcagtacagcaccgtcatcgggatggtgtccactgggaccagcatgcacaccgccacctctcacacctgcttctgacccatgtggctgacgcctggggcgtggagctgcccaagcgtggctatccccctgacccgtggattgaggactgggcagagatgaatcatccattccagggaagccataggcagaccccagacttcggggagcacctggccttgctcccacccccaccttcttctttgcctcctcccatgccttttccctacccgcttcctcagccctcgccacctcccctcttcccacccctgccccaggataccccttttttcccaggccagcccttcccaccccatgaattcttcaactataatccagtggaggacttctcgatgccaccccacttaggatgtggccctggagtgaactttgtgcctggccctctgccacctccaatccctggccctaatccccatggtcagcactggggcccagtggtccaccgggggatgccacgctatgttcctaacagcccctaccatgtgcggagaatgggggggccctgcaggcagcggctcagacactcagagagactgatccacacatacaaactggacagacggcctcctgcccattcggggacatggcctgggtagactggatcttgggctgggactggatgtgccaatggcccttcagggcctgcctggcacctcaggtactgggctagggtgtctgctatgcctggtattgttcttgtccattgctgtcaccaataaaggcatggaagaacagagtgacaaa

SEQ ID NO: 436459 - DNA, 1010 bp, Homo sapiens
agagatgggatagcagactggtagataggacaccctgctttcagaccctgctgcgttctgtggctcttagaggctgcactttctcacttagctccagcccctggcaggctccctgcggcgggatgtggttgaagggaacttctacagtgctacgctggccggggaccactgctttgatgtcctagacctccactttcacttccggcatgcagtacagcaccgtcatcgggatggtgtccactgggaccagcatgcacaccgccacctctcacacctgcttctgacccatgtggctgacgcctggggcgtggagctgcccaagcgtggctatccccctgacccgtggattgaggactgggcagagatgaatcatccattccagggaagccataggcagaccccagacttcggggagcacctggccttgctcccacccccaccttcttctttgcctcctcccatgccttttccctacccgcttcctcagccctcgccacctcccctcttcccacccctgccccaggataccccttttttcccaggccagcccttcccaccccatgaattcttcaactataatccagtggaggacttctcgatgccaccccacttaggatgtggccctggagtgaactttgtgcctggccctctgccacctccaatccctggccctaatccccatggtcagcactggggcccagtggtccaccgggggatgccacgctatgttcctaacagcccctaccatgtgcggagaatgggggggccctgcaggcagcggctcagacactcagagagactgatccacacatacaaactggacagacggcctcctgcccattcggggacatggcctgggtagactggatcttgggctgggactggatgtgccaatggcccttcagggcctgcctggcacctcaggtactgggctagggtgtctgctatgcctggtattgttcttgtccattgctgtcaccaataaaggcatggaagaacagagtgacaaa

SEQ ID NO: 436460 - DNA, 1342 bp, Homo sapiens
ggcagtgtggcagaagcaaagaagcccacagctggggggtgggggtacagtcaactggcagggtgtggaacagggatgttgcatcgggaaggccagccttatggacttgggctcaatggacagtgttccataggcttcttagttcagcctcagagtcccactgtgactggtgcagcttggtgtagctctcctcgggccccatctctgggcctttggtggaggcttctgagggccccactcccccttgttttgaggcactgctccccatcacatctcaactgtaacactctgctgcagaacctctgtttccatgtcaacaccctagtccctgcatgcacacaaagagggcaccatggctgattgtctccatggctgcttctcccctgcatcgtgtccttaaagggcaagtttcctgctgcacttgttgacgactcacccctttcagccccagtgtctagcacaatttccctgtacacagtatcaacagaattgtatttgttgaatgggaggcacgagtcatgttagaaggccgattatggcagcacaagaggatgtgggggcacagagagtccaggaatatcatagagacagacctgtaacacttggtagccaggagttggagcatcagggaggtgaatacagattttggttaaacatccccattttcttgtttagatgtaataattgatccccagcaaatgatgggatgccctgaaggttgtaaggctagttttgatggcttaggcctttgaaatccaatttggagctacagaagttagggccatgaaaagggagagttgatttggggtggaaggatgagttggtgagtttggtcacagcagattgatttgaggttctttggaaatacagagtagatttgcagtcattggtacccagcagagagattaaaactgagggcacagtggcagctgtgagggagacagaacgatgctcatgctttggattggcaggaaagaggggctatggcggaaacaaaaggagatgagggcaggggcacttttaggaaggactgaggctgctggcagtgtcacatgactgttgagaagaagggaatttgttagcaagtggttacatttagtaggaaaagtgttgagggcatgggtttggattaaaggagggagtgagcaattgaggaggaagtggaaattgggcaaaacattccttttggaagtttggatggtaaaaggaagttgttggggaagggaataacaggatctttatgtttggcttatttactggtctatggggaggaggtgggcgaggaaaaagctagatacaagacctgggcactcattatgaggggtccgagctcgatcgtcga

SEQ ID NO: 436461 - DNA, 633 bp, Homo sapiens
gggaatgaattggaagtaagcattatgatggtggtagaagcactatgtgaacttcattgtcctgaagctatacagggaattgctgtctggtcatcatctattgttggaaaacatcttctgtggattaactcagtggctcaacaggctgaagggaggtttgaaaaggcctctgtggagtaccaggaacacctgtgtgccatgacaggtgttgattgctgcatctccagctttgacaaatcggtgctcaccttagccagtgctgggtgtaagagtgccagcctgaaacattgtctgaatggtgaatccagaaaaagtgtgctgtccaaaccgactgactcttcccctgaggttataaattatttaggaaacaaagcatgtgagtgctacatctcaactgccgattgggctgctgtgcaggaatggcagaacgctatccatgacttgaaaaagagtaccagtagcacttccctcaacctgaaagctgacttcaactatataaaatcattaagcagctttgaatcttggaaaattggccaaagaccgggcaaatttgaatggtcccccgaaaaattttaattctttgctgggggctcaggaaaatttcccctaaaaaaagcttcttaaacctgagaa

SEQ ID NO: 436462 - DNA, 367 bp, Homo sapiens
tactactaaattcgcggccgcgtcgacttttttttgtaagagaaaattaaaggtggttttttttttttaaattttgctttattgaggtttatattacacattctaagtgtatggtttgatgagttctaacatgtcttcacttgtgtgaccaccaatacgatcgagatagagaacagcgtcttaccccagaaggttcccttgggatcatctcctcatttgcccctgtcagcagttactgatttgctttctgtcactatggattagacttgtctttactaaagtttcatgtacgtgaaatcataacaacatgttctcttgtgtttggcttctcttgctcagcaagagaagcgtcgacgcggccgcgaat

SEQ ID NO: 436463 - DNA, 489 bp, Homo sapiens
cctcagggcgccctgaaaggaccaggacatgcgggtgcggtggatgctcttttggctcctctttgggctcctactggaatttatcagccatcagtgcatctctgtgagtagacgctggacccgtggggtttcttcctttttactgggctgtatcacgtggcatgaaattacacagctcaggcctgtaatcccagcactttggggggccgaggtgggcagatcacttgagtccaggagttgaagactagccagggcatcatggcgaaaccccatctctacaaaaaattccaataaagattagtcgggcctggtggtgcgtacctgttatcccagttactggagaggctgaggtgggaggatcgcttgggcccaggagctggacgttgcagtgagccgagatggccccgctgcactcttgtttttaacaaagaaaataaaaattagccaggcacagtggcacgtgcctctggtcccagaggattgcctgag

SEQ ID NO: 436464 - DNA, 631 bp, Homo sapiens
gtgggcggatcacaaggtcaggagttccagaccagcctggccaatatggtgaaaccctgtctctaataaaatacaaaaattagccgggtgtggtggtgggcgcctgtagtcccacctacttgggaggctgaggcaggagaatagtttgaacccgggaggcagagtctgcagtgagccgagattgcaccactgcactccagcctaggcgacagagcgagactctgtctcaaaaacagcaacaactacaaacaaacaaaaaacagggttaacaaaagtatggaattcaattctttttatatgctgcagccatgttcctgccctagatttggctgggcatggtggctcacgcctgtaatcccagcactttgggaggctgaggcaggcggatcacgaggttaggagttggagaccagcctgaccaacatggtgaaaccccatctctactaaaaatacaaaaattagccaggcatggtggcacacgcctgtaatcccagctactcaggaggctgaggcaggacaatcccttggacccgggaggcggaggttgcagtgagccgagattgtaccattgcactccagcctgggtgacagaatggaatgagactctgtctcaaaaaaaaaaaaaaaaaaa

SEQ ID NO: 436465 - DNA, 301 bp, Homo sapiens
cctcagggcgccctgaaaggaccaggacatgcgggtgcggtggatgctcttttggctcctctttgggctcctactggaatttatcagccatcagtgcatctctgttatcaatactctggctgaccatcatcatcgtgggactgactttggtggaagtccttggttacatgtcattattgcatttccgacaagttataaagttgtcattaccctctggatagtttacctttgggtgagtatactaactttctgtagaggtatacttgtaatcacaaataagaataaattatataaaacaatt

SEQ ID NO: 436466 - DNA, 2581 bp, Homo sapiens
acaaggtctggctctgttgcccaggttggagtgtaggagggcgatctcagctcactgtaacatcaacctcccaggctcaagcaatcctctcacttcagcctcccaaagtactgggattacaggcatgtcccaccatgcccagactaatatttacttttaatcagactaagatagggttactacttgagttgctatggctccagctgaaagaaagcccgtgcagtcatatcacgcgtaaacatttgctttatgctaaaaatatggtggacctggcattacagctattacaaatctcctaagatgtctcgggtagtgtattagttacttttcatactgctatgaagaaatactggaaactgggtaatttataaagaaaaagaggtttaatgtactcacagttccacaaggctggagaggcctcagaatcatggtggaaggcaaagaaggagcaaaaaggtatgtcttccactggcagcaggcaagagagcacgtgcagggaaactgccctttataaaaccatcagatttagtgagatgtattcactatcacgagaacagtatgggaaaaacctgcccccatgattcgattacctcctaccgggtccctcccacgacacatggggattatgggaactacaattcaagatgaaatttgggtggggacgcagccaaaccatatcgggtagcaacaacctagggtcagttttgcaggtggtaaagccatttaccaagatagttgtaggtaaagaagggcagatttattagagaaattgtgaaaatatgttgcagtgggcagctcagcagagaaggggctacctgcaaagaggcaagggctggaggaaagttttatagggtcctgctgaagggtgctacgtgtggaatgaggtcattgtgcccgcaggttgtttgtgattagctgtctctaacaattgttcatacaataattgttcattattgttctcaacttggggctctccccaacctggggacccttccttattgttgcttacttatcaggtctccacataaaggtgtggaaacttcattcattcatatcttcaacacaaattgtaggtagcctgttttttaaaacatttattcaacaaatatttagtccaagccactattacttactaccttctctactattgtatggacttttaactatctctgacactattcactattcttccacattctctattatttatacctatggtaaaatttgccagtttgaccatacaactaatactcacagggaatatatagagtctagaagaaaatatacaggtccttaaaggctgccctgccaacaaaaccataacgcaggaacaaacatcacaactatgccaaataatcaatcctacaatgtccaaaattttactttaaaactggaattaccagacttcctttctgcattaaccagtttaactagacagtaacgaaatattcctactttatgctgtgatagtttgtttgtttgtttgtttgtttatttatttatttatttatttaagacagagtttcgctcttgttgcccaggctggagtgcagtggcacgatctcagctcaccacagcctccgcctcccaggttcaagcgattctcctgcctcagcctcccgagtagctgggattacaggcatgagccaccgtgcctggccagaaaattgtaaacacacacaaactctcaagtggcctaattccctctcaccaaaccaatcacaatacagataaaagagaataacttgtgttcatttttgtacaaacaaaaaagatataaattgtgaatgatgcatgatttttaattacaagtaaactgggcaaatgcttctgcattatttaaagctaaaaggtgatcagtggaaactttcctctgttagtactctaatactttttatatttatcggctcactacaacctgtgcctaccaggttcaagcgattctcctgtctcagccacctgagtagccgagaccacaggcacgcactaccatgtccggctaattttgtatttttaatagagacagggtttcaccgtgttggccatgctggtcttgaactcctgacctcaaccgatccgcctgccttggcctcccaaagttctgggattacaagcgtgagccacagcgcccagccttattataattgttactatttaaatctcttttgctctctccttcaagagagacctcatcccattcagttgcttccatttatttattcatcttctgcctcctgggctcgagagatcctccagcgtgagtctcccaagtagctgggactacaggctcacaccaccaagcttggctaaattttgtaggttttggagagacaggctcttgccacgttgcctaggctggtctcaaactcctgggctcagatgatccacctgccttcgcctcccaaagcactgggacatgagccaccacgcccagccgcaagtacttttacacaaaatgcaaacaccattcttccatcataaaagtgataccacagcttccgtgaagttttgccaggtagtactcataattaccttgggtaaactttttgatgttaaactgtatcttcttattacgagtttt

SEQ ID NO: 436467 - DNA, 2815 bp, Homo sapiens
acaaggtctggctctgttgcccaggttggagtgtaggagggcgatctcagctcactgtaacatcaacctcccaggctcaagcaatcctctcacttcagcctcccaaagtactgggattacaggcatgtcccaccatgcccagactaatatttacttttaatcagactaagatagggttactacttgagttgctatggctccagctgaaagaaagcccgtgcagtcatatcacgcgtaaacatttgctttatgctaaaaatatggtggacctggcattacagctattacaaatctcctaagatgtctcgggtagtgtattagttacttttcatactgctatgaagaaatactggaaactgggtaatttataaagaaaaagaggtttaatgtactcacagttccacaaggctggagaggcctcagaatcatggtggaaggcaaagaaggagcaaaaaggtatgtcttccactggcagcaggcaagagagcacgtgcagggaaactgccctttataaaaccatcagatttagtgagatgtattcactatcacgagaacagtatgggaaaaacctgcccccatgattcgattacctcctaccgggtccctcccacgacacatggggattatgggaactacaattcaagatgaaatttgggtggggacgcagccaaaccatatcgggtagcaacaacctagggtcagttttgcaggtggtaaagccatttaccaagatagttgtaggtaaagaagggcagatttattagagaaattgtgaaaatatgttgcagtgggcagctcagcagagaaggggctacctgcaaagaggcaagggctggaggaaagttttatagggtcctgctgaagggtgctacgtgtggaatgaggtcattgtgcccgcaggttgtttgtgattagctgtctctaacaattgttcatacaataattgttcattattgttctcaacttggggctctccccaacctggggacccttccttattgttgcttacttatcaggtctccacataaaggtgtggaaacttcattcattcatatcttcaacacaaattgtaggtagcctgttttttaaaacatttattcaacaaatatttagtccaagccactattacttactaccttctctactattgtatggacttttaactatctctgacactattcactattcttccacattctctattatttatacctatggtaaaatttgccagtttgaccatacaactaatactcacagggaatatatagagtctagaagaaaatatacaggtccttaaaggctgccctgccaacaaaaccataacgcaggaacaaacatcacaactatgccaaataatcaatcctacaatgtccaaaattttactttaaaactggaattaccagacttcctttctgcattaaccagtttaactagacagtaacgaaatattcctactttatgctgtgatagtttgtttgtttgtttgtttgtttatttatttatttatttatttaagacagagtttcgctcttgttgcccaggctggagtgcagtggcacgatctcagctcaccacagcctccgcctcccaggttcaagcgattctcctgcctcagcctcccgagtagctgggattacaggtatgatctcgtgaaatcttgagagaaactgaatgacgaatgaaactattgttcctgtttcacacagaagaaaactgaggttaaaaggggtaaagtaattttgcatggcatgaagtagaaattcaaagtacaggaatttgaacttggttctgtccttttctgaagcccttgaccactatagactcaaacatcaccttgtttttccactcattcaacacttttttttttaaattatctaataggttggcactcatcatgagcccctgttctcattctgcaaatggtgaagctctctattgtcctgaccccacagttcctgtcccatgaccagggccagctcaccaaggagctgcagcagcatgtaaagtcagtgacatgcccatgcgagtacctgaggaaggttatcaatactctggctgaccatcatcatcgtgggactgactttggtggaagtccttggttacatgtcattattgcatttccgacaagttataaagttgtcattaccctctggatagtttacctttgggtgtctctcctgaagactatcttctggtctcgaaatggacatgatggatccacggatgtacagcagagagcctggaggtccaaccgccgtagacaggaagggctgaggtccatttgtatgcacacaaagaaaagagtttcttcctttcgaggaaataaaattgtcctgaaagacgtcattactctacggagacatgtggaaacaaaagttagagctaaaatccgtaagaggaaggtgacaacgaaaatcaaccatcatgacaaaatcaatggaaagaggaagaccgccagaaaacagaaaatgtttcaacgtgcgcaagagttgcggcggcgagcagaggactaccacaaatgcaaaatccccccttctgcaagaaaggctctttgcaactgggtcagaatggcggcagcggagcatcgtcattcttcaggattgccctactggccctacctcacagctgaaactttaaaaaacaggatgggccaccagccacctcctccaactcaacaacattctataactgataactccctgagcctcaagacacctcccgagtgtctgctcactccccttccaccctcagcggatgataatctcaagacacctcccgagtgtgtgctcactccccttccaccctcagcggatga

SEQ ID NO: 436468 - DNA, 3024 bp, Homo sapiens
acaaggtctggctctgttgcccaggttggagtgtaggagggcgatctcagctcactgtaacatcaacctcccaggctcaagcaatcctctcacttcagcctcccaaagtactgggattacaggcatgtcccaccatgcccagactaatatttacttttaatcagactaagatagggttactacttgagttgctatggctccagctgaaagaaagcccgtgcagtcatatcacgcgtaaacatttgctttatgctaaaaatatggtggacctggcattacagctattacaaatctcctaagatgtctcgggtagtgtattagttacttttcatactgctatgaagaaatactggaaactgggtaatttataaagaaaaagaggtttaatgtactcacagttccacaaggctggagaggcctcagaatcatggtggaaggcaaagaaggagcaaaaaggtatgtcttccactggcagcaggcaagagagcacgtgcagggaaactgccctttataaaaccatcagatttagtgagatgtattcactatcacgagaacagtatgggaaaaacctgcccccatgattcgattacctcctaccgggtccctcccacgacacatggggattatgggaactacaattcaagatgaaatttgggtggggacgcagccaaaccatatcgggtagcaacaacctagggtcagttttgcaggtggtaaagccatttaccaagatagttgtaggtaaagaagggcagatttattagagaaattgtgaaaatatgttgcagtgggcagctcagcagagaaggggctacctgcaaagaggcaagggctggaggaaagttttatagggtcctgctgaagggtgctacgtgtggaatgaggtcattgtgcccgcaggttgtttgtgattagctgtctctaacaattgttcatacaataattgttcattattgttctcaacttggggctctccccaacctggggacccttccttattgttgcttacttatcaggtctccacataaaggtgtggaaacttcattcattcatatcttcaacacaaattgtaggtagcctgttttttaaaacatttattcaacaaatatttagtccaagccactattacttactaccttctctactattgtatggacttttaactatctctgacactattcactattcttccacattctctattatttatacctatggtaaaatttgccagtttgaccatacaactaatactcacagggaatatatagagtctagaagaaaatatacaggtccttaaaggctgccctgccaacaaaaccataacgcaggaacaaacatcacaactatgccaaataatcaatcctacaatgtccaaaattttactttaaaactggaattaccagacttcctttctgcattaaccagtttaactagacagtaacgaaatattcctactttatgctgtgatagtttgtttgtttgtttgtttgtttatttatttatttatttatttaagacagagtttcgctcttgttgcccaggctggagtgcagtggcacgatctcagctcaccacagcctccgcctcccaggttcaagcgattctcctgcctcagcctcccgagtagctgggattacaggtatgatctcgtgaaatcttgagagaaactgaatgacgaatgaaactattgttcctgtttcacacagaagaaaactgaggttaaaaggggtaaagtaattttgcatggcatgaagtagaaattcaaagtacaggaatttgaacttggttctgtccttttctgaagcccttgaccactatagactcaaacatcaccttgtttttccactcattcaacacttttttttttaaattatctaataggttggcactcatcatgagcccctgttctcattctgcaaatggtgaagctctctattgtcctgaccccacagttcctgtcccatgaccagggccagctcaccaaggagctgcagcagcatgtaaagtcagtgacatgcccatgcgagtacctgaggaaggttatcaatactctggctgaccatcatcatcgtgggactgactttggtggaagtccttggttacatgtcattattgcatttccgacaagttataaagttgtcattaccctctggatagtttacctttgggtgtctctcctgaagactatcttctggtctcgaaatggacatgatggatccacggatgtacagcagagagcctggaggtccaaccgccgtagacaggaagggctgaggtccatttgtatgcacacaaagaaaagagtttcttcctttcgaggaaataaaattgtcctgaaagacgtcattactctacggagacatgtggaaacaaaagttagagctaaaatccgtaagaggaaggtgacaacgaaaatcaaccatcatgacaaaatcaatggaaagaggaagaccgccagaaaacagatctttaaagttgatgacaagagttccagtcctgaatcatggcaaagtgcagtagtgaactgcggggttattctggaaggatctctctatggctgatggtctcagttccggcatcaacctctgactgagaatcaggtctcacacaggaggagtcagatgaggagcaatcctctgcttccgatggagttagttgtgatgaattggtgaggaaaatgtttcaacgtgcgcaagagttgcggcggcgagcagaggactaccacaaatgcaaaatccccccttctgcaagaaaggctctttgcaactgggtcagaatggcggcagcggagcatcgtcattcttcaggattgccctactggccctacctcacagctgaaactttaaaaaacaggatgggccaccagccacctcctccaactcaacaacattctataactgataactccctgagcctcaagacacctcccgagtgtctgctcactccccttccaccctcagcggatgataatctcaagacacctcccgagtgtgtgctcactccccttccaccctcagcggatga

SEQ ID NO: 436469 - DNA, 3001 bp, Homo sapiens
acaaggtctggctctgttgcccaggttggagtgtaggagggcgatctcagctcactgtaacatcaacctcccaggctcaagcaatcctctcacttcagcctcccaaagtactgggattacaggcatgtcccaccatgcccagactaatatttacttttaatcagactaagatagggttactacttgagttgctatggctccagctgaaagaaagcccgtgcagtcatatcacgcgtaaacatttgctttatgctaaaaatatggtggacctggcattacagctattacaaatctcctaagatgtctcgggtagtgtattagttacttttcatactgctatgaagaaatactggaaactgggtaatttataaagaaaaagaggtttaatgtactcacagttccacaaggctggagaggcctcagaatcatggtggaaggcaaagaaggagcaaaaaggtatgtcttccactggcagcaggcaagagagcacgtgcagggaaactgccctttataaaaccatcagatttagtgagatgtattcactatcacgagaacagtatgggaaaaacctgcccccatgattcgattacctcctaccgggtccctcccacgacacatggggattatgggaactacaattcaagatgaaatttgggtggggacgcagccaaaccatatcgggtagcaacaacctagggtcagttttgcaggtggtaaagccatttaccaagatagttgtaggtaaagaagggcagatttattagagaaattgtgaaaatatgttgcagtgggcagctcagcagagaaggggctacctgcaaagaggcaagggctggaggaaagttttatagggtcctgctgaagggtgctacgtgtggaatgaggtcattgtgcccgcaggttgtttgtgattagctgtctctaacaattgttcatacaataattgttcattattgttctcaacttggggctctccccaacctggggacccttccttattgttgcttacttatcaggtctccacataaaggtgtggaaacttcattcattcatatcttcaacacaaattgtaggtagcctgttttttaaaacatttattcaacaaatatttagtccaagccactattacttactaccttctctactattgtatggacttttaactatctctgacactattcactattcttccacattctctattatttatacctatggtaaaatttgccagtttgaccatacaactaatactcacagggaatatatagagtctagaagaaaatatacaggtccttaaaggctgccctgccaacaaaaccataacgcaggaacaaacatcacaactatgccaaataatcaatcctacaatgtccaaaattttactttaaaactggaattaccagacttcctttctgcattaaccagtttaactagacagtaacgaaatattcctactttatgctgtgatagtttgtttgtttgtttgtttgtttatttatttatttatttatttaagacagagtttcgctcttgttgcccaggctggagtgcagtggcacgatctcagctcaccacagcctccgcctcccaggttcaagcgattctcctgcctcagcctcccgagtagctgggattacaggtatgatctcgtgaaatcttgagagaaactgaatgacgaatgaaactattgttcctgtttcacacagaagaaaactgaggttaaaaggggtaaagtaattttgcatggcatgaagtagaaattcaaagtacaggaatttgaacttggttctgtccttttctgaagcccttgaccactatagactcaaacatcaccttgtttttccactcattcaacacttttttttttaaattatctaataggttggcactcatcatgagcccctgttctcattctgcaaatggtgaagctctctattgtcctgaccccacagttcctgtcccatgaccagggccagctcaccaaggagctgcagcagcatgtaaagtcagtgacatgcccatgcgagtacctgaggaaggttatcaatactctggctgaccatcatcatcgtgggactgactttggtggaagtccttggttacatgtcattattgcatttccgacaagttataaagttgtcattaccctctggatagtttacctttgggtgtctctcctgaagactatcttctggtctcgaaatggacatgatggatccacggatgtacagcagagagcctggaggtccaaccgccgtagacaggaagggctgaggtccatttgtatgcacacaaagaaaagagtttcttcctttcgaggaaataaaattgtcctgaaagacgtcattactctacggagacatgtggaaacaaaagttagagctaaaatccgtaagaggaaggtgacaacgaaaatcaaccatcatgacaaaatcaatggaaagaggaagaccgccagaaaacagatctttaaagttgatgacaagagttccagtcctgaatcatggcaaagtgcagtagtgaactgcggggttattctggaaggatctctctatggctgatggtctcagttccggcatcaacctctgactgagaatcaggtctcacacaggaggagtcagatgaggagcaatcctctgcttccgatggagaaaatgtttcaacgtgcgcaagagttgcggcggcgagcagaggactaccacaaatgcaaaatccccccttctgcaagaaaggctctttgcaactgggtcagaatggcggcagcggagcatcgtcattcttcaggattgccctactggccctacctcacagctgaaactttaaaaaacaggatgggccaccagccacctcctccaactcaacaacattctataactgataactccctgagcctcaagacacctcccgagtgtctgctcactccccttccaccctcagcggatgataatctcaagacacctcccgagtgtgtgctcactccccttccaccctcagcggatga

SEQ ID NO: 436470 - DNA, 4000 bp, Homo sapiens
gggaatgaattggaagtaagcattatgatggtggtagaagcactatgtgaacttcattgtcctgaagctatacagggaattgctgtctggtcatcatctattgttggaaaacatcttctgtggattaactcagtggctcaacaggctgaagggaggtttgaaaaggcctctgtggagtaccaggaacacctgtgtgccatgacaggtgttgattgctgcatctccagctttgacaaatcggtgctcaccttagccagtgctgggtgtaagagtgccagcctgaaacattgtctgaatggtgaatccagaaaaagtgtgctgtccaaaccgactgactcttcccctgaggttataaattatttaggaaacaaagcatgtgagtgctacatctcaactgccgattgggctgctgtgcaggaatggcagaacgctatccatgacttgaaaaagagtaccagtagcacttccctcaacctgaaagctgacttcaactatataaaatcattaagcagctttgagtctggaaaatttgtcgaatgtaccgagcaattagaattgttaccaggagaaaatatcaatctacttgctggaggatcaaaagaaaaaatagacatgaaaaaactgcttcgtaacatgtgaagtccagatccaagggaacctcagaaatccattgaagttccattgttaagaagttctgtttgtttggcaactgctttaaacccgatagaacaagatcagaagtggcagtctataactgaaaatgtggtaaagtacttgaagcaaacatcccgcatcgctattggacctctgagactttctactttaacagtttcacagtctttgccagttctaagtaccttgcagctgtattgctcgtctgctttggagaccacagtttctaacagactttcaacagaggactgtcttattccactcttcggcgaagctttacgttcatgtaaacagcatgacgtgaggccgtggatgcaggcattaaggtatactgtgtaccagaatcagttgttggagaaaattaaagttaagtggttttccttttttttttttgtaagagaaaattaaaggtggttttttttttttaaattttgctttattgaggtttatattacacattctaagtgtatggtttgatgagttctaacatgtcttcacttgtgtgaccaccaatacgatcgagatagagaacagcgtcttaccccagaaggttcccttgggatcatctcctcatttgcccctgtcagcagttactgatttgctttctgtcactatggattagacttgtctttactaaagtttcatgtacgtgaaatcataacaacatgttctcttgtgtttggcttctcttgctcagcatgatatttttacggttcacccatattgcatgtatcaggaatataatcctttttattattgagtagtgttctattgtatgtatataccacagtttatttctcccttcatcctttgctagattttggggttttttcacattgcgctattcagtataaacctgctctcaacattcatgtgcaagtctttgagtggacatatatttgcgtttctcttgagtgaatgcaccttgttgggtcacgtggcttaacttaaaaaaattttaatcactgtggtgcatatgtagtgattattagtgattatctcataattttattttcttgtttaatgatgttgagtgtatttcatttgtattttagtttgcaaatgtttgttcaaattcttcacctgtttttaatgaagacgtacgacttatttttgtgttctgaacataagttctttgtcacataaaatgtgctatgaatgttgagttttaaatactccaaatgaatggctagagaattactatttgtagaaatatttatatgtcaaagggatgctaacaatttactttattgctctaaaatagaaaagttgccagaatgctgtggagttttagtggaaaacatgatagctggtgttactgagtaaatttgagtgttaaatgtcaatgtaagctaacggccaagatagggaccactgcagggtggttacttgcagctatgactcaactggtccttcactgccaaacatacctggggttggatcattggcctgacgtttgcaaattgaggaaccttagggcaaatcaatgaacttctgaactgccttcgtcttcagttatatggggatttccccacttttgaggtacttgtaaggattatatgagatgaagagatgagacaaggtatataaaagtcctagcacagagcgtgtcatataatatggcttcacaagtaccctcatctcctttccagtcgttttttgtttttgtttttgtttttttgagaccatctcactctgttgcccaggctggagtgcctcttcatttttatttctttattcagcaagtattgatcaaatgtgctttgtaccaggtactgagctcttcgttgggatataatggtgatcaaggagattgtagattctggcagggaaaactgacatcaaacacggcgacccgacatagtgagaccctgtctctactagaagaactttaaaaatcacctaggtgtgggccgggcacggtggctaacgcctgtaatcccagcactttgagatgctgaggcaggtggatcacgaggtcaggagatcgagaccatcctggataacacggagaaaccccgtctctactaaaaatacaaaaaaattagccgggcgtgggggcgggcatctgtagtcccaattactcgggaggctgcagcaggagaatggcatgaacccgggaggcggatcttgcattgagccaagatcacgccactgcactccagcctgggcgacagaatgagactccatctcaaaaaaaaagaagaaaccaaggatatagaataaaacaagagtgtagatttgggcattgaggccttcaaattggattgttctcaatgtccagaagaaaaaaaaaatttagaagagacccaaatcagaaaacaaaagttgggctgaattcaatgcgaattattttctagctcaatattaatactgcttatgtcagctgaatttcagcctttcaataacagctagtcaagtatttttttagttggttcctattgatcgtcatcttattttagtggaatccattatattgaagatgtcaagttcctcatttcccatacaaagaatgtgagattcatctttcttgaatctttgctaagtgttgaaggggacttttggcatcttttcaggaggactataattgggccctctaactaaaaagtctcctatgccccttagatagatgagatttttttttttgaccttgtacccaccaacattggtgggaggctcagaagggactgtgtttgtaactttgtagcactttctaaacagtgacctgttgtatgggcattataggacagtccgtggggtggggcgggggatgggggagatggacaaatgaggtctggtttaaagaatgagaagtgtgaccaggcatggtgactcatgcctgtaatccagcactttgggatgctgaggcaggaggatcacttgagcccaggagtttgaggttacagtaagctatgattgtgccactgggctccagcctgggtgacagaactagaccctgtctctaaaaaaagaagaagaggtgtgtatccttctaaatgataaaacagatcactcccctgcttacataaaactttccggtggctggccaggcacggtgtgtcacgcctgtaatcccagcactttgggaggccgtggtgggcagatcacgaggtcaggaaatcgagaccatcctggctaacgtggtgaaatcttgtctctactaaaaacacaaaaaattaacccaggtatggtggcatgcacctgtagtcccagctactcgggaggctgaggcaggagaatcgcttgaaccagggaggtggaggttgcagtgagctgagattgcgccactgcactccagcctgggtgacagagactctgtctcaaaaaa

SEQ ID NO: 436471 - DNA, 3718 bp, Homo sapiens
gtagttgggcaagctggtaaatccagaaatctaacatgctgttttcaggcagtctttcatttgggaagtacatggggcagatggaagaacctgagataatcgcaaggatggcaaattgctcagttttttcttctatttttggggtgggaggtggtgtatgtaaagacagttcctttaggcagatcacgtaaattttagatttgctgcaaacaaagatctctcctcttcatcctaaatggggtaaagttcgaccagagatgggggcttctgaatgaatggtgatcttcgagaacttcataataaagcattagttgtaatgtttttctgcagtctgctttatagtaaatgtgctgtgacttttttttttgtaatgtgctttattaagtatattgataaattagacttaatattctgaagaagatttcccttcaaaacaaaaggctttctcttactgtgtgcttgcctcttgtgagtagaagataaatgatgtaagggtatagtgtaatagataaaactactgcaatcaatctgaagtagccaaactatattgcagtcttggacttaagacttgctatatatctgcaaacatatcaacagcctgttttacgttgagtaattttggtttttctctggcaggactgtcttattccactcttcggcgaagctttacgttcatgtaaacagcatgacgtgaggccgtggatgcaggcattaaggtatactgtgtaccagaatcagttgttggagaaaattaaagttaagtggttttccttttttttttttgtaagagaaaattaaaggtggttttttttttttaaattttgctttattgaggtttatattacacattctaagtgtatggtttgatgagttctaacatgtcttcacttgtgtgaccaccaatacgatcgagatagagaacagcgtcttaccccagaaggttcccttgggatcatctcctcatttgcccctgtcagcagttactgatttgctttctgtcactatggattagacttgtctttactaaagtttcatgtacgtgaaatcataacaacatgttctcttgtgtttggcttctcttgctcagcatgatatttttacggttcacccatattgcatgtatcaggaatataatcctttttattattgagtagtgttctattgtatgtatataccacagtttatttctcccttcatcctttgctagattttggggttttttcacattgcgctattcagtataaacctgctctcaacattcatgtgcaagtctttgagtggacatatatttgcgtttctcttgagtgaatgcaccttgttgggtcacgtggcttaacttaaaaaaattttaatcactgtggtgcatatgtagtgattattagtgattatctcataattttattttcttgtttaatgatgttgagtgtatttcatttgtattttagtttgcaaatgtttgttcaaattcttcacctgtttttaatgaagacgtacgacttatttttgtgttctgaacataagttctttgtcacataaaatgtgctatgaatgttgagttttaaatactccaaatgaatggctagagaattactatttgtagaaatatttatatgtcaaagggatgctaacaatttactttattgctctaaaatagaaaagttgccagaatgctgtggagttttagtggaaaacatgatagctggtgttactgagtaaatttgagtgttaaatgtcaatgtaagctaacggccaagatagggaccactgcagggtggttacttgcagctatgactcaactggtccttcactgccaaacatacctggggttggatcattggcctgacgtttgcaaattgaggaaccttagggcaaatcaatgaacttctgaactgccttcgtcttcagttatatggggatttccccacttttgaggtacttgtaaggattatatgagatgaagagatgagacaaggtatataaaagtcctagcacagagcgtgtcatataatatggcttcacaagtaccctcatctcctttccagtcgttttttgtttttgtttttgtttttttgagaccatctcactctgttgcccaggctggagtgcctcttcatttttatttctttattcagcaagtattgatcaaatgtgctttgtaccaggtactgagctcttcgttgggatataatggtgatcaaggagattgtagattctggcagggaaaactgacatcaaacacggcgacccgacatagtgagaccctgtctctactagaagaactttaaaaatcacctaggtgtgggccgggcacggtggctaacgcctgtaatcccagcactttgagatgctgaggcaggtggatcacgaggtcaggagatcgagaccatcctggataacacggagaaaccccgtctctactaaaaatacaaaaaaattagccgggcgtgggggcgggcatctgtagtcccaattactcgggaggctgcagcaggagaatggcatgaacccgggaggcggatcttgcattgagccaagatcacgccactgcactccagcctgggcgacagaatgagactccatctcaaaaaaaaagaagaaaccaaggatatagaataaaacaagagtgtagatttgggcattgaggccttcaaattggattgttctcaatgtccagaagaaaaaaaaaatttagaagagacccaaatcagaaaacaaaagttgggctgaattcaatgcgaattattttctagctcaatattaatactgcttatgtcagctgaatttcagcctttcaataacagctagtcaagtatttttttagttggttcctattgatcgtcatcttattttagtggaatccattatattgaagatgtcaagttcctcatttcccatacaaagaatgtgagattcatctttcttgaatctttgctaagtgttgaaggggacttttggcatcttttcaggaggactataattgggccctctaactaaaaagtctcctatgccccttagatagatgagatttttttttttgaccttgtacccaccaacattggtgggaggctcagaagggactgtgtttgtaactttgtagcactttctaaacagtgacctgttgtatgggcattataggacagtccgtggggtggggcgggggatgggggagatggacaaatgaggtctggtttaaagaatgagaagtgtgaccaggcatggtgactcatgcctgtaatccagcactttgggatgctgaggcaggaggatcacttgagcccaggagtttgaggttacagtaagctatgattgtgccactgggctccagcctgggtgacagaactagaccctgtctctaaaaaaagaagaagaggtgtgtatccttctaaatgataaaacagatcactcccctgcttacataaaactttccggtggctggccaggcacggtgtgtcacgcctgtaatcccagcactttgggaggccgtggtgggcagatcacgaggtcaggaaatcgagaccatcctggctaacgtggtgaaatcttgtctctactaaaaacacaaaaaattaacccaggtatggtggcatgcacctgtagtcccagctactcgggaggctgaggcaggagaatcgcttgaaccagggaggtggaggttgcagtgagctgagattgcgccactgcactccagcctgggtgacagagactctgtctcaaaaaa

SEQ ID NO: 436472 - DNA, 3430 bp, Homo sapiens
ttttgagcctttgaaggcaactgctttttaggggtctgagacatgaaaaaactgcttcgtaacatgtgaagtccagatccaagggaacctcagaaatccattgaagttccattgttaagaagttctgtttgtttggcaactgctttaaacccgatagaacaagatcagaagtggcagtctataactgaaaatgtggtaaagtacttgaagcaaacatcccgcatcgctattggacctctgagactttctactttaacagtttcacagtctttgccagttctaagtaccttgcagctgtattgctcgtctgctttggagaccacagtttctaacagactttcaacagaggactgtcttattccactcttcggcgaagctttacgttcatgtaaacagcatgacgtgaggccgtggatgcaggcattaaggtatactgtgtaccagaatcagttgttggagaaaattaaagttaagtggttttccttttttttttttgtaagagaaaattaaaggtggttttttttttttaaattttgctttattgaggtttatattacacattctaagtgtatggtttgatgagttctaacatgtcttcacttgtgtgaccaccaatacgatcgagatagagaacagcgtcttaccccagaaggttcccttgggatcatctcctcatttgcccctgtcagcagttactgatttgctttctgtcactatggattagacttgtctttactaaagtttcatgtacgtgaaatcataacaacatgttctcttgtgtttggcttctcttgctcagcatgatatttttacggttcacccatattgcatgtatcaggaatataatcctttttattattgagtagtgttctattgtatgtatataccacagtttatttctcccttcatcctttgctagattttggggttttttcacattgcgctattcagtataaacctgctctcaacattcatgtgcaagtctttgagtggacatatatttgcgtttctcttgagtgaatgcaccttgttgggtcacgtggcttaacttaaaaaaattttaatcactgtggtgcatatgtagtgattattagtgattatctcataattttattttcttgtttaatgatgttgagtgtatttcatttgtattttagtttgcaaatgtttgttcaaattcttcacctgtttttaatgaagacgtacgacttatttttgtgttctgaacataagttctttgtcacataaaatgtgctatgaatgttgagttttaaatactccaaatgaatggctagagaattactatttgtagaaatatttatatgtcaaagggatgctaacaatttactttattgctctaaaatagaaaagttgccagaatgctgtggagttttagtggaaaacatgatagctggtgttactgagtaaatttgagtgttaaatgtcaatgtaagctaacggccaagatagggaccactgcagggtggttacttgcagctatgactcaactggtccttcactgccaaacatacctggggttggatcattggcctgacgtttgcaaattgaggaaccttagggcaaatcaatgaacttctgaactgccttcgtcttcagttatatggggatttccccacttttgaggtacttgtaaggattatatgagatgaagagatgagacaaggtatataaaagtcctagcacagagcgtgtcatataatatggcttcacaagtaccctcatctcctttccagtcgttttttgtttttgtttttgtttttttgagaccatctcactctgttgcccaggctggagtgcctcttcatttttatttctttattcagcaagtattgatcaaatgtgctttgtaccaggtactgagctcttcgttgggatataatggtgatcaaggagattgtagattctggcagggaaaactgacatcaaacacggcgacccgacatagtgagaccctgtctctactagaagaactttaaaaatcacctaggtgtgggccgggcacggtggctaacgcctgtaatcccagcactttgagatgctgaggcaggtggatcacgaggtcaggagatcgagaccatcctggataacacggagaaaccccgtctctactaaaaatacaaaaaaattagccgggcgtgggggcgggcatctgtagtcccaattactcgggaggctgcagcaggagaatggcatgaacccgggaggcggatcttgcattgagccaagatcacgccactgcactccagcctgggcgacagaatgagactccatctcaaaaaaaaagaagaaaccaaggatatagaataaaacaagagtgtagatttgggcattgaggccttcaaattggattgttctcaatgtccagaagaaaaaaaaaatttagaagagacccaaatcagaaaacaaaagttgggctgaattcaatgcgaattattttctagctcaatattaatactgcttatgtcagctgaatttcagcctttcaataacagctagtcaagtatttttttagttggttcctattgatcgtcatcttattttagtggaatccattatattgaagatgtcaagttcctcatttcccatacaaagaatgtgagattcatctttcttgaatctttgctaagtgttgaaggggacttttggcatcttttcaggaggactataattgggccctctaactaaaaagtctcctatgccccttagatagatgagatttttttttttgaccttgtacccaccaacattggtgggaggctcagaagggactgtgtttgtaactttgtagcactttctaaacagtgacctgttgtatgggcattataggacagtccgtggggtggggcgggggatgggggagatggacaaatgaggtctggtttaaagaatgagaagtgtgaccaggcatggtgactcatgcctgtaatccagcactttgggatgctgaggcaggaggatcacttgagcccaggagtttgaggttacagtaagctatgattgtgccactgggctccagcctgggtgacagaactagaccctgtctctaaaaaaagaagaagaggtgtgtatccttctaaatgataaaacagatcactcccctgcttacataaaactttccggtggctggccaggcacggtgtgtcacgcctgtaatcccagcactttgggaggccgtggtgggcagatcacgaggtcaggaaatcgagaccatcctggctaacgtggtgaaatcttgtctctactaaaaacacaaaaaattaacccaggtatggtggcatgcacctgtagtcccagctactcgggaggctgaggcaggagaatcgcttgaaccagggaggtggaggttgcagtgagctgagattgcgccactgcactccagcctgggtgacagagactctgtctcaaaaaa

SEQ ID NO: 436473 - DNA, 3265 bp, Homo sapiens
gggaatgaattggaagtaagcattatgatggtggtagaagcactatgtgaacttcattgtcctgaagctatacagggaattgctgtctggtcatcatctattgttggaaaacatcttctgtggattaactcagtggctcaacaggctgaagggaggtttgaaaaggcctctgtggagtaccaggaacacctgtgtgccatgacaggtgttgattgctgcatctccagctttgacaaatcggtgctcaccttagccagtgctgggtgtaagagtgccagcctgaaacattgtctgaatggtgaatccagaaaaagtgtgctgtccaaaccgactgactcttcccctgaggttataaattatttaggaaacaaagcatgtgagtgctacatctcaactgccgattgggctgctgtgcaggaatggcagaacgctatccatgacttgaaaaagagtaccagtagcacttccctcaacctgaaagctgacttcaactatataaaatcattaagcagctttgagtctggaaaatttgtcgaatgtaccgagcaattagaattgttaccaggagaaaatatcaatctacttgctggaggatcaaaagaaaaaatagacatgaaaaaactgcttcgtaacatgtgaagtccagatccaagggaacctcagaaatccattgaagttccattgttaagaagttctgtttgtttggcaactgctttaaacccgatagaacaagatcagaagtggcagtctataactgaaaatgtggtaaagtacttgaagcaaacatcccgcatcgctattggacctctgagactttctactttaacagtttcacagtctttgccagttctaagtaccttgcagctgtattgctcgtctgctttggagaccacagtttctaacagactttcaacagaggactgtcttattccactcttcggcgaagctttacgttcatgtaaacagcatgacgtgaggccgtggatgcaggcattaaggtatactgtgtaccagaatcagttgttggagaaaattaaagttaagtggttttccttttttttttttgtaagagaaaattaaaggtggttttttttttttaaattttgctttattgaggtttatattacacattctaagtgtatggtttgatgagttctaacatgtcttcacttgtgtgaccaccaatacgatcgagatagagaacagcgtcttaccccagaaggttcccttgggatcatctcctcatttgcccctgtcagcagttactgatttgctttctgtcactatggattagacttgtctttactaaagtttcatgtacgtgaaatcataacaacatgttctcttgtgtttggcttctcttgctcagcatgatatttttacggttcacccatattgcatgtatcaggaatataatcctttttattattgagtagtgttctattgtatgtatataccacagtttatttctcccttcatcctttgctagattttggggttttttcacattgcgctattcagtataaacctgctctcaacattcatgtgcaagtctttgagtggacatatatttgcgtttctcttgagtgaatgcaccttgttgggtcacgtggcttaacttaaaaaaattttaatcactgtggtgcatatgtagtgattattagtgattatctcataattttattttcttgtttaatgatgttgagtgtatttcatttgtattttagtttgcaaatgtttgttcaaattcttcacctgtttttaatgaagacgtacgacttatttttgtgttctgaacataagttctttgtcacataaaatgtgctatgaatgttgagttttaaatactccaaatgaatggctagagaattactatttgtagaaatatttatatgtcaaagggatgctaacaatttactttattgctctaaaatagaaaagttgccagaatgctgtggagttttagtggaaaacatgatagctggtgttactgagtaaatttgagtgttaaatgtcaatgtaagctaacggccaagatagggaccactgcagggtggttacttgcagctatgactcaactggtccttcactgccaaacataccctgggcgacagaatgagactccatctcaaaaaaaaagaagaaaccaaggatatagaataaaacaagagtgtagatttgggcattgaggccttcaaattggattgttctcaatgtccagaagaaaaaaaaaatttagaagagacccaaatcagaaaacaaaagttgggctgaattcaatgcgaattattttctagctcaatattaatactgcttatgtcagctgaatttcagcctttcaataacagctagtcaagtatttttttagttggttcctattgatcgtcatcttattttagtggaatccattatattgaagatgtcaagttcctcatttcccatacaaagaatgtgagattcatctttcttgaatctttgctaagtgttgaaggggacttttggcatcttttcaggaggactataattgggccctctaactaaaaagtctcctatgccccttagatagatgagatttttttttttgaccttgtacccaccaacattggtgggaggctcagaagggactgtgtttgtaactttgtagcactttctaaacagtgacctgttgtatgggcattataggacagtccgtggggtggggcgggggatgggggagatggacaaatgaggtctggtttaaagaatgagaagtgtgaccaggcatggtgactcatgcctgtaatccagcactttgggatgctgaggcaggaggatcacttgagcccaggagtttgaggttacagtaagctatgattgtgccactgggctccagcctgggtgacagaactagaccctgtctctaaaaaaagaagaagaggtgtgtatccttctaaatgataaaacagatcactcccctgcttacataaaactttccggtggctggccaggcacggtgtgtcacgcctgtaatcccagcactttgggaggccgtggtgggcagatcacgaggtcaggaaatcgagaccatcctggctaacgtggtgaaatcttgtctctactaaaaacacaaaaaattaacccaggtatggtggcatgcacctgtagtcccagctactcgggaggctgaggcaggagaatcgcttgaaccagggaggtggaggttgcagtgagctgagattgcgccactgcactccagcctgggtgacagagactctgtctcaaaaaa

SEQ ID NO: 436474 - DNA, 2784 bp, Homo sapiens
  misc_feature (80)..(80): n is a, c, g, or t
agagtccccttcttaatatagaaagaaatcccgggcctgcagtagagtgataggactttctatgcttccagcaaatatanccatgatggaaatcaaatagtaaaggctgttctgcctttttatcttcttagctcatcttaaataagtagtacacttggatgcagtgcgtctgaagtgctaatcagttgtaacaataggacaactactacccggttgtagttgttctattgtatgtatataccacagtttatttctcccttcatcctttgctagattttggggttttttcacattgcgctattcagtataaacctgctctcaacattcatgtgcaagtctttgagtggacatatatttgcgtttctcttgagtgaatgcaccttgttgggtcacgtggcttaacttaaaaaaattttaatcactgtggtgcatatgtagtgattattagtgattatctcataattttattttcttgtttaatgatgttgagtgtatttcatttgtattttagtttgcaaatgtttgttcaaattcttcacctgtttttaatgaagacgtacgacttatttttgtgttctgaacataagttctttgtcacataaaatgtgctatgaatgttgagttttaaatactccaaatgaatggctagagaattactatttgtagaaatatttatatgtcaaagggatgctaacaatttactttattgctctaaaatagaaaagttgccagaatgctgtggagttttagtggaaaacatgatagctggtgttactgagtaaatttgagtgttaaatgtcaatgtaagctaacggccaagatagggaccactgcagggtggttacttgcagctatgactcaactggtccttcactgccaaacatacctggggttggatcattggcctgacgtttgcaaattgaggaaccttagggcaaatcaatgaacttctgaactgccttcgtcttcagttatatggggatttccccacttttgaggtacttgtaaggattatatgagatgaagagatgagacaaggtatataaaagtcctagcacagagcgtgtcatataatatggcttcacaagtaccctcatctcctttccagtcgttttttgtttttgtttttgtttttttgagaccatctcactctgttgcccaggctggagtgcctcttcatttttatttctttattcagcaagtattgatcaaatgtgctttgtaccaggtactgagctcttcgttgggatataatggtgatcaaggagattgtagattctggcagggaaaactgacatcaaacacggcgacccgacatagtgagaccctgtctctactagaagaactttaaaaatcacctaggtgtgggccgggcacggtggctaacgcctgtaatcccagcactttgagatgctgaggcaggtggatcacgaggtcaggagatcgagaccatcctggataacacggagaaaccccgtctctactaaaaatacaaaaaaattagccgggcgtgggggcgggcatctgtagtcccaattactcgggaggctgcagcaggagaatggcatgaacccgggaggcggatcttgcattgagccaagatcacgccactgcactccagcctgggcgacagaatgagactccatctcaaaaaaaaagaagaaaccaaggatatagaataaaacaagagtgtagatttgggcattgaggccttcaaattggattgttctcaatgtccagaagaaaaaaaaaatttagaagagacccaaatcagaaaacaaaagttgggctgaattcaatgcgaattattttctagctcaatattaatactgcttatgtcagctgaatttcagcctttcaataacagctagtcaagtatttttttagttggttcctattgatcgtcatcttattttagtggaatccattatattgaagatgtcaagttcctcatttcccatacaaagaatgtgagattcatctttcttgaatctttgctaagtgttgaaggggacttttggcatcttttcaggaggactataattgggccctctaactaaaaagtctcctatgccccttagatagatgagatttttttttttgaccttgtacccaccaacattggtgggaggctcagaagggactgtgtttgtaactttgtagcactttctaaacagtgacctgttgtatgggcattataggacagtccgtggggtggggcgggggatgggggagatggacaaatgaggtctggtttaaagaatgagaagtgtgaccaggcatggtgactcatgcctgtaatccagcactttgggatgctgaggcaggaggatcacttgagcccaggagtttgaggttacagtaagctatgattgtgccactgggctccagcctgggtgacagaactagaccctgtctctaaaaaaagaagaagaggtgtgtatccttctaaatgataaaacagatcactcccctgcttacataaaactttccggtggctggccaggcacggtgtgtcacgcctgtaatcccagcactttgggaggccgtggtgggcagatcacgaggtcaggaaatcgagaccatcctggctaacgtggtgaaatcttgtctctactaaaaacacaaaaaattaacccaggtatggtggcatgcacctgtagtcccagctactcgggaggctgaggcaggagaatcgcttgaaccagggaggtggaggttgcagtgagctgagattgcgccactgcactccagcctgggtgacagagactctgtctcaaaaaa

SEQ ID NO: 436475 - DNA, 2708 bp, Homo sapiens
gggaatgaattggaagtaagcattatgatggtggtagaagcactatgtgaacttcattgtcctgaagctatacagggaattgctgtctggtcatcatctattgttggaaaacatcttctgtggattaactcagtggctcaacaggctgaagggaggtttgaaaaggcctctgtggagtaccaggaacacctgtgtgccatgacaggtgttgattgctgcatctccagctttgacaaatcggtgctcaccttagccagtgctgggtgtaagagtgccagcctgaaacattgtctgaatggtgaatccagaaaaagtgtgctgtccaaaccgactgactcttcccctgaggttataaattatttaggaaacaaagcatgtgagtgctacatctcaactgccgattgggctgctgtgcaggaatggcagaacgctatccatgacttgaaaaagagtaccagtagcacttccctcaacctgaaagctgacttcaactatataaaatcattaagcagctttgagtctggaaaatttgtcgaatgtaccgagcaattagaattgttaccaggagaaaatatcaatctacttgctggaggatcaaaagaaaaaatagacatgaaaaaactgcttcgtaacatgtgaagtccagatccaagggaacctcagaaatccattgaagttccattgttaagaagttctgtttgtttggcaactgctttaaacccgatagaacaagatcagaagtggcagtctataactgaaaatgtggtaaagtacttgaagcaaacatcccgcatcgctattggacctctgagactttctactttaacagtttcacagtctttgccagttctaagtaccttgcagctgtattgctcgtctgctttggagaccacagtttctaacagactttcaacagaggactgtcttattccactcttcggcgaagctttacgttcatgtaaacagcatgacgtgaggccgtggatgcaggcattaaggtatactgtgtaccagaatcagttgttggagaaaattaaagttaagtggttttccttttttttttttgtaagagaaaattaaaggtggttttttttttttaaattttgctttattgaggtttatattacacattctaagtgtatggtttgatgagttctaacatgtcttcacttgtgtgaccaccaatacgatcgagatagagaacagcgtcttaccccagaaggttcccttgggatcatctcctcatttgcccctgtcagcagttactgatttgctttctgtcactatggattagacttgtctttactaaagtttcatgtacgtgaaatcataacaacatgttctcttgtgtttggcttctcttgctcagcatgatatttttacggttcacccatattgcatgtatcaggaatataatcctttttattattgagtagtgttctattgtatgtatataccacagtttatttctcccttcatcctttgctagattttggggttttttcacattgcgctattcagtataaacctgctctcaacattcatcctgggcgacagaatgagactccatctcaaaaaaaaagaagaaaccaaggatatagaataaaacaagagtgtagatttgggcattgaggccttcaaattggattgttctcaatgtccagaagaaaaaaaaaatttagaagagacccaaatcagaaaacaaaagttgggctgaattcaatgcgaattattttctagctcaatattaatactgcttatgtcagctgaatttcagcctttcaataacagctagtcaagtatttttttagttggttcctattgatcgtcatcttattttagtggaatccattatattgaagatgtcaagttcctcatttcccatacaaagaatgtgagattcatctttcttgaatctttgctaagtgttgaaggggacttttggcatcttttcaggaggactataattgggccctctaactaaaaagtctcctatgccccttagatagatgagatttttttttttgaccttgtacccaccaacattggtgggaggctcagaagggactgtgtttgtaactttgtagcactttctaaacagtgacctgttgtatgggcattataggacagtccgtggggtggggcgggggatgggggagatggacaaatgaggtctggtttaaagaatgagaagtgtgaccaggcatggtgactcatgcctgtaatccagcactttgggatgctgaggcaggaggatcacttgagcccaggagtttgaggttacagtaagctatgattgtgccactgggctccagcctgggtgacagaactagaccctgtctctaaaaaaagaagaagaggtgtgtatccttctaaatgataaaacagatcactcccctgcttacataaaactttccggtggctggccaggcacggtgtgtcacgcctgtaatcccagcactttgggaggccgtggtgggcagatcacgaggtcaggaaatcgagaccatcctggctaacgtggtgaaatcttgtctctactaaaaacacaaaaaattaacccaggtatggtggcatgcacctgtagtcccagctactcgggaggctgaggcaggagaatcgcttgaaccagggaggtggaggttgcagtgagctgagattgcgccactgcactccagcctgggtgacagagactctgtctcaaaaaa

SEQ ID NO: 436476 - DNA, 2460 bp, Homo sapiens
acaaggtctggctctgttgcccaggttggagtgtaggagggcgatctcagctcactgtaacatcaacctcccaggctcaagcaatcctctcacttcagcctcccaaagtactgggattacaggcatgtcccaccatgcccagactaatatttacttttaatcagactaagatagggttactacttgagttgctatggctccagctgaaagaaagcccgtgcagtcatatcacgcgtaaacatttgctttatgctaaaaatatggtggacctggcattacagctattacaaatctcctaagatgtctcgggtagtgtattagttacttttcatactgctatgaagaaatactggaaactgggtaatttataaagaaaaagaggtttaatgtactcacagttccacaaggctggagaggcctcagaatcatggtggaaggcaaagaaggagcaaaaaggtatgtcttccactggcagcaggcaagagagcacgtgcagggaaactgccctttataaaaccatcagatttagtgagatgtattcactatcacgagaacagtatgggaaaaacctgcccccatgattcgattacctcctaccgggtccctcccacgacacatggggattatgggaactacaattcaagatgaaatttgggtggggacgcagccaaaccatatcgggtagcaacaacctagggtcagttttgcaggtggtaaagccatttaccaagatagttgtaggtaaagaagggcagatttattagagaatgtgcccgcaggttgtttgtgattagctgtctctaacaattgttcatacaataattgttcattattgttctcaacttggggctctccccaacctggggacccttccttattgttgcttacttatcaggtctccacataaaggtgtggaaacttcattcattcatatcttcaacacaaattgtaggtagcctgttttttaaaacatttattcaacaaatatttagtccaagccactattacttactaccttctctactattgtatggacttttaactatctctgacactattcactattcttccacattctctattatttatacctatggtaaaatttgccagtttgaccatacaactaatactcacagggaatatatagagtctagaagaaaatatacaggtccttaaaggctgccctgccaacaaaaccataacgcaggaacaaacatcacaactatgccaaataatcaatcctacaatgtccaaaattttactttaaaactggaattaccagacttcctttctgcattaaccagtttaactagacagtaacgaaatattcctactttatgctgtgatagtttgtttgtttgtttgtttgtttatttatttatttatttatttaagacagagtttcgctcttgttgcccaggctggagtgcagtggcacgatctcagctcaccacagcctccgcctcccaggttcaagcgattctcctgcctcagcctcccgagtagctgggattacaggcatgagccaccgtgcctggccagaaaattgtaaacacacacaaactctcaagtggcctaattccctctcaccaaaccaatcacaatacagataaaagagaataacttgtgttcatttttgtacaaacaaaaaagatataaattgtgaatgatgcatgatttttaattacaagtaaactgggcaaatgcttctgcattatttaaagctaaaaggtgatcagtggaaactttcctctgttagtactctaatactttttatatttatcggctcactacaacctgtgcctaccaggttcaagcgattctcctgtctcagccacctgagtagccgagaccacaggcacgcactaccatgtccggctaattttgtatttttaatagagacagggtttcaccgtgttggccatgctggtcttgaactcctgacctcaaccgatccgcctgccttggcctcccaaagttctgggattacaagcgtgagccacagcgcccagccttattataattgttactatttaaatctcttttgctctctccttcaagagagacctcatcccattcagttgcttccatttatttattcatcttctgcctcctgggctcgagagatcctccagcgtgagtctcccaagtagctgggactacaggctcacaccaccaagcttggctaaattttgtaggttttggagagacaggctcttgccacgttgcctaggctggtctcaaactcctgggctcagatgatccacctgccttcgcctcccaaagcactgggacatgagccaccacgcccagccgcaagtacttttacacaaaatgcaaacaccattcttccatcataaaagtgataccacagcttccgtgaagttttgccaggtagtactcataattaccttgggtaaactttttgatgttaaactgtatcttcttattacgagtttt

SEQ ID NO: 436477 - DNA, 2018 bp, Homo sapiens
gggaatgaattggaagtaagcattatgatggtggtagaagcactatgtgaacttcattgtcctgaagctatacagggaattgctgtctggtcatcatctattgttggaaaacatcttctgtggattaactcagtggctcaacaggctgaagggaggtttgaaaaggcctctgtggagtaccaggaacacctgtgtgccatgacaggtgttgattgctgcatctccagctttgacaaatcggtgctcaccttagccagtgctgggtgtaagagtgccagcctgaaacattgtctgaatggtgaatccagaaaaagtgtgctgtccaaaccgactgactcttcccctgaggttataaattatttaggaaacaaagcatgtgagtgctacatctcaactgccgattgggctgctgtgcaggaatggcagaacgctatccatgacttgaaaaagagtaccagtagcacttccctcaacctgaaagctgacttcaactatataaaatcattaagcagctttgagtctggaaaatttgtcgaatgtaccgagcaattagaattgttaccaggagaaaatatcaatctacttgctggaggatcaaaagaaaaaatagacatgaaaaaactgcttcgtaacatgtgaagtccagatccaagggaacctcagaaatccattgaagttccattgttaagaagttctgtttgtttggcaactgctttaaacccgatagaacaagatcagaagtggcagtctataactgaaaatgtggtaaagtacttgaagcaaacatcccgcatcgctattggacctctgagactttctactttaacagtttcacagtctttgccagttctaagtaccttgcagctgtattgctcgtctgctttggagaccacagtttctaacagactttcaacagaggactgtcttattccactcttcggcgaagctttacgttcatgtaaacagcatgacgtgaggccgtggatgcaggcattaaggtatactgtgtaccagaatcagttgttggagaaaattaaagttaagtggttttccttttttttttttgtaagagaaaattaaaggtggttttttttttttaaattttgctttattgaggtttatattacacattctaagtgtatggtttgatgagttctaacatgtcttcacttgtgtgaccaccaatacgatcgagatagagaacagcgtcttaccccagaaggttcccttgggatcatctcctcatttgcccctgtcagcagttactgatttgctttctgtcactatggattagacttgtctttactaaagtttcatgtacgtgaaatcataacaacatgttctcttgtgtttggcttctcttgctcagcatgatatttttacggttcacccatattgcatgtatcaggaatataatcctttttattattgagtagtgttctattgtatgtatataccacagtttatttctcccttcatcctttgctagattttggggttttttcacattgcgctattcagtataaacctgctctcaacattcatgtgcaagtctttgagtggacatatatttgcgtttctcttgagtgaatgcaccttgttgggtcacgtggcttaacttaaaaaaattttaatcactgtggtgcatatgtagtgattattagtgattatctcataattttattttcttgtttaatgatgttgagtgtatttcatttgtattttagtttgcaaatgtttgttcaaattcttcacctgtttttaatgaagacgtacgacttatttttgtgttctgaacataagttctttgtcacataaaatgtgctatgaatgttgagttttaaatactcgtgcagtggctcacacctgtattcccagcactttgggaggccaaggcaggtggatcatgaggtcaggagttggagaccagcctggccaagatggtgaaaccctgtttctactaaaaatacaaaaattagccgagcgtggtggcaggcgcctgtaatcccagttactca

SEQ ID NO: 436478 - DNA, 1693 bp, Homo sapiens
acgggtagattttggaacattttggattttattctttttttttgagacagagttttgcttctgttgcccaggctggagtgcctcttcatttttatttctttattcagcaagtattgatcaaatgtgctttgtaccaggtactgagctcttcgttgggatataatggtgatcaaggagattgtagattctggcagggaaaactgacatcaaacacggcgacccgacatagtgagaccctgtctctactagaagaactttaaaaatcacctaggtgtgggccgggcacggtggctaacgcctgtaatcccagcactttgagatgctgaggcaggtggatcacgaggtcaggagatcgagaccatcctggataacacggagaaaccccgtctctactaaaaatacaaaaaaattagccgggcgtgggggcgggcatctgtagtcccaattactcgggaggctgcagcaggagaatggcatgaacccgggaggcggatcttgcattgagccaagatcacgccactgcactccagcctgggcgacagaatgagactccatctcaaaaaaaaagaagaaaccaaggatatagaataaaacaagagtgtagatttgggcattgaggccttcaaattggattgttctcaatgtccagaagaaaaaaaaaatttagaagagacccaaatcagaaaacaaaagttgggctgaattcaatgcgaattattttctagctcaatattaatactgcttatgtcagctgaatttcagcctttcaataacagctagtcaagtatttttttagttggttcctattgatcgtcatcttattttagtggaatccattatattgaagatgtcaagttcctcatttcccatacaaagaatgtgagattcatctttcttgaatctttgctaagtgttgaaggggacttttggcatcttttcaggaggactataattgggccctctaactaaaaagtctcctatgccccttagatagatgagatttttttttttgaccttgtacccaccaacattggtgggaggctcagaagggactgtgtttgtaactttgtagcactttctaaacagtgacctgttgtatgggcattataggacagtccgtggggtggggcgggggatgggggagatggacaaatgaggtctggtttaaagaatgagaagtgtgaccaggcatggtgactcatgcctgtaatccagcactttgggatgctgaggcaggaggatcacttgagcccaggagtttgaggttacagtaagctatgattgtgccactgggctccagcctgggtgacagaactagaccctgtctctaaaaaaagaagaagaggtgtgtatccttctaaatgataaaacagatcactcccctgcttacataaaactttccggtggctggccaggcacggtgtgtcacgcctgtaatcccagcactttgggaggccgtggtgggcagatcacgaggtcaggaaatcgagaccatcctggctaacgtggtgaaatcttgtctctactaaaaacacaaaaaattaacccaggtatggtggcatgcacctgtagtcccagctactcgggaggctgaggcaggagaatcgcttgaaccagggaggtggaggttgcagtgagctgagattgcgccactgcactccagcctgggtgacagagactctgtctcaaaaaa

SEQ ID NO: 436479 - DNA, 2404 bp, Homo sapiens
ttttttgagacagagactcactctgtcacccaggctggagtgcagtggcatgattttggctcactgcaacctccacctcctgagttcaaacaattatcctgcctcatccttcggagtacctgggattacaggtgcgtgccaccgtgcccggctcatttttgtattcttagtagagacggcatttcaccatgttggccaggctggtctcaaactcctggcctcaactgatccactctcattggccttccaaggtgctgggattataggcgtgagccaccacaactggctcagtaaatacattttttattatcaaaaaagagtagtgtatggttggcgtattctgtgtagaatgtattttattgatgtctcctatttttataatttctgagttaagtactttttaattaatgctttttagttttgggcagattcagttgactaaagcacctcatttcccagatacatgaaataaaatatttggcttcttttccaatttcacactgatgttattttgtgaaaatcagtgctttaagataaatcgttatacgttaagataaacatgagaaacttgatctaatatttaatatttattcagttctacactttattaacttctacaccagcagatttagacattatgtaaccatctcaagaagtttcacttggatgtaatgcttcacgcttgtaatcccagcactttaggaggctgaggtgggaggactgcttaaggcaaggagtctgagaccagcctgggcaatacagcaagatcccatctctattttaaagaaaagtttcactttgggaggccaaggcgggtggatcacaaggtgagtttgagaccagcctaggcaacgtggcaagagcctgtctctccaaaacctacaaaatttagccaagcttggtggtgtgagcctgtagtcccagctacttgggagactcacgctggaggatctctcgagcccaggaggcagaagatgaataaataaatggaagcaactgaatgggatgaggtctctcttgaaggagagagcaaaagagatttaaatagtaacaattataataaggctgggcgcggtggctcacgcttgtaatcccagaactttgggaggccaaggcaggcggatcggttgaggtcaggagttcaagaccagcatggccaacacggtgaaaccctgtctctattaaaaatacaaaattagccggacatggtagtgcgtgcctgtggtctcggctactcaggtggctgagacaggagaatcgcttgaacctggtaggcacaggttgtagtgagccgataaatataaaaagtattagagtactaacagaggaaagtttccactgatcaccttttagctttaaataatgcagaagcatttgcccagtttacttgtaattaaaaatcatgcatcattcacaatttatatcttttttgtttgtacaaaaatgaacacaagttattctcttttatctgtattgtgattggtttggtgagagggaattaggccacttgagagtttgtgtgtgtttacaattttctggccaggcacggtggctcatgcctgtaatcccagcactttgggaggccaaggcgggcggatcacttgagctcaggagttcgagaccaaattgggcaacatggtgaaaccctatctctacgaaaaatacaaaaattagctgagtgccgtggcttgcgcctgtcctcccagctacttggggggctgaggcagtaggatcgctcaagcccaggaggtggaggttgcagtgagccaagatcacgtcactgcactccaggaagggcaacagagcaagactccttctaaaaaaaaaaaaaaaaaaagaaagaaagaaaagaaaattaactttggtatttcaggttgtatttaaatggagacttaacatgaactatgttcataacacttgaccaaattaagtgtagatcgtctctttaataaagagatcatctggaactgcaatttctaactcatacatcattgctacaaaccttatttgtttactatttctcttccaaggaccatcagtcatcctttaaaattcatttcaagctctgaaaagatattttttgttacatgggcaatttacttttagtacagtaaaatgttatgtgaatttctacagtatgtttgccaaaatgaattatatctagaatacgcttaacaatatattctggaggcagctttcatttgaaattaggttcaccttctgagagtatgaaaaagttaatgggtttttgtgcctgaagattttgatgttgcatttggctacatttaatccactttcacccataagttttaacatctaaaaaaattaaatcactgctaatgcaattaaaatgcattatgaaatgcatttctgtccaggctggagtgcagtggcacaatctcgg

SEQ ID NO: 436480 - DNA, 1826 bp, Homo sapiens
gtgggcggatcacaaggtcaggagttccagaccagcctggccaatatggtgaaaccctgtctctaataaaatacaaaaattagccgggtgtggtggtgggcgcctgtagtcccacctacttgggaggctgaggcaggagaatagtttgaacccgggaggcagagtctgcagtgagccgagattgcaccactgcactccagcctaggcgacagagcgagactctgtctcaaaaacagcaacaactacaaacaaacaaaaaacagggttaacaaaagtatggaattcaattctttttatatgctgcagccatgttcctgccctagatttggctgggcatgtggctcagtaaatacattttttattatcaaaaaagagtagtgtatggttggcgtattctgtgtagaatgtattttattgatgtctcctatttttataatttctgagttaagtactttttaattaatgctttttagttttgggcagattcagttgactaaagcacctcatttcccagatacatgaaataaaatatttggcttcttttccaatttcacactgatgttattttgtgaaaatcagtgctttaagataaatcgttatacgttaagataaacatgagaaacttgatctaatatttaatatttattcagttctacactttattaacttctacaccagcagatttagacattatgtaaccatctcaagaagtttcacttggatgtaatgcttcacgcttgtaatcccagcactttaggaggctgaggtgggaggactgcttaaggcaaggagtctgagaccagcctgggcaatacagcaagatcccatctctattttaaagaaaagtttcactttgggaggccaaggcgggtggatcacaaggtgcatgagccaccgtgcctggccagaaaattgtaaacacacacaaactctcaagtggcctaattccctctcaccaaaccaatcacaatacagataaaagagaataacttgtgttcatttttgtacaaacaaaaaagatataaattgtgaatgatgcatgatttttaattacaagtaaactgggcaaatgcttctgcattatttaaagctaaaaggtgatcagtggaaactttcctctgttagtactctaatactttttatatttatcggctcactacaacctgtgcctaccaggttcaagcgattctcctgtctcagccacctgagtagccgagaccacaggcacgcactaccatgtccggctaattttgtatttttaatagagacagggtttcaccgtgttggccatgctggtcttgaactcctgacctcaaccgatccgcctgccttggcctcccaaagttctgggattacaagcgtgagccacagcgcccagccttattataattgttactatttaaatctcttttgctctctccttcaagagagacctcatcccattcagttgcttccatttatttattcatcttctgcctcctgggctcgagagatcctccagcgtgagtctcccaagtagctgggactacaggctcacaccaccaagcttggctaaattttgtaggttttggagagacaggctcttgccacgttgcctaggctggtctcaaactcctgggctcagatgatccacctgccttcgcctcccaaagcactgggacatgagccaccacgcccagccgcaagtacttttacacaaaatgcaaacaccattcttccatcataaaagtgataccacagcttccgtgaagttttgccaggtagtactcataattaccttgggtaaactttttgatgttaaactgtatcttcttattacgagtttt

SEQ ID NO: 436481 - DNA, 1896 bp, Homo sapiens
ttttttgagacagagactcactctgtcacccaggctggagtgcagtggcatgattttggctcactgcaacctccacctcctgagttcaaacaattatcctgcctcatccttcggagtacctgggattacaggtgcgtgccaccgtgcccggctcatttttgtattcttagtagagacggcatttcaccatgttggccaggctggtctcaaactcctggcctcaactgatccactctcattggccttccaaggtgctgggattataggcgtgagccaccacaactggctcagtaaatacattttttattatcaaaaaagagtagtgtatggttggcgtattctgtgtagaatgtattttattgatgtctcctatttttataatttctgagttaagtactttttaattaatgctttttagttttgggcagattcagttgactaaagcacctcatttcccagatacatgaaataaaatatttggcttcttttccaatttcacactgatgttattttgtgaaaatcagtgctttaagataaatcgttatacgttaagataaacatgagaaacttgatctaatatttaatatttattcagttctacactttattaacttctacaccagcagatttagacattatgtaaccatctcaagaagtttcacttggatgtaatgcttcacgcttgtaatcccagcactttaggaggctgaggtgggaggactgcttaaggcaaggagtctgagaccagcctgggcaatacagcaagatcccatctctattttaaagaaaagtttcactttgggaggccaaggcgggtggatcacaaggtgagtttgagaccagcctaggcaacgtggcaagagcctgtctctccaaaacctacaaaatttagccaagcttggtggtgtgagcctgtagtcccagctacttgggagactcacgctggaggatctctcgagcccaggaggcagaagatgaataaataaatggaagcaactgaatgggatgaggtctctcttgaaggagagagcaaaagagatttaaatagtaacaattataataaggctgggcgcggtggctcacgcttgtaatcccagaactttgggaggccaaggcaggcggatcggttgaggtcaggagttcaagaccagcatggccaacacggtgaaaccctgtctctattaaaaatacaaaattagccggacatggtagtgcgtgcctgtggtctcggctactcaggtggctgagacaggagaatcgcttgaacctggtaggcacaggttgtagtgagccgataaatataaaaagtattagagtactaacagaggaaagtttccactgatcaccttttagctttaaataatgcagaagcatttgcccagtttacttgtaattaaaaatcatgcatcattcacaatttatatcttttttgtttgtacaaaaatgaacacaagttattctcttttatctgtattgtgattggtttggtgagagggaattaggccacttgagagtttgtgtgtgtttacaattttctggccaggcacggtggctcatgcctgtaatcccagcactttgggaggccaaggcgggcggatcacttgagctcaggagttcgagaccaaattgggcaacatggtgaaaccctatctctacgaaaaatacaaaaattagctggatgtggtggcagcacttgtagtcccagctacttgggtggctgaggcaggagaatggcgtgaacccgggaggcagagtttgcagtgagccgagatcccaccactgcactccagcttaggcgacagagccagactgtgtctcaaaaacaggaaagaaaacaaaagaaaatttggactattgccaattacaaatatttttagagaagaattcaaaacagta

SEQ ID NO: 436482 - DNA, 2002 bp, Homo sapiens
  misc_feature (1212)..(1212): n is a, c, g, or t
  misc_feature (1464)..(1464): n is a, c, g, or t
gagacagagtctcactctgtcacccaggctagagtgcagtggcatgatcttggctcactgcaacctccacctcccaggttcaagcgattcttatccctcagcctcttgagtagctgggactacaggcatatgccaccatgcccggataatttttgtatttttagtagaggcggggtttcaccatattggccaagctggtctagaactcctgacatgatccgcacacctcggcctcccaatgtgctgggattacctccagattcattttcacagtctttcatgttttggtcatatgacattgtattttgctgccatatgactgatctttttttgttaaatgtgagatacttgttaaaaaatgtttagcaatgaattgaggcctagtagcatgttatcttgctgcagaagagatgggagtctacttctgggggatggtcaggggtcctccatacaagctgcaattgaagtcgtcggtgcaggctcagtccctacaaaggccagggtatttcctgtccacctttattctgatgcatgactcttctgggtctcaaccagagccagcggacttcagtatgggtcgctttcattggcagaccctcaatccacttgttttccatctaatcccacgcatgtgtgcaaaagctgctgtgcttctttgcatctcagtagttccttctggaattcagcaatgaactcagggaaatgggttccaaatgcgaggctgactttcgtcctgggtttccttcttctccatcttcacctcatgtctgtttactgccatgttagcaatttgatgtattcaatcatgggttttatattctgtttggtgtcccccattgttctcattggagatcagaagcttcagatgcacttatgtcaactcaagagtagaatgcttccttagcttccctccagagtcaggttttgtgtttctagttcccaagtgcacagcaggagtagtgatgtcctcactggcttctcatttgcattaagctgtgagcttctttagcgtggggacaggaccctgctcccattgcattctcagcaccacaccacacactccttgtttgaggccactccagacagcatgtgctgaaggatgccttgtggtcagaaacaagttcattaactttctctttgaagtgttttcgcccctgtttcctagcgttctgggaattttacacatccttcctataaagccaagtatcaggngagatccttaggatcaggaccatgaatcaagtggtgtgagggcaacacagcaaacttaccctttttaggccgtttcctttttctgccctcaatctctgtgaactgaaccttgttaaagtcagtcaacaccagggtggatggtttgccgttgtcacctattttcaggacataacaccctgacttaggagccattccgatcatttctaattcaatagatgcgcccagcattcagattgccttttctctcaaccnggatctttaaagttgatgacaagagttccagtcctgaatcatggcaaagtgcagtagtgaactgcggggttattctggaaggatctctctatggctgatggtctcagttccggcatcaacctctgactgagaatcaggtctcacacaggaggagtcagatgaggagcaatcctctgcttccgatggagaaaatgtttcaacgtgcgcaagagttgcggcggcgagcagaggactaccacaaatgcaaaatccccccttctgcaagaaaggctctttgcaactgggtcagaatggcggcagcggagcatcgtcattcttcaggattgccctactggccctacctcacagctgaaactttaaaaaacaggatgggccaccagccacctcctccaactcaacaacattctataactgataactccctgagcctcaagacacctcccgagtgtctgctcactccccttccaccctcagcggatgataatctcaagacacctcccgagtgtgtgctcactccccttccaccctcagcggatga

SEQ ID NO: 436483 - DNA, 1917 bp, Homo sapiens
tgtataatttatctgaatgtaataggcattaatatattttacattactgggaccatagtacagaaatttctaaatggtttgtaaaataacttgttatttgtgttgttgtaaaagcagttaatacaatggaaaaactcgtaataagaagatacagtttaacatcaaaaagtttacccaaggtaattatgagtactacctggcaaaacttcacggaagctgtggtatcacttttatgatggaagaatggtgtttgcattttgtgtaaaagtacttgcggctgggcgtggtggctcatgtcccagtgctttgggaggcgaaggcaggtggatcatctgagcccaggagtttgagaccagcctaggcaacgtggcaagagcctgtctctccaaaacctacaaaatttagccaagcttggtggtgtgagcctgtagtcccagctacttgggagactcacgctggaggatctctcgagcccaggaggcagaagatgaataaataaatggaagcaactgaatgggatgaggtctctcttgaaggagagagcaaaagagatttaaatagtaacaattataataaggctgggcgcggtggctcacgcttgtaatcccagaactttgggaggccaaggcaggcggatcggttgaggtcaggagttcaagaccagcatggccaacacggtgaaaccctgtctctattaaaaatacaaaattagccggacatggtagtgcgtgcctgtggtctcggctactcaggtggctgagacaggagaatcgcttgaacctggtaggcacaggttgtagtgagccgataaatataaaaagtattagagtactaacagaggaaagtttccactgatcaccttttagctttaaataatgcagaagcatttgcccagtttacttgtaattaaaaatcatgcatcattcacaatttatatcttttttgtttgtacaaaaatgaacacaagttattctcttttatctgtattgtgattggtttggtgagagggaattaggccacttgagagtttgtgtgtgtttacaattttctggccaggcacggtggctcatgcctgtaatcccagcactttgggaggccaaggcgggcggatcacttgagctcaggagttcgagaccaaattgggcaacatggtgaaaccctatctctacgaaaaatacaaaaattagctgagtgccgtggcttgcgcctgtcctcccagctacttggggggctgaggcagtaggatcgctcaagcccaggaggtggaggttgcagtgagccaagatcacgtcactgcactccaggaagggcaacagagcaagactccttctaaaaaaaaaaaaaaaaaaagaaagaaagaaaagaaaattaactttggtatttcaggttgtatttaaatggagacttaacatgaactatgttcataacacttgaccaaattaagtgtagatcgtctctttaataaagagatcatctggaactgcaatttctaactcatacatcattgctacaaaccttatttgtttactatttctcttccaaggaccatcagtcatcctttaaaattcatttcaagctctgaaaagatattttttgttacatgggcaatttacttttagtacagtaaaatgttatgtgaatttctacagtatgtttgccaaaatgaattatatctagaatacgcttaacaatatattctggaggcagctttcatttgaaattaggttcaccttctgagagtatgaaaaagttaatgggtttttgtgcctgaagattttgatgttgcatttggctacatttaatccactttcacccataagttttaacatctaaaaaaattaaatcactgctaatgcaattaaaatgcattatgaaatgcatttctgtccaggctggagtgcagtggcacaatctcgg

SEQ ID NO: 436484 - DNA, 1429 bp, Homo sapiens
atctgctgttctcttcgcctggacacctcttggttctttttttttttgttctttgagatggagtctcactctgttgcccaggctggagtgcagtggcgcgatttcggctcactgcaaccccgtctctactaaaaatacaaaaaaattagccgggcgtgggggcgggcatctgtagtcccaattactcgggaggctgcagcaggagaatggcatgaacccgggaggcggatcttgcattgagccaagatcacgccactgcactccagcctgggcgacagaatgagactccatctcaaaaaaaaagaagaaaccaaggatatagaataaaacaagagtgtagatttgggcattgaggccttcaaattggattgttctcaatgtccagaagaaaaaaaaaatttagaagagacccaaatcagaaaacaaaagttgggctgaattcaatgcgaattattttctagctcaatattaatactgcttatgtcagctgaatttcagcctttcaataacagctagtcaagtatttttttagttggttcctattgatcgtcatcttattttagtggaatccattatattgaagatgtcaagttcctcatttcccatacaaagaatgtgagattcatctttcttgaatctttgctaagtgttgaaggggacttttggcatcttttcaggaggactataattgggccctctaactaaaaagtctcctatgccccttagatagatgagatttttttttttgaccttgtacccaccaacattggtgggaggctcagaagggactgtgtttgtaactttgtagcactttctaaacagtgacctgttgtatgggcattataggacagtccgtggggtggggcgggggatgggggagatggacaaatgaggtctggtttaaagaatgagaagtgtgaccaggcatggtgactcatgcctgtaatccagcactttgggatgctgaggcaggaggatcacttgagcccaggagtttgaggttacagtaagctatgattgtgccactgggctccagcctgggtgacagaactagaccctgtctctaaaaaaagaagaagaggtgtgtatccttctaaatgataaaacagatcactcccctgcttacataaaactttccggtggctggccaggcacggtgtgtcacgcctgtaatcccagcactttgggaggccgtggtgggcagatcacgaggtcaggaaatcgagaccatcctggctaacgtggtgaaatcttgtctctactaaaaacacaaaaaattaacccaggtatggtggcatgcacctgtagtcccagctactcgggaggctgaggcaggagaatcgcttgaaccagggaggtggaggttgcagtgagctgagattgcgccactgcactccagcctgggtgacagagactctgtctcaaaaaa

SEQ ID NO: 436485 - DNA, 1307 bp, Homo sapiens
tactactaaattcgcggccgcgtcgacccgggcgtgggggcgggcatctgtagtcccaattactcgggaggctgcagcaggagaatggcatgaacccgggaggcggatcttgcattgagccaagatcacgccactgcactccagcctgggcgacagaatgagactccatctcaaaaaaaaagaagaaaccaaggatatagaataaaacaagagtgtagatttgggcattgaggccttcaaattggattgttctcaatgtccagaagaaaaaaaaaatttagaagagacccaaatcagaaaacaaaagttgggctgaattcaatgcgaattattttctagctcaatattaatactgcttatgtcagctgaatttcagcctttcaataacagctagtcaagtatttttttagttggttcctattgatcgtcatcttattttagtggaatccattatattgaagatgtcaagttcctcatttcccatacaaagaatgtgagattcatctttcttgaatctttgctaagtgttgaaggggacttttggcatcttttcaggaggactataattgggccctctaactaaaaagtctcctatgccccttagatagatgagatttttttttttgaccttgtacccaccaacattggtgggaggctcagaagggactgtgtttgtaactttgtagcactttctaaacagtgacctgttgtatgggcattataggacagtccgtggggtggggcgggggatgggggagatggacaaatgaggtctggtttaaagaatgagaagtgtgaccaggcatggtgactcatgcctgtaatccagcactttgggatgctgaggcaggaggatcacttgagcccaggagtttgaggttacagtaagctatgattgtgccactgggctccagcctgggtgacagaactagaccctgtctctaaaaaaagaagaagaggtgtgtatccttctaaatgataaaacagatcactcccctgcttacataaaactttccggtggctggccaggcacggtgtgtcacgcctgtaatcccagcactttgggaggccgtggtgggcagatcacgaggtcaggaaatcgagaccatcctggctaacgtggtgaaatcttgtctctactaaaaacacaaaaaattaacccaggtatggtggcatgcacctgtagtcccagctactcgggaggctgaggcaggagaatcgcttgaaccagggaggtggaggttgcagtgagctgagattgcgccactgcactccagcctgggtgacagagactctgtctcaaaaaa

SEQ ID NO: 436486 - DNA, 1296 bp, Homo sapiens
ttaacattttgtttttttgtaggtttcaggcacagaactgtatatccaataatagtgaaatggatcccactaattatgacagaaatgatgatacatttaaatgacttggatgttttataggtatgatctcgtgaaatcttgagagaaactgaatgacgaatgaaactattgttcctgtttcacacagaagaaaactgaggttaaaaggggtaaagtaattttgcatggcatgaagtagaaattcaaagtacaggaatttgaacttggttctgtccttttctgaagcccttgaccactatagactcaaacatcaccttgtttttccactcattcaacacttttttttttaaattatctaataggttggcactcatcatgagcccctgttctcattctgcaaatggtgaagctctctattgtcctgaccccacagttcctgtcccatgaccagggccagctcaccaaggagctgcagcagcatgtaaagtcagtgacatgcccatgcgagtacctgaggaaggttatcaatactctggctgaccatcatcatcgtgggactgactttggtggaagtccttggttacatgtcattattgcatttccgacaagttataaagttgtcattaccctctggatagtttacctttgggtgtctctcctgaagactatcttctggtctcgaaatggacatgatggatccacggatgtacagcagagagcctggaggtccaaccgccgtagacaggaagggctgaggtccatttgtatgcacacaaagaaaagagtttcttcctttcgaggaaataaaattgtcctgaaagacgtcattactctacggagacatgtggaaacaaaagttagagctaaaatccgtaagaggaaggtgacaacgaaaatcaaccatcatgacaaaatcaatggaaagaggaagaccgccagaaaacagaaaatgtttcaacgtgcgcaagagttgcggcggcgagcagaggactaccacaaatgcaaaatccccccttctgcaagaaaggctctttgcaactgggtcagaatggcggcagcggagcatcgtcattcttcaggattgccctactggccctacctcacagctgaaactttaaaaaacaggatgggccaccagccacctcctccaactcaacaacattctataactgataactccctgagcctcaagacacctcccgagtgtctgctcactccccttccaccctcagcggatgataatctcaagacacctcccgagtgtgtgctcactccccttccaccctcagcggatga

SEQ ID NO: 436487 - DNA, 705 bp, Homo sapiens
atgtactagaggatcccgcactcgcgtgtcattaccctctggatagcttaccttatgggtgtctctcctgaagactatcttctggtctcgaaatggacatgatggatccacggatgtacagcagagagcctggaggtccaaccgccgtagacaggaagggctgaggtccatttgtatgcacacaaagaaaagagtttcttcctttcgaggaaataaaattgtcctgaaagacgtcattactctacggagacatgtggaaacaaaagttagagctaaaatccgtaagaggaaggtgacaacgaaaatcaaccatcatgacaaaatcaatggaaagaggaagaccgccagaaaacagaaaatgtttcaacgtgcgcaagagttgcggcggcgagcagaggactaccacaaatgcaaaatccccccttctgcaagaaaggctctttgcaactgggtcagaatggcggcagcggagcatcgtcattcttcaggattgccctactggccctacctcacagctgaaactttaaaaaacaggatgggccaccagccacctcctccaactcaacaacattctataactgataactccctgagcctcaagacacctcccgagtgtctgctcactccccttccaccctcagcggatgataatctcaagacacctcccgagtgtgtgctcactccccttccaccctcagcggatga

SEQ ID NO: 436488 - DNA, 335 bp, Homo sapiens
tattctttgagtggttatgaattgtaatttttattaattgacagtaaatattttgtttcagaaatgtggtaaagtacttgaagcaaacatcccgcatcgctattggacctctgagactttctactttaacagtttcacagtctttgccagttctaagtaccttgcagctgtattgctcgtctgctttggagaccacagtttctaacagactttcaacagaggtctgtatatttttacaagcacactcttatgactattaatggtcattactgtagaacaaagaccttattttttgagttttttggaataggatttgtagttgggcaagctggtaa

SEQ ID NO: 436489 - DNA, 457 bp, Homo sapiens
tcccaaggtgctgggactacaggtgtgtgccaccagctcagctaatttttgtattttttgtagagatggtgtttttccatgttgcccaggctggtctcaaactcctgggctcaagcaatccttctgtctcagcctcccaaagtactgggattacaggcatgtcccaccatgcccagactaatatttacttttaatcagactaagatagggttactacttgagttgctatggctccagctgaaagaaagcccgtgcagtcatatcacgcgtaaacatttgctttatgctaaaaatatggtggacctggcattacagctattacaaatctcctaagatgtctcgggtagtgtattagttacttttcatactgctatgaagaaatactggaaactgggtaatttataaagaaaaagaggtttaatgtactcacagttccacaaggctggagaggcctcag

SEQ ID NO: 436490 - DNA, 3636 bp, Homo sapiens
gggaatgaattggaagtaagcattatgatggtggtagaagcactatgtgaacttcattgtcctgaagctatacagggaattgctgtctggtcatcatctattgttggaaaacatcttctgtggattaactcagtggctcaacaggctgaagggaggtttgaaaaggcctctgtggagtaccaggaacacctgtgtgccatgacaggtgttgattgctgcatctccagctttgacaaatcggtgctcaccttagccagtgctgggtgtaagagtgccagcctgaaacattgtctgaatggtgaatccagaaaaagtgtgctgtccaaaccgactgactcttcccctgaggttataaattatttaggaaacaaagcatgtgagtgctacatctcaactgccgattgggctgctgtgcaggaatggcagaacgctatccatgacttgaaaaagagtaccagtagcacttccctcaacctgaaagctgacttcaactatataaaatcattaagcagctttgagtctggaaaatttgtcgaatgtaccgagcaattagaattgttaccaggagaaaatatcaatctacttgctggaggatcaaaagaaaaaatagacatgaaaaaactgcttcgtaacatgtgaagtccagatccaagggaacctcagaaatccattgaagttccattgttaagaagttctgtttgtttggcaactgctttaaacccgatagaacaagatcagaagtggcagtctataactgaaaatgtggtaaagtacttgaagcaaacatcccgcatcgctattggacctctgagactttctactttaacagtttcacagtctttgccagttctaagtaccttgcagctgtattgctcgtctgctttggagaccacagtttctaacagactttcaacagaggactgtcttattccactcttcggcgaagctttacgttcatgtaaacagcatgacgtgaggccgtggatgcaggcattaaggtatactgtgtaccagaatcagttgttggagaaaattaaagttaagtggttttccttttttttttttgtaagagaaaattaaaggtggttttttttttttaaattttgctttattgaggtttatattacacattctaagtgtatggtttgatgagttctaacatgtcttcacttgtgtgaccaccaatacgatcgagatagagaacagcgtcttaccccagaaggttcccttgggatcatctcctcatttgcccctgtcagcagttactgatttgctttctgtcactatggattagacttgtctttactaaagtttcatgtacgtgaaatcataacaacatgttctcttgtgtttggcttctcttgctcagcatgatatttttacggttcacccatattgcatgtatcaggaatataatcctttttattattgagtagtgttctattgtatgtatataccacagtttatttctcccttcatcctttgctagattttggggttttttcacattgcgctattcagtataaacctgctctcaacattcatgtgcaagtctttgagtggacatatatttgcgtttctcttgagtgaatgcaccttgttgggtcacgtggcttaacttaaaaaaattttaatcactgtggtgcatatgtagtgattattagtgattatctcataattttattttcttgtttaatgatgttgagtgtatttcatttgtattttagtttgcaaatgtttgttcaaattcttcacctgtttttaatgaagacgtacgacttatttttgtgttctgaacataagttctttgtcacataaaatgtgctatgaatgttgagttttaaatactccaaatgaatggctagagaattactatttgtagaaatatttatatgtcaaagggatgctaacaatttactttattgctctaaaatagaaaagttgccagaatgctgtggagttttagtggaaaacatgatagctggtgttactgagtaaatttgagtgttaaatgtcaatgtaagctaacggccaagatagggaccactgcagggtggttacttgcagctatgactcaactggtccttcactgccaaacatacctggggttggatcattggcctgacgtttgcaaattgaggaaccttagggcaaatcaatgaacttctgaactgccttcgtcttcagttatatggggatttccccacttttgaggtacttgtaaggattatatgagatgaagagatgagacaaggtatataaaagtcctagcacagagcgtgtcatataatatggcttcacaagtaccctcatctcctttccagtcgttttttgtttttgtttttgtttttttgagaccatctcactctgttgcccaggctggagtgcctcttcatttttatttctttattcagcaagtattgatcaaatgtgctttgtaccaggtactgagctcttcgttgggatataatggtgatcaaggagattgtagattctggcagggaaaactgacatcaaacacggcgacccgacatagtgagaccctgtctctactagaagaactttaaaaatcacctaggtgtgggccgggcacggtggctaacgcctgtaatcccagcactttgagatgctgaggcaggtggatcacgaggtcaggagatcgagaccatcctggataacacggagaaaccccgtctctactaaaaatacaaaaaaattagccgggcgtgggggcgggcatctgtagtcccaattactcgggaggctgcagcaggagaatggcatgaacccgggaggcggatcttgcattgagccaagatcacgccactgcactccagcctgggcgacagaatgagactccatctcaaaaaaaaagaagaaaccaaggatatagaataaaacaagagtgtagatttgggcattgaggccttcaaattggattgttctcaatgtccagaagaaaaaaaaaatttagaagagacccaaatcagaaaacaaaagttgggctgaattcaatgcgaattattttctagctcaatattaatactgcttatgtcagctgaatttcagcctttcaataacagctagtcaagtatttttttagttggttcctattgatcgtcatcttattttagtggaatccattatattgaagatgtcaagttcctcatttcccatacaaagaatgtgagattcatctttcttgaatctttgctaagtgttgaaggggacttttggcatcttttcaggaggactataattgggccctctaactaaaaagtctcctatgccccttagatagatgagatttttttttttgaccttgtacccaccaacattggtgggaggctcagaagggactgtgtttgtaactttgtagcactttctaaacagtgacctgttgtatgggcattataggacagtccgtggggtggggcgggggatgggggagatggacaaatgaggtctggtttaaagaatgagaagtgtgaccaggcatggtgactcatgcctgtaatccagcactttgggatgctgaggcaggagaacagcatgaacccgggagccacagcacgcagttagcccatgatcgcgccactgcaacccatctcgacgttatgtagactaatactatta

SEQ ID NO: 436491 - DNA, 2964 bp, Homo sapiens
  misc_feature (1107)..(1107): n is a, c, g, or t
  misc_feature (1157)..(1157): n is a, c, g, or t
  misc_feature (1163)..(1163): n is a, c, g, or t
  misc_feature (1396)..(1396): n is a, c, g, or t
  misc_feature (1434)..(1434): n is a, c, g, or t
  misc_feature (1486)..(1486): n is a, c, g, or t
  misc_feature (1492)..(1492): n is a, c, g, or t
  misc_feature (1514)..(1514): n is a, c, g, or t
gggaatgaattggaagtaagcattatgatggtggtagaagcactatgtgaacttcattgtcctgaagctatacagggaattgctgtctggtcatcatctattgttggaaaacatcttctgtggattaactcagtggctcaacaggctgaagggaggtttgaaaaggcctctgtggagtaccaggaacacctgtgtgccatgacaggtgttgattgctgcatctccagctttgacaaatcggtgctcaccttagccagtgctgggtgtaagagtgccagcctgaaacattgtctgaatggtgaatccagaaaaagtgtgctgtccaaaccgactgactcttcccctgaggttataaattatttaggaaacaaagcatgtgagtgctacatctcaactgccgattgggctgctgtgcaggaatggcagaacgctatccatgacttgaaaaagagtaccagtagcacttccctcaacctgaaagctgacttcaactatataaaatcattaagcagctttgagtctggaaaatttgtcgaatgtaccgagcaattagaattgttaccaggagaaaatatcaatctacttgctggaggatcaaaagaaaaaatagacatgaaaaaactgcttcgtaacatgtgaagtccagatccaagggaacctcagaaatccattgaagttccattgttaagaagttctgtttgtttggcaactgctttaaacccgatagaacaagatcagaagtggcagtctataactgaaaatgtggtaaagtacttgaagcaaacatcccgcatcgctattggacctctgagactttctactttaacagtttcacagtctttgccagttctaagtaccttgcagctgtattgctcgtctgctttggagaccacagtttctaacagactttcaacagaggactgtcttattccactcttcggcgaagctttacgttcatgtaaacagcatgacgtgaggccgtggatgcaggcattaagggatctcgtgaaatcttgagagaaactgaatgacgaatgaaactatgttcctgtttcacacggaagaaaactgaggttaaacaggggttggcactcatcatgagccccngttctcattctgcaaatggtgaagctctctattgtcctgaccccacagtncctgtnccatgaccagggccagctcacaaggagctgcgcagcatgtaaagtcagtgacatgcccatgcgagtacctgaggaaggtgagtgagtgcagacagatggggcctggtgccttgagcagttcccgggtctcagctgccacacatctcatagccggtgatgctgggggaagcttacgcagtcacagtactggcttcttcctctttttctttccatacaagtggcttagggatggnggtagagtagttgacttatttggatgaaaaccactatnttctgttcagaaacttcaaaaggaatcattgctgggctggtaacctaaaganaaacanccagacaagtgcccaacgacanttaaaaaggtgatttattatcttgccaagtgtgggccgggcacggtggctaacgcctgtaatcccagcactttgagatgctgaggcaggtggatcacgaggtcaggagatcgagaccatcctggataacacggagaaaccccgtctctactaaaaatacaaaaaaattagccgggcgtgggggcgggcatctgtagtcccaattactcgggaggctgcagcaggagaatggcatgaacccgggaggcggatcttgcattgagccaagatcacgccactgcactccagcctgggcgacagaatgagactccatctcaaaaaaaaagaagaaaccaaggatatagaataaaacaagagtgtagatttgggcattgaggccttcaaattggattgttctcaatgtccagaagaaaaaaaaaatttagaagagacccaaatcagaaaacaaaagttgggctgaattcaatgcgaattattttctagctcaatattaatactgcttatgtcagctgaatttcagcctttcaataacagctagtcaagtatttttttagttggttcctattgatcgtcatcttattttagtggaatccattatattgaagatgtcaagttcctcatttcccatacaaagaatgtgagattcatctttcttgaatctttgctaagtgttgaaggggacttttggcatcttttcaggaggactataattgggccctctaactaaaaagtctcctatgccccttagatagatgagatttttttttttgaccttgtacccaccaacattggtgggaggctcagaagggactgtgtttgtaactttgtagcactttctaaacagtgacctgttgtatgggcattataggacagtccgtggggtggggcgggggatgggggagatggacaaatgaggtctggtttaaagaatgagaagtgtgaccaggcatggtgactcatgcctgtaatccagcactttgggatgctgaggcaggaggatcacttgagcccaggagtttgaggttacagtaagctatgattgtgccactgggctccagcctgggtgacagaactagaccctgtctctaaaaaaagaagaagaggtgtgtatccttctaaatgataaaacagatcactcccctgcttacataaaactttccggtggctggccaggcacggtgtgtcacgcctgtaatcccagcactttgggaggccgtggtgggcagatcacgaggtcaggaaatcgagaccatcctggctaacgtggtgaaatcttgtctctactaaaaacacaaaaaattaacccaggtatggtggcatgcacctgtagtcccagctactcgggaggctgaggcaggagaatcgcttgaaccagggaggtggaggttgcagtgagctgagattgcgccactgcactccagcctgggtgacagagactctgtctcaaaaaa

SEQ ID NO: 436492 - DNA, 1771 bp, Homo sapiens
ttttttgagacagagactcactctgtcacccaggctggagtgcagtggcatgattttggctcactgcaacctccacctcctgagttcaaacaattatcctgcctcatccttcggagtacctgggattacaggtgcgtgccaccgtgcccggctcatttttgtattcttagtagagacggcatttcaccatgttggccaggctggtctcaaactcctggcctcaactgatccactctcattggccttccaaggtgctgggattataggcgtgagccaccacaactggctcagtaaatacattttttattatcaaaaaagagtagtgtatggttggcgtattctgtgtagaatgtattttattgatgtctcctatttttataatttctgagttaagtactttttaattaatgctttttagttttgggcagattcagttgactaaagcacctcatttcccagatacatgaaataaaatatttggcttcttttccaatttcacactgatgttattttgtgaaaatcagtgctttaagataaatcgttatacgttaagataaacatgagaaacttgatctaatatttaatatttattcagttctacactttattaacttctacaccagcagatttagacattatgtaaccatctcaagaagtttcacttggatgtaatgcttcacgcttgtaatcccagcactttaggaggctgaggtgggaggactgcttaaggcaaggagtctgagaccagcctgggcaatacagcaagatcccatctctattttaaagaaaagtttcactttgggaggccaaggcgggtggatcacaaggtgcatgagccaccgtgcctggccagaaaattgtaaacacacacaaactctcaagtggcctaattccctctcaccaaaccaatcacaatacagataaaagagaataacttgtgttcatttttgtacaaacaaaaaagatataaattgtgaatgatgcatgatttttaattacaagtaaactgggcaaatgcttctgcattatttaaagctaaaaggtgatcagtggaaactttcctctgttagtactctaatactttttatatttatcggctcactacaacctgtgcctaccaggttcaagcgattctcctgtctcagccacctgagtagccgagaccacaggcacgcactaccatgtccggctaattttgtatttttaatagagacagggtttcaccgtgttggccatgctggtcttgaactcctgacctcaaccgatccgcctgccttggcctcccaaagttctgggattacaagcgtgagccacagcgcccagccttattataattgttactatttaaatctcttttgctctctccttcaagagagacctcatcccattcagttgcttccatttatttattcatcttctgcctcctgggctcgagagatcctccagcgtgagtctcccaagtagctgggactacaggctcacaccaccaagcttggctaaattttgtaggttttggagagacaggctcttgccacgttgcctaggctggtctcaaactcctgggctcagatgatccacctgccttcgcctcccaaagcactgggacatgagccaccacgcccagccgcaagtacttttacacaaaatgcaaacaccattcttccatcataaaagtgataccacagcttccgtgaagttttgccaggtagtactcataattaccttgggtaaactttttgatgttaaactgtatcttcttattacgagtttt

SEQ ID NO: 436493 - DNA, 2175 bp, Homo sapiens
gggaatgaattggaagtaagcattatgatggtggtagaagcactatgtgaacttcattgtcctgaagctatacagggaattgctgtctggtcatcatctattgttggaaaacatcttctgtggattaactcagtggctcaacaggctgaagggaggtttgaaaaggcctctgtggagtaccaggaacacctgtgtgccatgacaggtgttgattgctgcatctccagctttgacaaatcggtgctcaccttagccagtgctgggtgtaagagtgccagcctgaaacattgtctgaatggtgaatccagaaaaagtgtgctgtccaaaccgactgactcttcccctgaggttataaattatttaggaaacaaagcatgtgagtgctacatctcaactgccgattgggctgctgtgcaggaatggcagaacgctatccatgacttgaaaaagagtaccagtagcacttccctcaacctgaaagctgacttcaactatataaaatcattaagcagctttgagtctggaaaatttgtcgaatgtaccgagcaattagaattgttaccaggagaaaatatcaatctacttgctggaggatcaaaagaaaaaatagacatgaaaaaactgcttcgtaacatgtgaagtccagatccaagggaacctcagaaatccattgaagttccattgttaagaagttctgtttgtttggcaactgctttaaacccgatagaacaagatcagaagtggcagtctataactgaaaatgtggtaaagtacttgaagcaaacatcccgcatcgctattggacctctgagactttctactttaacagtttcacagtctttgccagttctaagtaccttgcagctgtattgctcgtctgctttggagaccacagtttctaacagactttcaacagaggactgtcttattccactcttcggcgaagctttacgttcatgtaaacagcatgacgtgaggccgtggatgcaggcattaagggtatgatctcgtgaaatcttgagagaaactgaatgacgaatgaaactattgttcctgtttcacacagaagaaaactgaggttaaaaggggtaaagtaattttgcatggcatgaagtagaaattcaaagtacaggaatttgaacttggttctgtccttttctgaagcccttgaccactatagactcaaacatcaccttgtttttccactcattcaacacttttttttttaaattatctaataggttggcactcatcatgagcccctgttctcattctgcaaatggtgaagctctctattgtcctgaccccacagttcctgtcccatgaccagggccagctcaccaaggagctgcagcagcatgtaaagtcagtgacatgcccatgcgagtacctgaggaaggttatcaatactctggctgaccatcatcatcgtgggactgactttggtggaagtccttggttacatgtcattattgcatttccgacaagttataaagttgtcattaccctctggatagtttacctttgggtgtctctcctgaagactatcttctggtctcgaaatggacatgatggatccacggatgtacagcagagagcctggaggtccaaccgccgtagacaggaagggctgaggtccatttgtatgcacacaaagaaaagagtttcttcctttcgaggaaataaaattgtcctgaaagacgtcattactctacggagacatgtggaaacaaaagttagagctaaaatccgtaagaggaaggtgacaacgaaaatcaaccatcatgacaaaatcaatggaaagaggaagaccgccagaaaacagaaaatgtttcaacgtgcgcaagagttgcggcggcgagcagaggactaccacaaatgcaaaatccccccttctgcaagaaaggctctttgcaactgggtcagaatggcggcagcggagcatcgtcattcttcaggattgccctactggccctacctcacagctgaaactttaaaaaacaggatgggccaccagccacctcctccaactcaacaacattctataactgataactccctgagcctcaagacacctcccgagtgtctgctcactccccttccaccctcagcggatgataatctcaagacacctcccgagtgtgtgctcactccccttccaccctcagcggatga

SEQ ID NO: 436494 - DNA, 2022 bp, Homo sapiens
gggaatgaattggaagtaagcattatgatggtggtagaagcactatgtgaacttcattgtcctgaagctatacagggaattgctgtctggtcatcatctattgttggaaaacatcttctgtggattaactcagtggctcaacaggctgaagggaggtttgaaaaggcctctgtggagtaccaggaacacctgtgtgccatgacaggtgttgattgctgcatctccagctttgacaaatcggtgctcaccttagccagtgctgggtgtaagagtgccagcctgaaacattgtctgaatggtgaatccagaaaaagtgtgctgtccaaaccgactgactcttcccctgaggttataaattatttaggaaacaaagcatgtgagtgctacatctcaactgccgattgggctgctgtgcaggaatggcagaacgctatccatgacttgaaaaagagtaccagtagcacttccctcaacctgaaagctgacttcaactatataaaatcattaagcagctttgagtctggaaaatttgtcgaatgtaccgagcaattagaattgttaccaggagaaaatatcaatctacttgctggaggatcaaaagaaaaaatagacatgaaaaaactgcttcgtaacatgtgaagtccagatccaagggaacctcagaaatccattgaagttccattgttaagaagttctgtttgtttggcaactgctttaaacccgatagaacaagatcagaagtggcagtctataactgaaaatgtggtaaagtacttgaagcaaacatcccgcatcgctattggacctctgagactttctactttaacagtttcacagtctttgccagttctaagtaccttgcagctgtattgctcgtctgctttggagaccacagtttctaacagactttcaacagaggactgtcttattccactcttcggcgaagctttacgttcatgtaaacagcatgacgtgaggccgtggatgcaggcattaagggtatgatctcgtgaaatcttgagagaaactgaatgacgaatgaaactattgttcctgtttcacacagaagaaaactgaggttaaaaggggttggcactcatcatgagcccctgttctcattctgcaaatggtgaagctctctattgtcctgaccccacagttcctgtcccatgaccagggccagctcaccaaggagctgcagcagcatgtaaagtcagtgacatgcccatgcgagtacctgaggaaggttatcaatactctggctgaccatcatcatcgtgggactgactttggtggaagtccttggttacatgtcattattgcatttccgacaagttataaagttgtcattaccctctggatagtttacctttgggtgtctctcctgaagactatcttctggtctcgaaatggacatgatggatccacggatgtacagcagagagcctggaggtccaaccgccgtagacaggaagggctgaggtccatttgtatgcacacaaagaaaagagtttcttcctttcgaggaaataaaattgtcctgaaagacgtcattactctacggagacatgtggaaacaaaagttagagctaaaatccgtaagaggaaggtgacaacgaaaatcaaccatcatgacaaaatcaatggaaagaggaagaccgccagaaaacagaaaatgtttcaacgtgcgcaagagttgcggcggcgagcagaggactaccacaaatgcaaaatccccccttctgcaagaaaggctctttgcaactgggtcagaatggcggcagcggagcatcgtcattcttcaggattgccctactggccctacctcacagctgaaactttaaaaaacaggatgggccaccagccacctcctccaactcaacaacattctataactgataactccctgagcctcaagacacctcccgagtgtctgctcactccccttccaccctcagcggatgataatctcaagacacctcccgagtgtgtgctcactccccttccaccctcagcggatga

SEQ ID NO: 436495 - DNA, 2120 bp, Homo sapiens
gggaatgaattggaagtaagcattatgatggtggtagaagcactatgtgaacttcattgtcctgaagctatacagggaattgctgtctggtcatcatctattgttggaaaacatcttctgtggattaactcagtggctcaacaggctgaagggaggtttgaaaaggcctctgtggagtaccaggaacacctgtgtgccatgacaggtgttgattgctgcatctccagctttgacaaatcggtgctcaccttagccagtgctgggtgtaagagtgccagcctgaaacattgtctgaatggtgaatccagaaaaagtgtgctgtccaaaccgactgactcttcccctgaggttataaattatttaggaaacaaagcatgtgagtgctacatctcaactgccgattgggctgctgtgcaggaatggcagaacgctatccatgacttgaaaaagagtaccagtagcacttccctcaacctgaaagctgacttcaactatataaaatcattaagcagctttgagtctggaaaatttgtcgaatgtaccgagcaattagaattgttaccaggagaaaatatcaatctacttgctggaggatcaaaagaaaaaatagacatgaaaaaactgcttcgtaacatgtgaagtccagatccaagggaacctcagaaatccattgaagttccattgttaagaagttctgtttgtttggcaactgctttaaacccgatagaacaagatcagaagtggcagtctataactgaaaatgtggtaaagtacttgaagcaaacatcccgcatcgctattggacctctgagactttctactttaacagtttcacagtctttgccagttctaagtaccttgcagctgtattgctcgtctgctttggagaccacagtttctaacagactttcaacagaggactgtcttattccactcttcggcgaagctttacgttcatgtaaacagcatgacgtgaggccgtggatgcaggcattaagggctggagtgcagtggcacgatctcagctcaccacagcctccgcctcccaggttcaagcgattctcctgcctcagcctcccgagtagctgggattacaggtatgatctcgtgaaatcttgagagaaactgaatgacgaatgaaactattgttcctgtttcacacagaagaaaactgaggttaaaaggggttggcactcatcatgagcccctgttctcattctgcaaatggtgaagctctctattgtcctgaccccacagttcctgtcccatgaccagggccagctcaccaaggagctgcagcagcatgtaaagtcagtgacatgcccatgcgagtacctgaggaaggttatcaatactctggctgaccatcatcatcgtgggactgactttggtggaagtccttggttacatgtcattattgcatttccgacaagttataaagttgtcattaccctctggatagtttacctttgggtgtctctcctgaagactatcttctggtctcgaaatggacatgatggatccacggatgtacagcagagagcctggaggtccaaccgccgtagacaggaagggctgaggtccatttgtatgcacacaaagaaaagagtttcttcctttcgaggaaataaaattgtcctgaaagacgtcattactctacggagacatgtggaaacaaaagttagagctaaaatccgtaagaggaaggtgacaacgaaaatcaaccatcatgacaaaatcaatggaaagaggaagaccgccagaaaacagaaaatgtttcaacgtgcgcaagagttgcggcggcgagcagaggactaccacaaatgcaaaatccccccttctgcaagaaaggctctttgcaactgggtcagaatggcggcagcggagcatcgtcattcttcaggattgccctactggccctacctcacagctgaaactttaaaaaacaggatgggccaccagccacctcctccaactcaacaacattctataactgataactccctgagcctcaagacacctcccgagtgtctgctcactccccttccaccctcagcggatgataatctcaagacacctcccgagtgtgtgctcactccccttccaccctcagcggatga

SEQ ID NO: 436496 - DNA, 555 bp, Homo sapiens
gtttgaaaaggcctctgtggagtaccaggaacacctgtgtgccatgacaggtgttgattgctgcatctccagctttgacaaatcggtgctcaccttagccagtgctgggtgtaagagtgccagcctgaaacattgtctgaatggtgagcgttcagcatttttaaataaagcaaaagttatagtaatatatttcgtactgatgatcttatcatgtttttaggtttctgtgctctttgaaatatttctaattgatctgaatctctctcttcttattttataaaatactttcaggtgaatccagaaaaagtgtgctgtccaaaccgactgactcttcccctgaggttataaattatttaggaaacaaagcatgtgagtgctacatctcaactgccgattgggctgctgtgcaggaatggcagaacgctatccatgacttgaaaaagagtaccagtagcacttccctcaacctgaaagctgacttcaactatataaagtaaggctttctgtttccagttataaaacaaatttccaataactatgatgtttttcctatgg

SEQ ID NO: 436497 - DNA, 2244 bp, Homo sapiens
gcatcgctagcacagttggtccgagctgccgaaaggtctggtcgcagagacaggaacgtgtaatcctcagcgtgctccagcccacagcttcgctctactgctcggcagggcagctggcctctgggcaccggcggcccctctgcctcgcggaaaagcctgatgaagtcctccgatattgatcaggatttattcacagacagttactgcaaggtgtgcagtgcacagctgatctccgaatcgcagcgtgtggcccactacgagagtcgaaaacatgcaagcaaagtccgactgtattacatgcttcaccccagggatggagggtgtcctgccaagaggctccggtcagaaaatggaagtgatgccgacatggtggataagaacaagtgctgcacactctgcaacatgtcattcacttcagcggtggtggccgattcccattatcaaggcaaaatccacgccaagaggttaaaactcttgctaggagagaagaccccattaaagaccacgtctgaggcgcaattacagatgtaccatctgcagtgtctccctaaactcaatagaacagtatcatgcccatctgaaaggatctaaacaccagaccaacctgaagaataagtagtgaaagcatcaatcaagacataagaacaaaacattagcatttctctgccgtggagaattgcttatcaaccaccagaggaggcttctttcttgaacaataaacatttcttataaggattcacagattcacatacgactgatcttgatttttggaaatgaatgaggtttcttttttctttttcctttttttaattttggggtaagttatgatatttggatggatttttaaattctttcctgataacatatttagcacatgttctaaattataatcctatagcaaacagttggagcattattcaaactgaaagtggaaaaatttaaatttccaatttattctagatttcctcagagcataattattctgttaaatcctcaatgagtgtgatgtaaaccacctctatccagaaatatacattcttttctcatcatgttggacacagttgagggtgacatgcacagaactggaacagatcactattagtggaaaataccaaatggacaaataaataccagtcgttttctccgttctccaagcacaggagccaggtttaccatctgaacaatgaagacgaagggagtaaataaaggaagaattctcatcttttttcctgatcattcaaagaacagtttctcaaggttaagccaagtcctccttgcaagttgccaaataatagcttaggaaaagaattagtctgcctgcatgatgatcttcttaggcaaaaacgtcttcacagcccttgaccttggtgaatttttttccccaaaagcatccaaaagaagaattataaaccccagaacgagatggaaataaacaagtattttttttttatgatgtttggcctgaactgtgggctttaattgggggatactgatcgtttggaaagaagtgagaaaattctgaagaaatggcggccttgggctaggcggggtcccctatttcttctgtttctcactgaagtcctactgctgagccaagactcagtcactctggaaagagcatgaccgataaagaaaacagttcctttctgatggggagcgtctgagtgcagatcatgaggctctttctctaggtttaattcttttccatggtgaccggacttggtgtcttgtagcctggttacgaagtgggacgttgagcttctactgacgatgccctgcatggaccagctgggatctggctggggctgccctgtgtccctaacgaccataggcaatccatcttcttgtgtcagcaatttctggacacccactgttttccaccaagagctgaggtggcaacaactcagtgagcaataaacaaaatgacacagaaatgcacagtgttgttatgaaggagcctgtttacctgtgttcaaaatctggcaccattcccttgagcagggcccgctcaggagggaccaggtctgccagtttctgtgcctgcagagagacgaagccccacgagccacaccctactctacaagaggaaagggggttggatgggaagaatctattttgctgttttggaaagcacacagccgacctacaaacctcctgtgatggtgtttcttcggatgtgtaaaataaggctttatttgtcaattccgctgtaaaataagcattgtccgagtaaaaacagcagca

SEQ ID NO: 436498 - DNA, 2377 bp, Homo sapiens
ggcatgcctttggaccgttcacaggctaattgggaaaagtggacaggcctgcctgaagcctgatgaagtcctccgatattgatcaggatttattcacagacagttactgcaaggtgtgcagtgcacagctgatctccgaatcgcagcgtgtggcccactacgagagtcgaaaacatgcaagcaaagtccgactgtattacatgcttcaccccagggatggagggtgtcctgccaagaggctccggtcagaaaatggaagtgatgccgacatggtggataagaacaagtgctgcacactctgcaacatgtcattcacttcagcggtggtggccgattcccattatcaaggcaaaatccacgccaagaggttaaaactcttgctaggagagaagaccccattaaagaccacagcaacacccctgagcccacttaagcccccacggatggacactgctccggtggtcgcatctccctatcaaagaagagattcagacagatactgtgggctctgtgcagcctggtttaataaccctctgatggcccagcaacattatgatggcaagaaacacaaaaagaatgcggcaagagttgctttgttagaacaactggggacaaccctggatatgggggaactgagaggtctgaggcgcaattacagatgtaccatctgcagtgtctccctaaactcaatagaacagtatcatgcccatctgaaaggatctaaacaccagaccaacctgaagaataagtagtgaaagcatcaatcaagacataagaacaaaacattagcatttctctgccgtggagaattgcttatcaaccaccagaggaggcttctttcttgaacaataaacatttcttataaggattcacagattcacatacgactgatcttgatttttggaaatgaatgaggtttcttttttctttttcctttttttaattttggggtaagttatgatatttggatggatttttaaattctttcctgataacatatttagcacatgttctaaattataatcctatagcaaacagttggagcattattcaaactgaaagtggaaaaatttaaatttccaatttattctagatttcctcagagcataattattctgttaaatcctcaatgagtgtgatgtaaaccacctctatccagaaatatacattcttttctcatcatgttggacacagttgagggtgacatgcacagaactggaacagatcactattagtggaaaataccaaatggacaaataaataccagtcgttttctccgttctccaagcacaggagccaggtttaccatctgaacaatgaagacgaagggagtaaataaaggaagaattctcatcttttttcctgatcattcaaagaacagtttctcaaggttaagccaagtcctccttgcaagttgccaaataatagcttaggaaaagaattagtctgcctgcatgatgatcttcttaggcaaaaacgtcttcacagcccttgaccttggtgaatttttttccccaaaagcatccaaaagaagaattataaaccccagaacgagatggaaataaacaagtattttttttttatgatgtttggcctgaactgtgggctttaattgggggatactgatcgtttggaaagaagtgagaaaattctgaagaaatggcggccttgggctaggcggggtcccctatttcttctgtttctcactgaagtcctactgctgagccaagactcagtcactctggaaagagcatgaccgataaagaaaacagttcctttctgatggggagcgtctgagtgcagatcatgaggctctttctctaggtttaattcttttccatggtgaccggacttggtgtcttgtagcctggttacgaagtgggacgttgagcttctactgacgatgccctgcatggaccagctgggatctggctggggctgccctgtgtccctaacgaccataggcaatccatcttcttgtgtcagcaatttctggacacccactgttttccaccaagagctgaggtggcaacaactcagtgagcaataaacaaaatgacacagaaatgcacagtgttgttatgaaggagcctgtttacctgtgttcaaaatctggcaccattcccttgagcagggcccgctcaggagggaccaggtctgccagtttctgtgcctgcagagagacgaagccccacgagccacaccctactctacaagaggaaagggggttggatgggaagaatctattttgctgttttggaaagcacacagccgacctacaaacctcctgtgatggtgtttcttcggatgtgtaaaataaggctttatttgtcaattccgctgtaaaataagcattgtccgagtaaaaacagcagca

SEQ ID NO: 436499 - DNA, 821 bp, Homo sapiens
gcatcgctagcacagttggtccgagctgccgaaaggtctggtcgcagagacaggaacgtgtaatcctcagcgtgctccagcccacagcttcgctctactgctcggcagggcagctggcctctgggcaccggcggcccctctgcctcgcggaaaagcctgatgaagtcctccgatattgatcaggatttattcacagacagttactgcaaggtgtgcagtgcacagctgatctccgaatcgcagcgtgtggcccactacgagtgtggtgcagttcctctgggaatgagcaatgtaacttaaaactagctgtgtcaataagtcaagggtccagaattcttgaggaaggggaatttcattagacatactaagccaaaagaagatgtcacactgaagaaggtggctgtgtgaattctgacccagtcgaaaacatgcaagcaaagtccgactgtattacatgcttcaccccagggatggagggtgtcctgccaagaggctccggtcagaaaatggaagtgatgccgacatggtggataagaacaagtgctgcacactctgcaacatgtcattcccttgagcagggcccgctcaggagggaccaggtctgccagtttctgtgcctgcagagagacgaagccccacgagccacaccctactctacaagaggaaagggggttggatgggaagaatctattttgctgttttggaaagcacacagccgacctacaaacctcctgtgatggtgtttcttcggatgtgtaaaataaggctttatttgtcaattccgctgtaaaataagcattgtccgagtaaaaacagcagca

SEQ ID NO: 436500 - DNA, 2474 bp, Homo sapiens
gcatcgctagcacagttggtccgagctgccgaaaggtctggtcgcagagacaggaacgtgtaatcctcagcgtgctccagcccacagcttcgctctactgctcggcagggcagctggcctctgggcaccggcggcccctctgcctcgcggaaaagcctgatgaagtcctccgatattgatcaggatttattcacagacagttactgcaaggtgtgcagtgcacagctgatctccgaatcgcagcgtgtggcccactacgagagtcgaaaacatgcaagcaaagtccgactgtattacatgcttcaccccagggatggagggtgtcctgccaagaggctccggtcagaaaatggaagtgatgccgacatggtggataagaacaagtgctgcacactctgcaacatgtcattcacttcagcggtggtggccgattcccattatcaaggcaaaatccacgccaagaggttaaaactcttgctaggagagaagaccccattaaagaccacagcaacacccctgagcccacttaagcccccacggatggacactgctccggtggtcgcatctccctatcaaagaagagattcagacagatactgtgggctctgtgcagcctggtttaataaccctctgatggcccagcaacattatgatggcaagaaacacaaaaagaatgcggcaagagttgctttgttagaacaactggggacaaccctggatatgggggaactgagaggtctgaggcgcaattacagatgtaccatctgcagtgtctccctaaactcaatagaacagtatcatgcccatctgaaaggatctaaacaccagaccaacctgaagaataagtagtgaaagcatcaatcaagacataagaacaaaacattagcatttctctgccgtggagaattgcttatcaaccaccagaggaggcttctttcttgaacaataaacatttcttataaggattcacagattcacatacgactgatcttgatttttggaaatgaatgaggtttcttttttctttttcctttttttaattttggggtaagttatgatatttggatggatttttaaattctttcctgataacatatttagcacatgttctaaattataatcctatagcaaacagttggagcattattcaaactgaaagtggaaaaatttaaatttccaatttattctagatttcctcagagcataattattctgttaaatcctcaatgagtgtgatgtaaaccacctctatccagaaatatacattcttttctcatcatgttggacacagttgagggtgacatgcacagaactggaacagatcactattagtggaaaataccaaatggacaaataaataccagtcgttttctccgttctccaagcacaggagccaggtttaccatctgaacaatgaagacgaagggagtaaataaaggaagaattctcatcttttttcctgatcattcaaagaacagtttctcaaggttaagccaagtcctccttgcaagttgccaaataatagcttaggaaaagaattagtctgcctgcatgatgatcttcttaggcaaaaacgtcttcacagcccttgaccttggtgaatttttttccccaaaagcatccaaaagaagaattataaaccccagaacgagatggaaataaacaagtattttttttttatgatgtttggcctgaactgtgggctttaattgggggatactgatcgtttggaaagaagtgagaaaattctgaagaaatggcggccttgggctaggcggggtcccctatttcttctgtttctcactgaagtcctactgctgagccaagactcagtcactctggaaagagcatgaccgataaagaaaacagttcctttctgatggggagcgtctgagtgcagatcatgaggctctttctctaggtttaattcttttccatggtgaccggacttggtgtcttgtagcctggttacgaagtgggacgttgagcttctactgacgatgccctgcatggaccagctgggatctggctggggctgccctgtgtccctaacgaccataggcaatccatcttcttgtgtcagcaatttctggacacccactgttttccaccaagagctgaggtggcaacaactcagtgagcaataaacaaaatgacacagaaatgcacagtgttgttatgaaggagcctgtttacctgtgttcaaaatctggcaccattcccttgagcagggcccgctcaggagggaccaggtctgccagtttctgtgcctgcagagagacgaagccccacgagccacaccctactctacaagaggaaagggggttggatgggaagaatctattttgctgttttggaaagcacacagccgacctacaaacctcctgtgatggtgtttcttcggatgtgtaaaataaggctttatttgtcaattccgctgtaaaataagcattgtccgagtaaaaacagcagca

SEQ ID NO: 436501 - DNA, 1107 bp, Homo sapiens
gcatcgctagcacagttggtccgagctgccgaaaggtctggtcgcagagacaggaacgtgtaatcctcagcgtgctccagcccacagcttcgctctactgctcggcagggcagctggcctctgggcaccggcggcccctctgcctcgcggaaaagcctgatgaagtcctccgatattgatcaggatttattcacagacagttactgcaaggtgtgcagtgcacagctgatctccgaatcgcagcgtgtggcccactacgagagtcgaaaacatgcaagcaaagtccgactgtattacatgcttcaccccagggatggagggtgtcctgccaagaggctccggtcagaaaatggaagtgatgccgacatggtggataagaacaagtgctgcacactctgcaacatgtcattcacttcagcggtggtggccgattcccattatcaaggcaaaatccacgccaagaggttaaaactcttgctaggagagaagaccccattaaagaccacagcaacacccctgagcccacttaagcccccacggatggacactgctccggtggtcgcatctccctatcaaagaagagattcagacagatactgtgggctctgtgcagcctggtttaataaccctctgatgccctgcatggaccagctgggatctggctggggctgccctgtgtccctaacgaccataggcaatccatcttcttgtgtcagcaatttctggacacccactgttttccaccaagagctgaggtggcaacaactcagtgagcaataaacaaaatgacacagaaatgcacagtgttgttatgaaggagcctgtttacctgtgttcaaaatctggcaccattcccttgagcagggcccgctcaggagggaccaggtctgccagtttctgtgcctgcagagagacgaagccccacgagccacaccctactctacaagaggaaagggggttggatgggaagaatctattttgctgttttggaaagcacacagccgacctacaaacctcctgtgatggtgtttcttcggatgtgtaaaataaggctttatttgtcaattccgctgtaaaataagcattgtccgagtaaaaacagcagca

SEQ ID NO: 436502 - DNA, 1476 bp, Homo sapiens
agtaaactgagttgatttgactttatctcagtactactcttgacctttcacaactttcgtaggttcacagtctctctttttctaggaacttggctgtgttgtcctgcctcagagacaaattcatctattgtaggcctagcccctgcctttgaaaacaaggaaaggttggtagaacatcaacacagcatggaatttccagggaggtctcatttcaaaacttcataaagaacaagaaccacctggacttctgtgagggcgatgattaaactggcctgagtttgaatgaaaggataatgtatgctcaacctgtgactaacaccaaggaggtcaagtggcagaaggtcttgtatgagcgacagccctttcctgataactatgtggaccggcgattcctggaagagctccggaaaaacatccatgctcggaaataccaatattgggctgtggtatttgagtccagtgtggtgatccagcagctgtgcagtgtttgtgtttttgtggttatctggtggtatatggatgagggtcttctggccccccattggcttttagggactggcctggcttcttcactgattgggtatgttttgtttgatctcattgatggaggtgaagggcggaagaagagtgggcagacccggtgggctgacctgaagagtgccctagtcttcattactttcacttatgggttttcaccagtgctgaagacccttacagagtctgtcagcactgacaccatctatgccatgtcagtcttcatgctgttaggccatctcatcttttttgactatggtgccaatgctgccattgtatccagcacactatccttgaacatggccatctttgcttctgtatgcttggcatcacgtcttccccggtccctgcatgccttcatcatggtgacatttgccattcagatttttgccctgtggcccatgttgcagaagaaactaaaggcatgtactccccggagctatgtgggggtcacactgctttttgcattttcagccgtgggaggcctactgtccattagtgctgtgggagccgtactctttgcccttctgctgatgtctatctcatgtctgtgtccattctacctcattcgcttgcagctttttaaagaaaacattcatgggccttgggatgaagctgaaatcaaggaagacttgtccaggttcctcagttaaattaggacatccattacattattaaagcaagctgatagattagcctcctaactagtatagaacttaaagacagagttccattctggaagcagcatgtcattgtggtaagagaatagagatcaaaaccaaaaaaaatgaaccaaaggcttgggtggtgagggtgcttatcctttctgttattttgtagatgaaaaaactttctggggacctcttgaattacatgctgtaacatatgaagtgatgtggtttctattaaaaaaataacacatccatcaagttgtctcatgat

SEQ ID NO: 436503 - DNA, 1669 bp, Homo sapiens
cccgggcccggaagtgcttggccacagtcgcagccccggcgccccgaagcgggaaaaaggctgggtgccgccgtcccccagctgcgcaaccctaggaactctcggatcaacctggatgccttccttcacaataatctcatggaggtaatttaaagaatcccttttttggagagtcagagagaaaagcaaaaaaaagagcatgaggaatttgaagactgagagatgagttgtgtagcaccaacattttctttctgcctgaccttcatacctgatgaattaaaagggcaataattaaggtggaatttgcctcacatgaagttttattattttagttattaaaatagtttccaacactactgagaagcaaaaagcaattctcgttgttttaagaacataggatgtttggaagagtgagataggggacacattgaaaacagagaggcaatctgaaggctaccttgacgcatctgcaaagctcccagattctgactttcacaagacttgctttctgtttctgggcctcgcctaaacagactgccagtcatccgaaccgtggcaggatggagatgtttgtgtaaggtagactcaagtttgcaagactcaagaaggaaaccaccaaactaattttactttcacttaaaccagattgaaaccaagacttgaagaattaaaaactttgacattaaccattgattcactccaatgaaataattgtgttatagccagaatcatggtgaaattggaacaaggcttttgatgggatttttaattgagggacttatattaaattggatattttctttaatgaacagcatgtggccaaaattctattttcattaaagtatattaagcatcatgacaactcatattaaacctgcaacaaatgattaatgacatttagagacttcaaatgtcatgagacaccttaaatattaagaatcaaaaagaacacctcaaagttgtttctattcttagtaattatgcttaaaaaaacatctttccttgctttgaaagccagttgctaaaaataaaaactgttccatgaaaaatcacaatgcccaatgataaatttatgtatttgttttttaaagggggaggatggtgagaaaaatagaaagctcctggctgacatcagaggtcacaagatgagttcctcatttgtccaaatgacattcagctgctaaaagaagtcagacttttagagggctgttgaaaagacagtaagtcaggaggttttcagtacatgactgcaggggaatcagacacaggctagtcacttaagttgcttaattgtccgtgtacccttagcccacgacttcagggctcagcagcttcatccttcatggcaccaaaccttgacgtaagggattcaaagacacactcataagaatcgtgaatttgtcctcatgcaaaatttgggggactggctacaaaaccgaaacaaggagatcgtatccctaagtgaaagggactttatattaattgtcagttataacaatatgtaaaatacataaaagagatagagcactgcaggccatcaaggtcaaacatttgaaacagaattaaactaaattataaggaggattaaatggcttttgtctttgtaaagaaaagaatatgcatgcattgattgcctatgtagaaggattaataaatcttttggcatggt

SEQ ID NO: 436504 - DNA, 1338 bp, Homo sapiens
caagccctagtatggcggcatgtacacaagttgagccggtgccgacatttcatctgatgagcataggatgtttggaagagtgagataggggacacattgaaaacagagaggcaatctgaaggctaccttgacgcatctgcaaagctcccagattctgactttcacaagacttgctttctgtttctgggcctcgcctaaacagactgccagtcatccgaaccgtggcaggatggagatgtttgtgtaaggtagactcaagtttgcaagactcaagaaggaaaccaccaaactaattttactttcacttaaaccagattgaaaccaagacttgaagaattaaaaactttgacattaaccattgattcactccaatgaaataattgtgttatagccagaatcatggtgaaattggaacaaggcttttgatgggatttttaattgagggacttatattaaattggatattttctttaatgaacagcatgtggccaaaattctattttcattaaagtatattaagcatcatgacaactcatattaaacctgcaacaaatgattaatgacatttagagacttcaaatgtcatgagacaccttaaatattaagaatcaaaaagaacacctcaaagttgtttctattcttagtaattatgcttaaaaaaacatctttccttgctttgaaagccagttgctaaaaataaaaactgttccatgaaaaatcacaatgcccaatgataaatttatgtatttgttttttaaagggggaggatggtgagaaaaatagaaagctcctggctgacatcagaggtcacaagatgagttcctcatttgtccaaatgacattcagctgctaaaagaagtcagacttttagagggctgttgaaaagacagtaagtcaggaggttttcagtacatgactgcaggggaatcagacacaggctagtcacttaagttgcttaattgtccgtgtacccttagcccacgacttcagggctcagcagcttcatccttcatggcaccaaaccttgacgtaagggattcaaagacacactcataagaatcgtgaatttgtcctcatgcaaaatttgggggactggctacaaaaccgaaacaaggagatcgtatccctaagtgaaagggactttatattaattgtcagttataacaatatgtaaaatacataaaagagatagagcactgcaggccatcaaggtcaaacatttgaaacagaattaaactaaattataaggaggattaaatggcttttgtctttgtaaagaaaagaatatgcatgcattgattgcctatgtagaaggattaataaatcttttggcatggt

SEQ ID NO: 436505 - DNA, 722 bp, Homo sapiens
ttcgcaccttatggcactcacccgcacactctcatcttccttttttttttagcagatcgcataccgagttttgctgccccttctaccaatgtctaagatgaacgggaaaaatgcatataaatggaatttttcttttacgtgatgatacagtgttttggtgtcccaaagaaataaaatccagcactgtccaattgaagtataatgcaagccacatttctagtagccatattttaaaaagtaacaataaagtgttgaaatttaccttaatactgccttttttaaccaaataggtccaaaatattattattttgacaggcattatgagttgagttgtgtcccccacaaaattcatgttgaagccctaaccagcagtaccacagaatgtgactatattgagagatggggttttaaaagaagtaattaagttaaaatggtttcattagggtgggccctaatccaatataactgatgttcttataacaagaggcaatatggacatgggcacacacagagggaagatcatgtgatgacatgagtcaagaagagaggcctcagaagaaaccaacctgacaacacctggatctcagacttctaccttctagaattgtgaaaaatacatttatcttgcttaacccacctagtctatgataatttgttatggcatctctagcaaactaatacaatatgtaatcaattaatgaaaataaaatgtattaataaga

SEQ ID NO: 436506 - DNA, 545 bp, Homo sapiens
atatagtgcagagcaaagcagcgtttgaactgatggcagcactaatgactctcggtgaaacagtgaaaagataaatgatccttaatcaggaaaatgtttaaataagcaagtgcctggatataccacagcaaaacaacctgaattcatttaagtaaatgaagaagaaaaaaagaagcagtaaactgccccttctaccaatgtctaagatgaacgggaaaaatgcatataaatggaatttttcttttacgattgcaataaggttctttgcagttgaagcactgaaatgacagctgtttatcattatcctcatcaaggaaatgtaaaataaaaatagtaatttgtctctgatctttgaggcaaaaaagaatggtctgcaaacatttaaccttttatgtgcaggttcaatgatgctgtttaaaaaacgtgaataatattgtagaaaccagcttgtttctaaaaaatacaatagacagtccttcctattgcagtttttaaaaatagctattgagaaatctaatttaaccaataaaaacaccagcattgta

SEQ ID NO: 436507 - DNA, 1464 bp, Homo sapiens
cggacgcgtgggtcgacccacgcgtccgctgggtgccgccgtcccccagctgcgcaaccctaggaactctcgggaacttggctgtgttgtcctgcctcagagacaaattcatctattgtaggcctagcccctgcctttgaaaacaaggaaaggttggtagaacatcaacacagcatggaatttccagggaggtctcatttcaaaacttcataaagaacaagaaccacctggacttctgtgagggcgatgattaaactggcctgagtttgaatgaaaggataatgtatgctcaacctgtgactaacaccaaggaggtcaagtggcagaaggtcttgtatgagcgacagccctttcctgataactatgtggaccggcgattcctggaagagctccggaaaaacatccatgctcggaaataccaatattgggctgtggtatttgagtccagtgtggtgatccagcagctgtgcagtgtttgtgtttttgtggttatctggtggtatatggatgagggtcttctggccccccattggcttttagggactggcctggcttcttcactgattgggtatgttttgtttgatctcattgatggaggtgaagggcggaagaagagtgggcagacccggtgggctgacctgaagagtgccctagtcttcattactttcacttatgggttttcaccagtgctgaagacccttacagagtctgtcagcactgacaccatctatgccatgtcagtcttcatgctgttaggccatctcatcttttttgactatggtgccaatgctgccattgtatccagcacactatccttgaacatggccatctttgcttctgtatgcttggcatcacgtcttccccggtccctgcatgccttcatcatggtgacatttgccattcagatttttgccctgtggcccatgttgcagaagaaactaaaggcatgtactccccggagctatgtgggggtcacactgctttttgcattttcagccgtgggaggcctactgtccattagtgctgtgggagccgtactctttgcccttctgctgatgtctatctcatgtctgtgtccattctacctcattcgcttgcagctttttaaagaaaacattcatgggccttgggatgaagctgaaatcaaggaagacttgtccaggttcctcagttaaattaggacatccattacattattaaagcaagctgatagattagcctcctaactagtatagaacttaaagacagagttccattctggaagcagcatgtcattgtggtaagagaatagagatcaaaaccaaaaaaaatgaaccaaaggcttgggtggtgagggtgcttatcctttctgttattttgtagatgaaaaaactttctggggacctcttgaattacatgctgtaacatatgaagtgatgtggtttctattaaaaaaataacacatccatcaagttgtctcatgat

SEQ ID NO: 436508 - DNA, 1780 bp, Homo sapiens
cccgggcccggaagtgcttggccacagtcgcagccccggcgccccgaagcgggaaaaaggctgggtgccgccgtcccccagctgcgcaaccctaggaactctcgggtaggtgggttccgtgtaacggtcagtgtttccggggctccttttcctctgctgcctcccgcagacccaaggctgagtgaggggcggcggcggaagtgggaggcccacccaaaaagccaaatggggtgccagaagagtgaaggcgcaccctggggtcaccctaccctaccccgtcccctcccagccccactctgcgggcgggcgctgcccttttgggcgtcgcagaccctccaacccggcggcggccttaagattcccgggctgggatccctgctgcagagggggaacttggctgtgttgtcctgcctcagagacaaattcatctattgtaggcctagcccctgcctttgaaaacaaggaaaggttggtagaacatcaacacagcatggaatttccagggaggtctcatttcaaaacttcataaagaacaagaaccacctggacttctgtgagggcgatgattaaactggcctgagtttgaatgaaaggataatgtatgctcaacctgtgactaacaccaaggaggtcaagtggcagaaggtcttgtatgagcgacagccctttcctgataactatgtggaccggcgattcctggaagagctccggaaaaacatccatgctcggaaataccaatattgggctgtggtatttgagtccagtgtggtgatccagcagctgtgcagtgtttgtgtttttgtggttatctggtggtatatggatgagggtcttctggccccccattggcttttagggactggcctggcttcttcactgattgggtatgttttgtttgatctcattgatggaggtgaagggcggaagaagagtgggcagacccggtgggctgacctgaagagtgccctagtcttcattactttcacttatgggttttcaccagtgctgaagacccttacagagtctgtcagcactgacaccatctatgccatgtcagtcttcatgctgttaggccatctcatcttttttgactatggtgccaatgctgccattgtatccagcacactatccttgaacatggccatctttgcttctgtatgcttggcatcacgtcttccccggtccctgcatgccttcatcatggtgacatttgccattcagatttttgccctgtggcccatgttgcagaagaaactaaaggcatgtactccccggagctatgtgggggtcacactgctttttgcattttcagccgtgggaggcctactgtccattagtgctgtgggagccgtactctttgcccttctgctgatgtctatctcatgtctgtgtccattctacctcattcgcttgcagctttttaaagaaaacattcatgggccttgggatgaagctgaaatcaaggaagacttgtccaggttcctcagttaaattaggacatccattacattattaaagcaagctgatagattagcctcctaactagtatagaacttaaagacagagttccattctggaagcagcatgtcattgtggtaagagaatagagatcaaaaccaaaaaaaatgaaccaaaggcttgggtggtgagggtgcttatcctttctgttattttgtagatgaaaaaactttctggggacctcttgaattacatgctgtaacatatgaagtgatgtggtttctattaaaaaaataacacatccatcaagttgtctcatgat

SEQ ID NO: 436509 - DNA, 1163 bp, Homo sapiens
  misc_feature (1142)..(1143): n is a, c, g, or t
  misc_feature (1145)..(1145): n is a, c, g, or t
  misc_feature (1155)..(1156): n is a, c, g, or t
cccgggcccggaagtgcttggccacagtcgcagccccggcgccccgaagcgggaaaaaggctgggtgccgccgtcccccagctgcgcaaccctaggaactctcgggaacttggctgtgttgtcctgcctcagagacaaattcatctattgtaggcctagcccctgcctttgaaaacaaggaaaggttggtagaacatcaacacagcatggaatttccagggaggtctcatttcaaaacttcataaagaacaagaaccacctggacttctgtgagggcgatgattaaactggcctgagtttgaatgaaaggataatgtatgctcaacctgtgactaacaccaaggaggtcaagtggcagaaggtcttgtatgagcgacagccctttcctgataactatgtggaccggcgattcctggaagagctccggaaaaacatccatgctcggaaataccaatattgggctgtggtatttgagtccagtgtggtgatccagcagctgtgcagtgtttgtgtttttgtggttatctggtggtatatggatgagggtcttctggccccccattggcttttagggactggcctggcttcttcactgattgggtatgttttgtttgatctcattgatggaggtgaagggcggaagaagagtgggcagacccggtgggctgacctgaagagtgccctagtcttcattactttcacttatgggttttcaccagtgctgaagacccttacagagtctgtcagcactgacaccatctatgccatgtcagtcttcatgctgttaggccatctcatcttttttgactatggtgccaatgctgccattgtatccagcacactatccttgaacatggccatctttgcttctgtatgcttggcatcacgtcttccccggtccctgcatgccttcatcatggtgacatttgccattcagatttttgccctgtggcccatgttgcagaagaaactaaaggcatgtactccccggagctatgtgggggtcacactgctttttgcattttcagccgtgggaggcctactgtccattagtgctgtgggagcggcacatgcgttgggagcggccatgcgttgggagcggccatgcgttgggagcgggggatcctctagagtcgggctgnngnaaaggggtcnncaaccaa

SEQ ID NO: 436510 - DNA, 1046 bp, Homo sapiens
cggacgcgtgggtcgacccacgcgtccgctgggtgccgccgtcccccagctgcgcaaccctaggaactctcggatcaacctggatgccttccttcacaataatctcatggaggtaatttaaagaatcccttttttggagagtcagagagaaaagcaaaaaaaagagcatgaggaatttgaagactgagagatgagttgtgtagcaccaacattttctttctgcctgaccttcatacctgatgaattaaaagaggctgagctggaatggcttcttcatcattaagggctgacctattggcttggcattgaaatcaatttagaacaaatggtctccatttcaagtcagcttgaaccatctaagccccagaacatgacacagaaaaaaagaagcagtaaactgccccttctaccaatgtctaagatgaacgggaaaaatgcatataaatggaatttttcttttacgtgatgatacagtgttttggtgtcccaaagaaataaaatccagcactgtccaattgaagtataatgcaagccacatttctagtagccatattttaaaaagtaacaataaagtgttgaaatttaccttaatactgccttttttaaccaaataggtccaaaatattattattttgacaggcattatgagttgagttgtgtcccccacaaaattcatgttgaagccctaaccagcagtaccacagaatgtgactatattgagagatggggttttaaaagaagtaattaagttaaaatggtttcattagggtgggccctaatccaatataactgatgttcttataacaagaggcaatatggacatgggcacacacagagggaagatcatgtgatgacatgagtcaagaagagaggcctcagaagaaaccaacctgacaacacctggatctcagacttctaccttctagaattgtgaaaaatacatttatcttgcttaacccacctagtctatgataatttgttatggcatctctagcaaactaatacaatatgtaatcaattaatgaaaataaaatgtattaataaga

SEQ ID NO: 436511 - DNA, 1447 bp, Homo sapiens
cggacgcgtgggtcgacccacgcgtccgctgggtgccgccgtcccccagctgcgcaaccctaggaactctcggcaaaaaaaagagcatgaggaatttgaagactgagagatgagttgtgtagcaccaacattttctttctgcctgaccttcatacctgatgaattaaaagcataggatgtttggaagagtgagataggggacacattgaaaacagagaggcaatctgaaggctaccttgacgcatctgcaaagctcccagattctgactttcacaagacttgctttctgtttctgggcctcgcctaaacagactgccagtcatccgaaccgtggcaggatggagatgtttgtgtaaggtagactcaagtttgcaagactcaagaaggaaaccaccaaactaattttactttcacttaaaccagattgaaaccaagacttgaagaattaaaaactttgacattaaccattgattcactccaatgaaataattgtgttatagccagaatcatggtgaaattggaacaaggcttttgatgggatttttaattgagggacttatattaaattggatattttctttaatgaacagcatgtggccaaaattctattttcattaaagtatattaagcatcatgacaactcatattaaacctgcaacaaatgattaatgacatttagagacttcaaatgtcatgagacaccttaaatattaagaatcaaaaagaacacctcaaagttgtttctattcttagtaattatgcttaaaaaaacatctttccttgctttgaaagccagttgctaaaaataaaaactgttccatgaaaaatcacaatgcccaatgataaatttatgtatttgttttttaaagggggaggatggtgagaaaaatagaaagctcctggctgacatcagaggtcacaagatgagttcctcatttgtccaaatgacattcagctgctaaaagaagtcagacttttagagggctgttgaaaagacagtaagtcaggaggttttcagtacatgactgcaggggaatcagacacaggctagtcacttaagttgcttaattgtccgtgtacccttagcccacgacttcagggctcagcagcttcatccttcatggcaccaaaccttgacgtaagggattcaaagacacactcataagaatcgtgaatttgtcctcatgcaaaatttgggggactggctacaaaaccgaaacaaggagatcgtatccctaagtgaaagggactttatattaattgtcagttataacaatatgtaaaatacataaaagagatagagcactgcaggccatcaaggtcaaacatttgaaacagaattaaactaaattataaggaggattaaatggcttttgtctttgtaaagaaaagaatatgcatgcattgattgcctatgtagaaggattaataaatcttttggcatggt

SEQ ID NO: 436512 - DNA, 1528 bp, Homo sapiens
cggacgcgtgggtcgacccacgcgtccgctgggtgccgccgtcccccagctgcgcaaccctaggaactctcggatcaacctggatgccttccttcacaataatctcatggaggtaatttaaagaatcccttttttggagagtcagagagaaaagcaaaaaaaagagcatgaggaatttgaagactgagagatgagttgtgtagcaccaacattttctttctgcctgaccttcatacctgatgaattaaaagcataggatgtttggaagagtgagataggggacacattgaaaacagagaggcaatctgaaggctaccttgacgcatctgcaaagctcccagattctgactttcacaagacttgctttctgtttctgggcctcgcctaaacagactgccagtcatccgaaccgtggcaggatggagatgtttgtgtaaggtagactcaagtttgcaagactcaagaaggaaaccaccaaactaattttactttcacttaaaccagattgaaaccaagacttgaagaattaaaaactttgacattaaccattgattcactccaatgaaataattgtgttatagccagaatcatggtgaaattggaacaaggcttttgatgggatttttaattgagggacttatattaaattggatattttctttaatgaacagcatgtggccaaaattctattttcattaaagtatattaagcatcatgacaactcatattaaacctgcaacaaatgattaatgacatttagagacttcaaatgtcatgagacaccttaaatattaagaatcaaaaagaacacctcaaagttgtttctattcttagtaattatgcttaaaaaaacatctttccttgctttgaaagccagttgctaaaaataaaaactgttccatgaaaaatcacaatgcccaatgataaatttatgtatttgttttttaaagggggaggatggtgagaaaaatagaaagctcctggctgacatcagaggtcacaagatgagttcctcatttgtccaaatgacattcagctgctaaaagaagtcagacttttagagggctgttgaaaagacagtaagtcaggaggttttcagtacatgactgcaggggaatcagacacaggctagtcacttaagttgcttaattgtccgtgtacccttagcccacgacttcagggctcagcagcttcatccttcatggcaccaaaccttgacgtaagggattcaaagacacactcataagaatcgtgaatttgtcctcatgcaaaatttgggggactggctacaaaaccgaaacaaggagatcgtatccctaagtgaaagggactttatattaattgtcagttataacaatatgtaaaatacataaaagagatagagcactgcaggccatcaaggtcaaacatttgaaacagaattaaactaaattataaggaggattaaatggcttttgtctttgtaaagaaaagaatatgcatgcattgattgcctatgtagaaggattaataaatcttttggcatggt

SEQ ID NO: 436513 - DNA, 1389 bp, Homo sapiens
cggacgcgtgggtcgacccacgcgtccgctgggtgccgccgtcccccagctgcgcaaccctaggaactctcggtttctttctgcctgaccttcatacctgatgaattaaaagcataggatgtttggaagagtgagataggggacacattgaaaacagagaggcaatctgaaggctaccttgacgcatctgcaaagctcccagattctgactttcacaagacttgctttctgtttctgggcctcgcctaaacagactgccagtcatccgaaccgtggcaggatggagatgtttgtgtaaggtagactcaagtttgcaagactcaagaaggaaaccaccaaactaattttactttcacttaaaccagattgaaaccaagacttgaagaattaaaaactttgacattaaccattgattcactccaatgaaataattgtgttatagccagaatcatggtgaaattggaacaaggcttttgatgggatttttaattgagggacttatattaaattggatattttctttaatgaacagcatgtggccaaaattctattttcattaaagtatattaagcatcatgacaactcatattaaacctgcaacaaatgattaatgacatttagagacttcaaatgtcatgagacaccttaaatattaagaatcaaaaagaacacctcaaagttgtttctattcttagtaattatgcttaaaaaaacatctttccttgctttgaaagccagttgctaaaaataaaaactgttccatgaaaaatcacaatgcccaatgataaatttatgtatttgttttttaaagggggaggatggtgagaaaaatagaaagctcctggctgacatcagaggtcacaagatgagttcctcatttgtccaaatgacattcagctgctaaaagaagtcagacttttagagggctgttgaaaagacagtaagtcaggaggttttcagtacatgactgcaggggaatcagacacaggctagtcacttaagttgcttaattgtccgtgtacccttagcccacgacttcagggctcagcagcttcatccttcatggcaccaaaccttgacgtaagggattcaaagacacactcataagaatcgtgaatttgtcctcatgcaaaatttgggggactggctacaaaaccgaaacaaggagatcgtatccctaagtgaaagggactttatattaattgtcagttataacaatatgtaaaatacataaaagagatagagcactgcaggccatcaaggtcaaacatttgaaacagaattaaactaaattataaggaggattaaatggcttttgtctttgtaaagaaaagaatatgcatgcattgattgcctatgtagaaggattaataaatcttttggcatggt

SEQ ID NO: 436514 - DNA, 1496 bp, Homo sapiens
cccgggcccggaagtgcttggccacagtcgcagccccggcgccccgaagcgggaaaaaggctgggtgccgccgtcccccagctgcgcaaccctaggaactctcgggaacttggctgtgttgtcctgcctcagagacaaattcatctattgtaggcctagcccctgcctttgaaaacaaggaaaggttggtagaacatcaacacagcatggaatttccagggaggtctcatttcaaaacttcataaagaacaagaaccacctggacttctgtgagggcgatgattaaactggcctgagtttgaatgaaaggataatgtatgctcaacctgtgactaacaccaaggaggtcaagtggcagaaggtcttgtatgagcgacagccctttcctgataactatgtggaccggcgattcctggaagagctccggaaaaacatccatgctcggaaataccaatattgggctgtggtatttgagtccagtgtggtgatccagcagctgtgcagtgtttgtgtttttgtggttatctggtggtatatggatgagggtcttctggccccccattggcttttagggactggcctggcttcttcactgattgggtatgttttgtttgatctcattgatggaggtgaagggcggaagaagagtgggcagacccggtgggctgacctgaagagtgccctagtcttcattactttcacttatgggttttcaccagtgctgaagacccttacagagtctgtcagcactgacaccatctatgccatgtcagtcttcatgctgttaggccatctcatcttttttgactatggtgccaatgctgccattgtatccagcacactatccttgaacatggccatctttgcttctgtatgcttggcatcacgtcttccccggtccctgcatgccttcatcatggtgacatttgccattcagatttttgccctgtggcccatgttgcagaagaaactaaaggcatgtactccccggagctatgtgggggtcacactgctttttgcattttcagccgtgggaggcctactgtccattagtgctgtgggagccgtactctttgcccttctgctgatgtctatctcatgtctgtgtccattctacctcattcgcttgcagctttttaaagaaaacattcatgggccttgggatgaagctgaaatcaaggaagacttgtccaggttcctcagttaaattaggacatccattacattattaaagcaagctgatagattagcctcctaactagtatagaacttaaagacagagttccattctggaagcagcatgtcattgtggtaagagaatagagatcaaaaccaaaaaaaatgaaccaaaggcttgggtggtgagggtgcttatcctttctgttattttgtagatgaaaaaactttctggggacctcttgaattacatgctgtaacatatgaagtgatgtggtttctattaaaaaaataacacatccatcaagttgtctcatgat

SEQ ID NO: 436515 - DNA, 1519 bp, Homo sapiens
cccgggcccggaagtgcttggccacagtcgcagccccggcgccccgaagcgggaaaaaggctgggtgccgccgtcccccagctgcgcaaccctaggaactctcgggttcacagtctctctttttctaggaacttggctgtgttgtcctgcctcagagacaaattcatctattgtaggcctagcccctgcctttgaaaacaaggaaaggttggtagaacatcaacacagcatggaatttccagggaggtctcatttcaaaacttcataaagaacaagaaccacctggacttctgtgagggcgatgattaaactggcctgagtttgaatgaaaggataatgtatgctcaacctgtgactaacaccaaggaggtcaagtggcagaaggtcttgtatgagcgacagccctttcctgataactatgtggaccggcgattcctggaagagctccggaaaaacatccatgctcggaaataccaatattgggctgtggtatttgagtccagtgtggtgatccagcagctgtgcagtgtttgtgtttttgtggttatctggtggtatatggatgagggtcttctggccccccattggcttttagggactggcctggcttcttcactgattgggtatgttttgtttgatctcattgatggaggtgaagggcggaagaagagtgggcagacccggtgggctgacctgaagagtgccctagtcttcattactttcacttatgggttttcaccagtgctgaagacccttacagagtctgtcagcactgacaccatctatgccatgtcagtcttcatgctgttaggccatctcatcttttttgactatggtgccaatgctgccattgtatccagcacactatccttgaacatggccatctttgcttctgtatgcttggcatcacgtcttccccggtccctgcatgccttcatcatggtgacatttgccattcagatttttgccctgtggcccatgttgcagaagaaactaaaggcatgtactccccggagctatgtgggggtcacactgctttttgcattttcagccgtgggaggcctactgtccattagtgctgtgggagccgtactctttgcccttctgctgatgtctatctcatgtctgtgtccattctacctcattcgcttgcagctttttaaagaaaacattcatgggccttgggatgaagctgaaatcaaggaagacttgtccaggttcctcagttaaattaggacatccattacattattaaagcaagctgatagattagcctcctaactagtatagaacttaaagacagagttccattctggaagcagcatgtcattgtggtaagagaatagagatcaaaaccaaaaaaaatgaaccaaaggcttgggtggtgagggtgcttatcctttctgttattttgtagatgaaaaaactttctggggacctcttgaattacatgctgtaacatatgaagtgatgtggtttctattaaaaaaataacacatccatcaagttgtctcatgat

SEQ ID NO: 436516 - DNA, 945 bp, Homo sapiens
cccgggcccggaagtgcttggccacagtcgcagccccggcgccccgaagcgggaaaaaggctgggtgccgccgtcccccagctgcgcaaccctaggaactctcgggaacttggctgtgttgtcctgcctcagagacaaattcatctattgtaggcctagcccctgcctttgaaaacaaggaaaggttggtagaacatcaacacagcatggaatttccagggaggtctcatttcaaaacttcataaagaacaagaaccacctggacttctgtgagggcgatgattaaactggcctgagtttgaatgaaaggataatgtatgctcaacctgtgactaacaccaaggaggtcaagtggcagaaggtcttgtatgagcgacagccctttcctgataactatgtggaccggcgattcctggaagagctccggaaaaacatccatgctcggaaataccaatattgggctgtggtatttgagtccagtgtggtgatccagcagctgtgcagtgtttgtgtttttgtggttatctggtggtatatggatgagggtcttctggccccccattggcttttagggactggcctggcttcttcactgattgggtatgttttgtttgatctcattgatggaggtgaagggcggaagaagagtgggcagacccggtgggctgacctgaagagtgccctagtcttcattactttcacttatgggttttcaccagtgctgaagacccttacagagtctgtcagcactgacaccatctatgccatgtcagtcttcatgctgttaggccatctcatcttttttgactatggtgccaatgctgccattgtatccagcacactatcctttcattcaaactcaggccagtttaatcatcgccctcacagaagtccaggtggttcttgttctttatgaacgttttgaaattgagacctccctgggaa

SEQ ID NO: 436517 - DNA, 1670 bp, Homo sapiens
ggttggggggacatgccacatgcctctggccccaccatctcatgcctttgccatccatctcctgactggccagaaggacaccaggagcagctcatgagctacaaaaactgaaggtcgggaacccaaggtcgtgcaccaaaggtcatgagaattttgcattttatgttgctctcatttctgatcatttgaaacaacctctctgagtttctgaaagggaagggaatggagaaaagcacacccaattatgctaggttctgttttattttggcttttgtttttgttttttttcccacccaccacaagttcttttcttcccctctcatagtgtgggcgaaatgctgaaaacttcgaccgatttttcacccgccatccaccagtcctaacacctcccgaccaggaagtcatcaggaatattgaccaatcagaattcgaaggattttcctttgttaactctgaatttttaaaacccgaagtcaagagctaagtagatgtgtagatctccgtccttcatttctgtcattcaagctcaacggctattgtggtgacatttttatgtttttcattgccaagttgcatccatgtttgattttctgatgagactagagtgacagtgtttcagaacccaaatgtcctcaggtagtttggagcatctctatgagatgggattatgcagatggcctatggaaaatgcagctgcataattaacacattatcaaagtcctcttacaatttattttccgcagcatgtcagctaagtagacccaatggggagagaaaatgcctgctttctttccctctttttctgcactgccatattcacccccaaccatccaatctgtggataattggatgttagcggtactcttccacttccgggcctggagcttggcttgtatccaagtgtatggttgctttgcctaagaggaatccctctatttcacctgttctggaggcaccagaccttgaaaagaacatgctcaaaataaaatgttatctgttatttttgtaaactcaaagttaagatgatcaaagttctaaaattccaagaatgtgcttttagacggtctcaatctaaaagcacttcaaggggtcaaagggcaaccagcttgggtgctacctcagtgttgtagtttctgatactttatgtctttgctcaccctcatccccaaactacttgaaaagggcatttggcaccactctctgaaacaacacagtcactctagcaaggcccccaaagggccctggttttacattacatttcaaactttatttgctttggggttttgtttctgttgttgttcaaatgcaaaaaaaagaaaaaaaaagaaaaaaaaaggtgactcacattgttacacatgctttaaaatatgtattcaaatgttattaaccacaatgacgacctgctttgatttaaccaagaagacggctgcggagcctagcagactcaggcctgtgggaatgggatttgttacaaatctaggtttgttactggcttcagaaagctaattaagtgctctgaaaaagacaccgtttcttgaaacaaagatggttgtattcctcactttgatgttgttttgcaagatgtttgtggaaatgttcatttgtatctggatctctgttatgtgccatttttcttctagcatcgagatacaataaaaaaaaaaaaaaag

SEQ ID NO: 436518 - DNA, 3387 bp, Homo sapiens
agctgggcgagtgacagccccggctccgcgcgccgcggccgccagagccggcgcaggggaagcgcccggggccccgggtgcagcagcggccgccgcctcccgcgcctccccggcccgcagcccgcggtcccgcggccccggggccggcacctctcgggctccggctccccgcgcgcaagatggctgacccggctgcggggccgccgccgagcgagggcgaggagagcaccgtgcgcttcgcccgcaaaggcgccctccggcagaagaacgtgcatgaggtcaagaaccacaaattcaccgcccgcttcttcaagcagcccaccttctgcagccactgcaccgacttcatctggggcttcgggaagcagggattccagtgccaagtttgctgctttgtggtgcacaagcggtgccatgaatttgtcacattctcctgccctggcgctgacaagggtccagcctccgatgacccccgcagcaaacacaagtttaagatccacacgtactccagccccacgttttgtgaccactgtgggtcactgctgtatggactcatccaccaggggatgaaatgtgacacctgcatgatgaatgtgcacaagcgctgcgtgatgaatgttcccagcctgtgtggcacggaccacacggagcgccgcggccgcatctacatccaggcccacatcgacagggacgtcctcattgtcctcgtaagagatgctaaaaaccttgtacctatggaccccaatggcctgtcagatccctacgtaaaactgaaactgattcccgatcccaaaagtgagagcaaacagaagaccaaaaccatcaaatgctccctcaaccctgagtggaatgagacatttagatttcagctgaaagaatcggacaaagacagaagactgtcagtagagatttgggattgggatttgaccagcaggaatgacttcatgggatctttgtcctttgggatttctgaacttcagaaagccagtgttgatggctggtttaagttactgagccaggaggaaggcgagtacttcaatgtgcctgtgccaccagaaggaagtgaggccaatgaagaactgcggcagaaatttgagagggccaagatcagtcagggaaccaaggtcccggaagaaaagacgaccaacactgtctccaaatttgacaacaatggcaacagagaccggatgaaactgaccgattttaacttcctaatggtgctggggaaaggcagctttggcaaggtcatgctttcagaacgaaaaggcacagatgagctctatgctgtgaagatcctgaagaaggacgttgtgatccaagatgatgacgtggagtgcactatggtggagaagcgggtgttggccctgcctgggaagccgcccttcctgacccagctccactcctgcttccagaccatggaccgcctgtactttgtgatggagtacgtgaatgggggcgacctcatgtatcacatccagcaagtcggccggttcaaggagccccatgctgtattttacgctgcagaaattgccatcggtctgttcttcttacagagtaagggcatcatttaccgtgacctaaaacttgacaacgtgatgctcgattctgagggacacatcaagattgccgattttggcatgtgtaaggaaaacatctgggatggggtgacaaccaagacattctgtggcactccagactacatcgcccccgagataattgcttatcagccctatgggaagtccgtggattggtgggcatttggagtcctgctgtatgaaatgttggctgggcaggcaccctttgaaggggaggatgaagatgaactcttccaatccatcatggaacacaacgtagcctatcccaagtctatgtccaaggaagctgtggccatctgcaaagggctgatgaccaaacacccaggcaaacgtctgggttgtggacctgaaggcgaacgtgatatcaaagagcatgcatttttccggtatattgattgggagaaacttgaacgcaaagagatccagcccccttataagccaaaagcttgtgggcgaaatgctgaaaacttcgaccgatttttcacccgccatccaccagtcctaacacctcccgaccaggaagtcatcaggaatattgaccaatcagaattcgaaggattttcctttgttaactctgaatttttaaaacccgaagtcaagagctaagtagatgtgtagatctccgtccttcatttctgtcattcaagctcaacggctattgtggtgacatttttatgtttttcattgccaagttgcatccatgtttgattttctgatgagactagagtgacagtgtttcagaacccaaatgtcctcaggtagtttggagcatctctatgagatgggattatgcagatggcctatggaaaatgcagctgcataattaacacattatcaaagtcctcttacaatttattttccgcagcatgtcagctaagtagacccaatggggagagaaaatgcctgctttctttccctctttttctgcactgccatattcacccccaaccatccaatctgtggataattggatgttagcggtactcttccacttccgggcctggagcttggcttgtatccaagtgtatggttgctttgcctaagaggaatccctctatttcacctgttctggaggcaccagaccttgaaaagaacatgctcaaaataaaatgttatctgttatttttgtaaactcaaagttaagatgatcaaagttctaaaattccaagaatgtgcttttagacggtctcaatctaaaagcacttcaaggggtcaaagggcaaccagcttgggtgctacctcagtgttgtagtttctgatactttatgtctttgctcaccctcatccccaaactacttgaaaagggcatttggcaccactctctgaaacaacacagtcactctagcaaggcccccaaagggccctggttttacattacatttcaaactttatttgctttggggttttgtttctgttgttgttcaaatgcaaaaaaaagaaaaaaaaagaaaaaaaaaggtgactcacattgttacacatgctttaaaatatgtattcaaatgttattaaccacaatgacgacctgctttgatttaaccaagaagacggctgcggagcctagcagactcaggcctgtgggaatgggatttgttacaaatctaggtttgttactggcttcagaaagctaattaagtgctctgaaaaagacaccgtttcttgaaacaaagatggttgtattcctcactttgatgttgttttgcaagatgtttgtggaaatgttcatttgtatctggatctctgttatgtgccatttttcttctagcatcgagatacaataaaaaaaaaaaaaaag

SEQ ID NO: 436519 - DNA, 3071 bp, Homo sapiens
agctgggcgagtgacagccccggctccgcgcgccgcggccgccagagccggcgcaggggaagcgcccggggccccgggtgcagcagcggccgccgcctcccgcgcctccccggcccgcagcccgcggtcccgcggccccggggccggcacctctcgggctccggctccccgcgcgcaagatggctgacccggctgcggggccgccgccgagcgagggcgaggagagcaccgtgcgcttcgcccgcaaaggcgccctccggcagaagaacgtgcatgaggtcaagaaccacaaattcaccgcccgcttcttcaagcagcccaccttctgcagccactgcaccgacttcatctggggcttcgggaagcagggattccagtgccaagtttgctgctttgtggtgcacaagcggtgccatgaatttgtcacattctcctgccctggcgctgacaagggtccagcctccgatgacccccgcagcaaacacaagtttaagatccacacgtactccagccccacgttttgtgaccactgtgggtcactgctgtatggactcatccaccaggggatgaaatgtgacacctgcatgatgaatgtgcacaagcgctgcgtgatgaatgttcccagcctgtgtggcacggaccacacggagcgccgcggccgcatctacatccaggcccacatcgacagggacgtcctcattgtcctcgtaagagatgctaaaaaccttgtacctatggaccccaatggcctgtcagatccctacgtaaaactgaaactgattcccgatcccaaaagtgagagcaaacagaagaccaaaaccatcaaatgctccctcaaccctgagtggaatgagacatttagatttcagctgaaagaatcggacaaagacagaagactgtcagtagagatttgggattgggatttgaccagcaggaatgacttcatgggatctttgtcctttgggatttctgaacttcagaaagccagtgttgatggctggtttaagttactgagccaggaggaaggcgagtacttcaatgtgcctgtgccaccagaaggaagtgaggccaatgaagaactgcggcagaaatttgagagggccaagatcagtcagggaaccaaggtcccggaagaaaagacgaccaacactgtctccaaatttgacaacaatggcaacagagaccggatgaaactgaccgattttaacttcctaatggtgctggggaaaggcagctttggcaaggtcatgctttcagaacgaaaaggcacagatgagctctatgctgtgaagatcctgaagaaggacgttgtgatccaagatgatgacgtggagtgcactatggtggagaagcgggtgttggccctgcctgggaagccgcccttcctgacccagctccactcctgcttccagaccatggaccgcctgtactttgtgatggagtacgtgaatgggggcgacctcatgtatcacatccagcaagtcggccggttcaaggagccccatgctgtattttacgctgcagaaattgccatcggtctgttcttcttacagagtaagggcatcatttaccgtgacctaaaacttgacaacgtgatgctcgattctgagggacacatcaagattgccgattttggcatgtgtaaggaaaacatctgggatggggtgacaaccaagacattctgtggcactccagactacatcgcccccgagataattgcttatcagccctatgggaagtccgtggattggtgggcatttggagtcctgctgtatgaaatgttggctgggcaggcaccctttgaaggggaggatgaagatgaactcttccaatccatcatggaacacaacgtagcctatcccaagtctatgtccaaggaagctgtggccatctgcaaagggctgatgaccaaacacccaggcaaacgtctgggttgtggacctgaaggcgaacgtgatatcaaagagcatgcatttttccggtatattgattgggagaaacttgaacgcaaagagatccagcccccttataagccaaaagcttgtgggcgaaatgctgaaaacttcgaccgatttttcacccgccatccaccagtcctaacacctcccgaccaggaagtcatcaggaatattgaccaatcagaattcgaaggattttcctttgttaactctgaatttttaaaacccgaagtcaagagctaagtagatgtgtagatctccgtccttcatttctgtcattcaagctcaacggctattgtggtgacatttttatgtttttcattgccaagttgcatccatgtttgattttctgatgagactagagtgacagtgtttcagaacccaaatgtcctcaggtagtttggagcatctctatgagatgggattatgcagatggcctatggaaaatgcagctgcataattaacacattatcaaagtcctcttacaatttattttccgcagcatgtcagctaagtagacccaatggggagagaaaatgcctgctttctttccctctttttctgcactgccatattcacccccaaccatccaatctgtggataattggatgttagcggtactcttccacttccgggcctggagcttggcttgtatccaagtgtatggttgctttgcctaagaggaatccctctatttcacctgttctggaggcaccagaccttgaaaagaacatgctcaaaataaaatgttatctgttatttttgtaaactcaaagttaagatgatcaaagttctaaaattccaagaatgtgcttttagacggtctcaatctaaaagcacttcaaggggtcaaagggcaaccagcttgggtgctacctcagtgttgtagtttctgatactttatgtctttgctcaccctcatccccaaactacttgaaaagggcatttggcaccactctctgaaacaacacagtcactctagcaaggcccccaaagggccctggttttacattacatttcaaactttatttgctttggggttttgtttctgttgttgttcaaatgcaaaaaaaaattatttgctttggggttttatttctgttgttcaaatgc

SEQ ID NO: 436520 - DNA, 565 bp, Homo sapiens
agctgggcgagtgacagccccggctccgcgcgccgcggccgccagagccggcgcaggggaagcgcccggggccccgggtgcagcagcggccgccgcctcccgcgcctccccggcccgcagcccgcggtcccgcggccccggggccggcacctctcgggctccggctccccgcgcgcaagatggctgacccggctgcggggccgccgccgagcgagggcgaggagagcaccgtgcgcttcgcccgcaaaggcgccctccggcagaagaacgtgcatgaggtcaagaaccacaaattcaccgcccgcttcttcaagcagcccaccttctgcagccactgcaccgacttcatctgaagggacacactttccttcccactgatgtggagcattggccaatggaacgtgagcagacacaatctactctacatttaaacagaggctttgagaagctattgtgtggtttagccattgttcttcccacctctgccacaagaccaagaaagggctgttgcctcagctgcgtcctgggatggaaaagacacaggaagtagaatcacagagccaca

SEQ ID NO: 436521 - DNA, 3086 bp, Homo sapiens
agcaccgtttctgggcacagggctccagcgatggtcccaacaggtacaatgacctctggggaccaagttcagttcttggtgagttctccagtgcctctcgatgtaggatgaaccgttggcatgctccactgacgctggctccttctgttgtttctcttggctccaggacccccgcagcaaacacaagtttaagatccacacgtactccagccccacgttttgtgaccactgtgggtcactgctgtatggactcatccaccaggggatgaaatgtgacacctgcatgatgaatgtgcacaagcgctgcgtgatgaatgttcccagcctgtgtggcacggaccacacggagcgccgcggccgcatctacatccaggcccacatcgacagggacgtcctcattgtcctcgtaagagatgctaaaaaccttgtacctatggaccccaatggcctgtcagatccctacgtaaaactgaaactgattcccgatcccaaaagtgagagcaaacagaagaccaaaaccatcaaatgctccctcaaccctgagtggaatgagacatttagatttcagctgaaagaatcggacaaagacagaagactgtcagtagagatttgggattgggatttgaccagcaggaatgacttcatgggatctttgtcctttgggatttctgaacttcagaaagccagtgttgatggctggtttaagttactgagccaggaggaaggcgagtacttcaatgtgcctgtgccaccagaaggaagtgaggccaatgaagaactgcggcagaaatttgagagggccaagatcagtcagggaaccaaggtcccggaagaaaagacgaccaacactgtctccaaatttgacaacaatggcaacagagaccggatgaaactgaccgattttaacttcctaatggtgctggggaaaggcagctttggcaaggtcatgctttcagaacgaaaaggcacagatgagctctatgctgtgaagatcctgaagaaggacgttgtgatccaagatgatgacgtggagtgcactatggtggagaagcgggtgttggccctgcctgggaagccgcccttcctgacccagctccactcctgcttccagaccatggaccgcctgtactttgtgatggagtacgtgaatgggggcgacctcatgtatcacatccagcaagtcggccggttcaaggagccccatgctgtattttacgctgcagaaattgccatcggtctgttcttcttacagagtaagggcatcatttaccgtgacctaaaacttgacaacgtgatgctcgattctgagggacacatcaagattgccgattttggcatgtgtaaggaaaacatctgggatggggtgacaaccaagacattctgtggcactccagactacatcgcccccgagataattgcttatcagccctatgggaagtccgtggattggtgggcatttggagtcctgctgtatgaaatgttggctgggcaggcaccctttgaaggggaggatgaagatgaactcttccaatccatcatggaacacaacgtagcctatcccaagtctatgtccaaggaagctgtggccatctgcaaagggctgatgaccaaacacccaggcaaacgtctgggttgtggacctgaaggcgaacgtgatatcaaagagcatgcatttttccggtatattgattgggagaaacttgaacgcaaagagatccagcccccttataagccaaaagcttgtgggcgaaatgctgaaaacttcgaccgatttttcacccgccatccaccagtcctaacacctcccgaccaggaagtcatcaggaatattgaccaatcagaattcgaaggattttcctttgttaactctgaatttttaaaacccgaagtcaagagctaagtagatgtgtagatctccgtccttcatttctgtcattcaagctcaacggctattgtggtgacatttttatgtttttcattgccaagttgcatccatgtttgattttctgatgagactagagtgacagtgtttcagaacccaaatgtcctcaggtagtttggagcatctctatgagatgggattatgcagatggcctatggaaaatgcagctgcataattaacacattatcaaagtcctcttacaatttattttccgcagcatgtcagctaagtagacccaatggggagagaaaatgcctgctttctttccctctttttctgcactgccatattcacccccaaccatccaatctgtggataattggatgttagcggtactcttccacttccgggcctggagcttggcttgtatccaagtgtatggttgctttgcctaagaggaatccctctatttcacctgttctggaggcaccagaccttgaaaagaacatgctcaaaataaaatgttatctgttatttttgtaaactcaaagttaagatgatcaaagttctaaaattccaagaatgtgcttttagacggtctcaatctaaaagcacttcaaggggtcaaagggcaaccagcttgggtgctacctcagtgttgtagtttctgatactttatgtctttgctcaccctcatccccaaactacttgaaaagggcatttggcaccactctctgaaacaacacagtcactctagcaaggcccccaaagggccctggttttacattacatttcaaactttatttgctttggggttttgtttctgttgttgttcaaatgcaaaaaaaagaaaaaaaaagaaaaaaaaaggtgactcacattgttacacatgctttaaaatatgtattcaaatgttattaaccacaatgacgacctgctttgatttaaccaagaagacggctgcggagcctagcagactcaggcctgtgggaatgggatttgttacaaatctaggtttgttactggcttcagaaagctaattaagtgctctgaaaaagacaccgtttcttgaaacaaagatggttgtattcctcactttgatgttgttttgcaagatgtttgtggaaatgttcatttgtatctggatctctgttatgtgccatttttcttctagcatcgagatacaataaaaaaaaaaaaaaag

SEQ ID NO: 436522 - DNA, 2090 bp, Homo sapiens
caggggcgagctgcactaactcaggggcgagctgctaactcaggggcgagctgctatctcaggggagcagccacaaagaagcaagtcttgtaaaaggtcttttgcaaaggagagtgaacccagcaatgagagatccttaacagctagtgcccattagggggctaaacctaaagcctgggtggtgatggctcaaacgctaatgagtcagtgaatccttaccgaccccctggcctttataatctgaggcaactttggctgcagcccgggaatgtgcagggcactagggaatacaaggccttcttccctggttgtcttgtaataaaacagccatggggttgtccctccagtccgagagactgagatgaggcctacatagcagcgatgtggtcaggtaaaaatcaggaacccactgaaatcttgggcaagccaccctgcctgcttgtgcctcggttctctcatatgtcatatataggaggtgaggactccagctccacctgccccaggtgggtgtggtgatgatgaggaaagacaagaggcttgcaaggaccctgaagaggtcggagcatcatacagattcctttattagcccacattctgatgttccctggtgagacttgccccaagcaattgctagtaaatgggggttaatttcttctccacctccctactgaacaaaaaaagaaatgccagacttactaggagaatcgagttgctttgagtttcttttgttttgttttgttttgttttgttttaaggctccccttacacaccctcctttaagctttgggttttctctcttatagtttgttgacacatgctaaaaatgtctttggagagaacttctgcctgataaacacccaattctagactgtgggtggattttcgagctgacggtggtcaattcctttcattaagcagtgatctgatttctccacatggccattctgccttcttgggggcagagtagatgggcagcagttcaccttttcagagaaagaggtcttctagccacctgggctgctactgaatggttttctccaggacgctctacctaatgattatttctataacattaagcatggtaataagtagcttccaattcaattcatcctaaagccaaagaaaatacagcaacacacacacaacacacacacacacacacacacacacacacacacacaccactttatggcaattcttaactgacattcaatgacttacttcttttcttagaaaatttccaccacatttctatccccaagccaacatacaatgtgaaatgaaagccagtgcgtggagtgcagctgctaaaaattttcagcacagggctctttctgactctgctcatgagatggtatcagccacccaatgactggcgtatcttggtcctgtgtctttcttcttacgctgtgttaatgtgtttactttccatttggcagagagacaagagagacacctccaacttcgacaaagagttcaccagacagcctgtggaactgacccccactgataaactcttcatcatgaacttggaccaaaatgaatttgctggcttctcttatactaacccagagtttgtcattaatgtgtaggtgaatgcaaactccatcgttgagcctggggtgtaagacttcaagccaagcgtatgtatcaattctagtcttccaggattcacggtgcacatgctggcattcaacatgtggaaagcttgtcttagagggcttttctttgtatgtgtagcttgctagtttgttttctacatttgaaaatgtttagtttagaataagcgcattatccaattatagaggtacaattttccaaacttccagaaactcatcaaatgaacagacaatgtcaaaactactgtgtctgataccaaaatgcttcagtatttgtaatttttcaagtcagaagctgatgttcctggtaaaagtttttacagttattctataatatcttctttgaatgctaagcatgagcgatatttttaaaaattgtgagtaagctttgcagttactgtgaactattgtctcttggaggaagttttttgtttaagaattgatatgattaaactgaattaatatatgcaa

SEQ ID NO: 436523 - DNA, 2036 bp, Homo sapiens
caggggcgagctgcactaactcaggggcgagctgctaactcaggggcgagctgctatctcaggggagcagccacaaagaagcaagtcttgtaaaaggtcttttgcaaaggagagtgaacccagcaatgagagatccttaacagctagtgcccattagggggctaaacctaaagcctgggtggtgatggctcaaacgctaatgagtcagtgaatccttaccgaccccctggcctttataatctgaggcaactttggctgcagcccgggaatgtgcagggcactagggaatacaaggccttcttccctggttgtcttgtaataaaacagccatggggttgtccctccagtccgagagactgagatgaggcctacatagcagcgatgtggtcagctcggttctctcatatgtcatatataggaggtgaggactccagctccacctgccccaggtgggtgtggtgatgatgaggaaagacaagaggcttgcaaggaccctgaagaggtcggagcatcatacagattcctttattagcccacattctgatgttccctggtgagacttgccccaagcaattgctagtaaatgggggttaatttcttctccacctccctactgaacaaaaaaagaaatgccagacttactaggagaatcgagttgctttgagtttcttttgttttgttttgttttgttttgttttaaggctccccttacacaccctcctttaagctttgggttttctctcttatagtttgttgacacatgctaaaaatgtctttggagagaacttctgcctgataaacacccaattctagactgtgggtggattttcgagctgacggtggtcaattcctttcattaagcagtgatctgatttctccacatggccattctgccttcttgggggcagagtagatgggcagcagttcaccttttcagagaaagaggtcttctagccacctgggctgctactgaatggttttctccaggacgctctacctaatgattatttctataacattaagcatggtaataagtagcttccaattcaattcatcctaaagccaaagaaaatacagcaacacacacacaacacacacacacacacacacacacacacacacacacaccactttatggcaattcttaactgacattcaatgacttacttcttttcttagaaaatttccaccacatttctatccccaagccaacatacaatgtgaaatgaaagccagtgcgtggagtgcagctgctaaaaattttcagcacagggctctttctgactctgctcatgagatggtatcagccacccaatgactggcgtatcttggtcctgtgtctttcttcttacgctgtgttaatgtgtttactttccatttggcagagagacaagagagacacctccaacttcgacaaagagttcaccagacagcctgtggaactgacccccactgataaactcttcatcatgaacttggaccaaaatgaatttgctggcttctcttatactaacccagagtttgtcattaatgtgtaggtgaatgcaaactccatcgttgagcctggggtgtaagacttcaagccaagcgtatgtatcaattctagtcttccaggattcacggtgcacatgctggcattcaacatgtggaaagcttgtcttagagggcttttctttgtatgtgtagcttgctagtttgttttctacatttgaaaatgtttagtttagaataagcgcattatccaattatagaggtacaattttccaaacttccagaaactcatcaaatgaacagacaatgtcaaaactactgtgtctgataccaaaatgcttcagtatttgtaatttttcaagtcagaagctgatgttcctggtaaaagtttttacagttattctataatatcttctttgaatgctaagcatgagcgatatttttaaaaattgtgagtaagctttgcagttactgtgaactattgtctcttggaggaagttttttgtttaagaattgatatgattaaactgaattaatatatgcaa

SEQ ID NO: 436524 - DNA, 2400 bp, Homo sapiens
agctgggcgagtgacagccccggctccgcgcgccgcggccgccagagccggcgcaggggaagcgcccggggccccgggtgcagcagcggccgccgcctcccgcgcctccccggcccgcagcccgcggtcccgcggccccggggccggcacctctcgggctccggctccccgcgcgcaagatggctgacccggctgcggggccgccgccgagcgagggcgaggagagcaccgtgcgcttcgcccgcaaaggcgccctccggcagaagaacgtgcatgaggtcaagaaccacaaattcaccgcccgcttcttcaagcagcccaccttctgcagccactgcaccgacttcatctggggcttcgggaagcagggattccagtgccaagtttgctgctttgtggtgcacaagcggtgccatgaatttgtcacattctcctgccctggcgctgacaagggtccagcctccgatgacccccgcagcaaacacaagtttaagatccacacgtactccagccccacgttttgtgaccactgtgggtcactgctgtatggactcatccaccaggggatgaaatgtgacacctgcatgatgaatgtgcacaagcgctgcgtgatgaatgttcccagcctgtgtggcacggaccacacggagcgccgcggccgcatctacatccaggcccacatcgacagggacgtcctcattgtcctcgtaagagatgctaaaaaccttgtacctatggaccccaatggcctgtcagatccctacgtaaaactgaaactgattcccgatcccaaaagtgagagcaaacagaagaccaaaaccatcaaatgctccctcaaccctgagtggaatgagacatttagatttcagctgaaagaatcggacaaagacagaagactgtcagtagagatttgggattgggatttgaccagcaggaatgacttcatgggatctttgtcctttgggatttctgaacttcagaaagccagtgttgatggctggtttaagttactgagccaggaggaaggcgagtacttcaatgtgcctgtgccaccagaaggaagtgaggccaatgaagaactgcggcagaaatttgagagggccaagatcagtcagggaaccaaggtcccggaagaaaagacgaccaacactgtctccaaatttgacaacaatggcaacagagaccggatgaaactgaccgattttaacttcctaatggtgctggggaaaggcagctttggcaaggtcatgctttcagaacgaaaaggcacagatgagctctatgctgtgaagatcctgaagaaggacgttgtgatccaagatgatgacgtggagtgcactatggtggagaagcgggtgttggccctgcctgggaagccgcccttcctgacccagctccactcctgcttccagaccatggaccgcctgtactttgtgatggagtacgtgaatgggggcgacctcatgtatcacatccagcaagtcggccggttcaaggagccccatgctgtattttacgctgcagaaattgccatcggtctgttcttcttacagagtaagggcatcatttaccgtgacctaaaacttgacaacgtgatgctcgattctgagggacacatcaagattgccgattttggcatgtgtaaggaaaacatctgggatggggtgacaaccaagacattctgtggcactccagactacatcgcccccgagataattgcttatcagccctatgggaagtccgtggattggtgggcatttggagtcctgctgtatgaaatgttggctgggcaggcaccctttgaaggggaggatgaagatgaactcttccaatccatcatggaacacaacgtagcctatcccaagtctatgtccaaggaagctgtggccatctgcaaagggctgatgaccaaacacccaggcaaacgtctgggttgtggacctgaaggcgaacgtgatatcaaagagcatgcatttttccggtatattgattgggagaaacttgaacgcaaagagatccagcccccttataagccaaaagctgtaagtagcccattctctctgactgccgggtattcacacacaaggtattcttgcctgtgcctcatgttttccaaatgctccctgaggggtagacgtcaatgtgtctactggaacatgggtgtatgtattcacacatatgcacaaaatcactggttactaagatggacattttccattggcccagcttagtctctataaagatggaaacgacgatgcctattgaatttttgtttcttcgattcaattattgtaactgtcttagctgacaactttctgagaatggttcttgggtgagcagagttcagatccatttttggactgtgataaaggatctaattttgccctcattctttctctt

SEQ ID NO: 436525 - DNA, 453 bp, Homo sapiens
gctccactcctgcttccagaccatggtaacttgtcccatggccctgggtattccacctccagggcttcaccaggctttggccaaagctatcttagcagcacccagcacagagatacctgcacccttccctttctagacacagaaagatgtaaggcccagggaagtcagctgagagttctgaggttgctactgagaaacgctctcccctgagacagatgctgtctcaacttagataaaggaattcaggcaactggttttataattaacagagcagggcctttctctgacagcaaggagtgacttggggacaggagctgggtgaaaaggttcacagcttgtggatctagatggttccattcagccctctagacctttggataaatgcacaagtacatctctgcaggttgcctgaggcctttgcatgggcctcattggagggaggatgttgcctga

SEQ ID NO: 436526 - DNA, 589 bp, Homo sapiens
ggaggtcaaaggctggtttctactgacctttgtgcccacacaacacctaacacagtgttttatgcataatgagtggctgttggttggcttgaaatgcatagcgtttaattaaatctctaaattcttgtgtctgccatagtgacctaaaacttgacaacgtgatgctcgattctgagggacacatcaagattgccgattttggcatgtgtaaggaaaacatctgggatggggtgacaaccaagacattctgtggcactccagactacatcgcccccgaggtgagagccgctgggcacacgttcacattgcggtgatgtaccctctgctccccagatggctgtgtgagagctgggaagggttgagggtggtaccttgcaagggaacctcggacagattcttattctatactctaaatcctccctttgagatcacacatgcaaattaatttagcacacatccagaagcccaagcccaaaatacatcaaggtttgggagaaaatttaaataaaacccgaaagaaccatccaacacacatcagtaacaattgcttcgtcttactattgtggctcacggccatgtgataccgcct

SEQ ID NO: 436527 - DNA, 2693 bp, Homo sapiens
agctgggcgagtgacagccccggctccgcgcgccgcggccgccagagccggcgcaggggaagcgcccggggccccgggtgcagcagcggccgccgcctcccgcgcctccccggcccgcagcccgcggtcccgcggccccggggccggcacctctcgggctccggctccccgcgcgcaagatggctgacccggctgcggggccgccgccgagcgagggcgaggagagcaccgtgcgcttcgcccgcaaaggcgccctccggcagaagaacgtgcatgaggtcaagaaccacaaattcaccgcccgcttcttcaagcagcccaccttctgcagccactgcaccgacttcatctggggcttcgggaagcagggattccagtgccaagtttgctgctttgtggtgcacaagcggtgccatgaatttgtcacattctcctgccctggcgctgacaagggtccagcctccgatgacccccgcagcaaacacaagtttaagatccacacgtactccagccccacgttttgtgaccactgtgggtcactgctgtatggactcatccaccaggggatgaaatgtgacacctgcatgatgaatgtgcacaagcgctgcgtgatgaatgttcccagcctgtgtggcacggaccacacggagcgccgcggccgcatctacatccaggcccacatcgacagggacgtcctcattgtcctcgtaagagatgctaaaaaccttgtacctatggaccccaatggcctgtcagatccctacgtaaaactgaaactgattcccgatcccaaaagtgagagcaaacagaagaccaaaaccatcaaatgctccctcaaccctgagtggaatgagacatttagatttcagctgaaagaatcggacaaagacagaagactgtcagtagagatttgggattgggatttgaccagcaggaatgacttcatgggatctttgtcctttgggatttctgaacttcagaaagccagtgttgatggctggtttaagttactgagccaggaggaaggcgagtacttcaatgtgcctgtgccaccagaaggaagtgaggccaatgaagaactgcggcagaaatttgagagggccaagatcagtcagggaaccaaggtcccggaagaaaagacgaccaacactgtctccaaatttgacaacaatggcaacagagaccggatgaaactgaccgattttaacttcctaatggtgctggggaaaggcagctttggcaaggtcatgctttcagaacgaaaaggcacagatgagctctatgctgtgaagatcctgaagaaggacgttgtgatccaagatgatgacgtggagtgcactatggtggagaagcgggtgttggccctgcctgggaagccgcccttcctgacccagctccactcctgcttccagaccatggaccgcctgtactttgtgatggagtacgtgaatgggggcgacctcatgtatcacatccagcaagtcggccggttcaaggagccccatgctgtattttacgctgcagaaattgccatcggtctgttcttcttacagagtaagggcatcatttaccgtgacctaaaacttgacaacgtgatgctcgattctgagggacacatcaagattgccgattttggcatgtgtaaggaaaacatctgggatggggtgacaaccaagacattctgtggcactccagactacatcgcccccgagataattgcttatcagccctatgggaagtccgtggattggtgggcatttggagtcctgctgtatgaaatgttggctgggcaggcaccctttgaaggggaggatgaagatgaactcttccaatccatcatggaacacaacgtagcctatcccaagtctatgtccaaggaagctgtggccatctgcaaagggctgatgaccaaacacccaggcaaacgtctgggttgtggacctgaaggcgaacgtgatatcaaagagcatgcatttttccggtatattgattgggagaaacttgaacgcaaagagatccagcccccttataagccaaaagctagagacaagagagacacctccaacttcgacaaagagttcaccagacagcctgtggaactgacccccactgataaactcttcatcatgaacttggaccaaaatgaatttgctggcttctcttatactaacccagagtttgtcattaatgtgtaggtgaatgcaaactccatcgttgagcctggggtgtaagacttcaagccaagcgtatgtatcaattctagtcttccaggattcacggtgcacatgctggcattcaacatgtggaaagcttgtcttagagggcttttctttgtatgtgtagcttgctagtttgttttctacatttgaaaatgtttagtttagaataagcgcattatccaattatagaggtacaattttccaaacttccagaaactcatcaaatgaacagacaatgtcaaaactactgtgtctgataccaaaatgcttcagtatttgtaatttttcaagtcagaagctgatgttcctggtaaaagtttttacagttattctataatatcttctttgaatgctaagcatgagcgatatttttaaaaattgtgagtaagctttgcagttactgtgaactattgtctcttggaggaagttttttgtttaagaattgatatgattaaactgaattaatatatgcaa

SEQ ID NO: 436528 - DNA, 2168 bp, Homo sapiens
gggaaagggagcgtttggcaagggtcgtgcactgcggaacactctaggcggtgatgagctctatgctgtgaagatcctgaagaaggacgttgtgatccaagatgatgacgtggagtgcactatggtggagaagcgggtgttggccctgcctgggaagccgcccttcctgacccagctccactcctgcttccagaccatggaccgcctgtactttgtgatggagtacgtgaatgggggcgacctcatgtatcacatccagcaagtcggccggttcaaggagccccatgctgtattttacgctgcagaaattgccatcggtctgttcttcttacagagtaagggcatcatttaccgtgacctaaaacttgacaacgtgatgctcgattctgagggacacatcaagattgccgattttggcatgtgtaaggaaaacatctgggatggggtgacaaccaagacattctgtggcactccagactacatcgcccccgagataattgcttatcagccctatgggaagtccgtggattggtgggcatttggagtcctgctgtatgaaatgttggctgggcaggcaccctttgaaggggaggatgaagatgaactcttccaatccatcatggaacacaacgtagcctatcccaagtctatgtccaaggaagctgtggccatctgcaaagggctgatgaccaaacacccaggcaaacgtctgggttgtggacctgaaggcgaacgtgatatcaaagagcatgcatttttccggtatattgattgggagaaacttgaacgcaaagagatccagcccccttataagccaaaagcttgtgggcgaaatgctgaaaacttcgaccgatttttcacccgccatccaccagtcctaacacctcccgaccaggaagtcatcaggaatattgaccaatcagaattcgaaggattttcctttgttaactctgaatttttaaaacccgaagtcaagagctaagtagatgtgtagatctccgtccttcatttctgtcattcaagctcaacggctattgtggtgacatttttatgtttttcattgccaagttgcatccatgtttgattttctgatgagactagagtgacagtgtttcagaacccaaatgtcctcaggtagtttggagcatctctatgagatgggattatgcagatggcctatggaaaatgcagctgcataattaacacattatcaaagtcctcttacaatttattttccgcagcatgtcagctaagtagacccaatggggagagaaaatgcctgctttctttccctctttttctgcactgccatattcacccccaaccatccaatctgtggataattggatgttagcggtactcttccacttccgggcctggagcttggcttgtatccaagtgtatggttgctttgcctaagaggaatccctctatttcacctgttctggaggcaccagaccttgaaaagaacatgctcaaaataaaatgttatctgttatttttgtaaactcaaagttaagatgatcaaagttctaaaattccaagaatgtgcttttagacggtctcaatctaaaagcacttcaaggggtcaaagggcaaccagcttgggtgctacctcagtgttgtagtttctgatactttatgtctttgctcaccctcatccccaaactacttgaaaagggcatttggcaccactctctgaaacaacacagtcactctagcaaggcccccaaagggccctggttttacattacatttcaaactttatttgctttggggttttgtttctgttgttgttcaaatgcaaaaaaaagaaaaaaaaagaaaaaaaaaggtgactcacattgttacacatgctttaaaatatgtattcaaatgttattaaccacaatgacgacctgctttgatttaaccaagaagacggctgcggagcctagcagactcaggcctgtgggaatgggatttgttacaaatctaggtttgttactggcttcagaaagctaattaagtgctctgaaaaagacaccgtttcttgaaacaaagatggttgtattcctcactttgatgttgttttgcaagatgtttgtggaaatgttcatttgtatctggatctctgttatgtgccatttttcttctagcatcgagatacaataaaaaaaaaaaaaaag

SEQ ID NO: 436529 - DNA, 1248 bp, Homo sapiens
agctgggcgagtgacagccccggctccgcgcgccgcggccgccagagccggcgcaggggaagcgcccggggccccgggtgcagcagcggccgccgcctcccgcgcctccccggcccgcagcccgcggtcccgcggccccggggccggcacctctcgggctccggctccccgcgcgcaagatggctgacccggctgcggggccgccgccgagcgagggcgaggagagcaccgtgcgcttcgcccgcaaaggcgccctccggcagaagaacgtgcatgaggtcaagaaccacaaattcaccgcccgcttcttcaagcagcccaccttctgcagccactgcaccgacttcatctggggcttcgggaagcagggattccagtgccaagtttgctgctttgtggtgcacaagcggtgccatgaatttgtcacattctcctgccctggcgctgacaagggtccagcctccgatgacccccgcagcaaacacaagtttaagatccacacgtactccagccccacgttttgtgaccactgtgggtcactgctgtatggactcatccaccaggggatgaaatgtgacacctgcatgatgaatgtgcacaagcgctgcgtgatgaatgttcccagcctgtgtggcacggaccacacggagcgccgcggccgcatctacatccaggcccacatcgacagggacgtcctcattgtcctcgtaagagatgctaaaaaccttgtacctatggaccccaatggcctgtcagatccctacgtaaaactgaaactgattcccgatcccaaaagtgagagcaaacagaagaccaaaaccatcaaatgctccctcaaccctgagtggaatgagacatttagatttcagctgaaagaatcggacaaagacagaagactgtcagtagagatttgggattgggatttgaccagcaggaatgacttcatgggatctttgtcctttgggatttctgaacttcagaaagccagtgttgatggctggaatccctggaagtccctgctgtgtggatagcacccttctcgatttccagcaaagatacagatgctctcttgtttttatatttcttttggtaatttccgtggaattttggaagaaaatttggaatattaaatgtggaggcgtagaggctcaaattgtcttctctgctttgaatcacctagcccatttttggaagctgcgtaagaagattcgtgaatggagagaaaacattgtgatgaaaattttaaac

SEQ ID NO: 436530 - DNA, 375 bp, Homo sapiens
cggtgcaggaccggcccacgctcttcctggaagtcatccagcgccacaaccaccagggttttggagccggcaacttcaactcactgttcaaggctttcgaggaggagcagaacctgcggggtaacctcaccaacatggagaccaatggggtggtgcccggcatgtaagccccgcccaccccacggaggccacagccacacagccacgccccctgattctggaactcgcccaacttccctactggctgctccccttgggtcccgcccaccagcggactcggcccccaaggctccgcccacactgaccacgcccctcggcggggccgccctctgctccagccctcccgattaaagcgtgccccggtccaatactgtg

SEQ ID NO: 436531 - DNA, 728 bp, Homo sapiens
tttttaaacattaaacatgtaaagttatatacgaaatatctgcttttggaataagcagaatgaggctaaacatgggttatacaaagggtatctggaaactgaagagcaacttgttagaaaactgacaatgtcgcaagatgtactcagttttgtttctgtgtgacatgcaatggcaactcatgtggacactattgaagggatgtgacattacctcctgtagatatgctaacagtgttattctttcatttccaagggttctctgtggctttgtgtatatgtttcccagaggtcatttgattacctaatttactgaactgatttagcagggaatggaatccattccaactattgcacgtggatttcccagctgcccctaaatatatatacttgtgagtggcaaagtggcactaatgaagcttttgccttttgtacatttgagatttttgtatatagtgtttgctgcaaggcctgtggaattaattcgttgcatatagaggtatcaactgctgcatgttcaggcatattataaaactttagtctatgaaagaataattataataatgtccaggtgcaatactctgtaagtctattggttcaagttaccgagagataggtgtgttcctttatgggggatgaatgggtttttctaacattctctgggccgtacctcacggtctttacggctcattaccccactctcttcggtctaattactttcttccgctctc

SEQ ID NO: 436532 - DNA, 2051 bp, Homo sapiens
tttttaaacattaaacatgtaaagttatatacgaaatatctgcttttggaataagcagaatgaggctaaacatgggttatacaaagggtatctggaaactgaagagcaacttgttagaaaactgacaatgtcgcaagatgtactcagttttgtttctgtgtgacatgcaatggcaactcatgtggacactattgaagggatgtgacattacctcctgtagatatgctaacagtgttattctttcatttccaagggttctctgtggctttgtgtatatgtttcccagaggtcatttgattacctaatttactgaactgatttagcagggaatggaatccattccaactattgcacgtggatttcccagctgcccctaaatatatatacttgtgagtggcaaagtggcactaatgaagcttttgccttttgtacatttgagatttttgtatatagtgtttgctgcaaggcctgtggaattaattcgttgcatatagaggtatcaactgctgcatgttcaggcatattataaaactttagtctatgaaagaataattataataatgtccaggtgcaatactctgtaagtctattggttcaagttaccgagagataggtgtgttcctttatgggggatgggggggtgtgttggggattctttgtattgtttatttcattttggtttattttaaaagatgtaaacatatattaagctatattaaatctcacatacagttcttctgtgctctattataccctgatagagatgggggagagaaaggaatgtttttgatggtggtttcaaagctcggacagtaactatcttgagcccattagagagtctgtgtccatatttgcatctggctggtcatagcctttgttactaatgatgacattcagttctcttttgtttttattttttaaaaactcaggtgtaattattatctgttcttaagataattgcaaatattaaatattatgatatatcaattcatgtgtttggcataccagtgaatgatgaagaacatgagattaatttaatttatcttcggtaacttgacattctggagagagactatcttctggagttgagtacaagcacagaaacatctttacggtggcatcatctcattttttaggaagacatgataatactgcccatcatattcatgtgtaactactgttctttcttctgctttcttcaccataataaactttggacaaccaagcaagctctaaccgcaatgccagatggccttgtccgagggcctagtgtttgcacggcagtgggaactgggcctttcctacaggacaactggcaagtttgctgggaagtcaaataatacattccacctggcagctgaaggcagccagtcagtctgtcccagaaagggcccttttcagcacccaaagctgggctggctgggatgcctctggctggtgaagttctcacataggctgatttaaatccagcaaaggtctatagaaaaaggcttgcgtgttcgttgagtaatcattgtttcattttcatttttacgagagtttgaaaatagacacactgttaacacttctgccagttttttctgatctttccagccccaccccctttctctttctctctctctctcaaagaaaaaaaaaatgggagtgcaaaaaaaacaaagccaaaaaatatatgaaggatagctgttcttctgtgttctctcattatggactttgtgaagtagaaacataattttttttcctccaaaggtgaaaaaacaatgcattcttgctttaaaaaaaaaaaagaaggctaaaaaattacctctttttaaattatgtgcaaaataattctggctaactgtaaaatgtattcaattttaggatttttttttttttgtattgtgatgctttatttgtacatttttttcctttctggatgtaattttaatctcttgccattcattagtgttatttcattgtaaacgttattgtgccaaatgtactgtattcaaaaggatgtgaatgtgtattgtttcagaacctaataaatacaatgacgttaagtctta

SEQ ID NO: 436533 - DNA, 2115 bp, Homo sapiens
caactgtgttagtaggctattcaaacgtcacacgtgtccaagtaatatactaaatatctgcattatggtggattaacgtagaagagatcggtaacattaggtattattgaagagagggctatatgagaataatgaagaggcaggtggtaaagaagaagctgactaagatgtaagcatacgatagtagctcgatgcttgtaggtcactgatcgtgacattgactcatgcgagagatctatagtggaaagcttatatgaatcgggatgtgacattacctcctgtagatatgctaacagtgttattctttcatttccaagggttctctgtggctttgtgtatatgtttcccagaggtcatttgattacctaatttactgaactgatttagcagggaatggaatccattccaactattgcacgtggatttcccagctgcccctaaatatatatacttgtgagtggcaaagtggcactaatgaagcttttgccttttgtacatttgagatttttgtatatagtgtttgctgcaaggcctgtggaattaattcgttgcatatagaggtatcaactgctgcatgttcaggcatattataaaactttagtctatgaaagaataattataataatgtccaggtgcaatactctgtaagtctattggttcaagttaccgagagataggtgtgttcctttatgggggatgggggggtgtgttggggattctttgtattgtttatttcattttggtttattttaaaagatgtaaacatatattaagctatattaaatctcacatacagttcttctgtgctctattataccctgatagagatgggggagagaaaggaatgtttttgatggtggtttcaaagctcggacagtaactatcttgagcccattagagagtctgtgtccatatttgcatctggctggtcatagcctttgttactaatgatgacattcagttctcttttgtttttattttttaaaaactcaggtgtaattattatctgttcttaagataattgcaaatattaaatattatgatatatcaattcatgtgtttggcataccagtgaatgatgaagaacatgagattaatttaatttatcttcggtaacttgacattctggagagagactatcttctggagttgagtacaagcacagaaacatctttacggtggcatcatctcattttttaggaagacatgataatactgcccatcatattcatgtgtaactactgttctttcttctgctttcttcaccataataaactttggacaaccaagcaagctctaaccgcaatgccagatggccttgtccgagggcctagtgtttgcacggcagtgggaactgggcctttcctacaggacaactggcaagtttgctgggaagtcaaataatacattccacctggcagctgaaggcagccagtcagtctgtcccagaaagggcccttttcagcacccaaagctgggctggctgggatgcctctggctggtgaagttctcacataggctgatttaaatccagcaaaggtctatagaaaaaggcttgcgtgttcgttgagtaatcattgtttcattttcatttttacgagagtttgaaaatagacacactgttaacacttctgccagttttttctgatctttccagccccaccccctttctctttctctctctctctcaaagaaaaaaaaaatgggagtgcaaaaaaaacaaagccaaaaaatatatgaaggatagctgttcttctgtgttctctcattatggactttgtgaagtagaaacataattttttttcctccaaaggtgaaaaaacaatgcattcttgctttaaaaaaaaaaaagaaggctaaaaaattacctctttttaaattatgtgcaaaataattctggctaactgtaaaatgtattcaattttaggatttttttttttttgtattgtgatgctttatttgtacatttttttcctttctggatgtaattttaatctcttgccattcattagtgttatttcattgtaaacgttattgtgccaaatgtactgtattcaaaaggatgtgaatgtgtattgtttcagaacctaataaatacaatgacgttaagtctta

SEQ ID NO: 436534 - DNA, 677 bp, Homo sapiens
  misc_feature (193)..(193): n is a, c, g, or t
atgtggagctggtggtgaagaatcccctgtgcccgctgggccaaactgtgcaaagtgagctctttcgctcccgactggactcctatgttcgctctctgcccttcttctccgcccgggctggctgaagcaacctacctcaagtctcaggagaattcatgtctgcctggggcccttccgaacctgtgccaactanagggcccccactgtaagcccccgcacccccaccccctttctctttctctctctctctcaaagaaaaaaaaaatgggagtgcaaaaaaaacaaagccaaaaaatatatgaaggatagctgttcttctgtgttctctcattatggactttgtgaagtagaaacataattttttttcctccaaaggtgaaaaaacaatgcattcttgctttaaaaaaaaaaaagaaggctaaaaaattacctctttttaaattatgtgcaaaataattctggctaactgtaaaatgtattcaattttaggatttttttttttttgtattgtgatgctttatttgtacatttttttcctttctggatgtaattttaatctcttgccattcattagtgttatttcattgtaaacgttattgtgccaaatgtactgtattcaaaaggatgtgaatgtgtattgtttcagaacctaataaatacaatgacgttaagtctta

SEQ ID NO: 436535 - DNA, 1367 bp, Homo sapiens
gcacctgagcagcctaaaggtgagtgtaatacagatgcacaagtgactggttgataatggaatgagaccccttataagaaagacataacagagcacggcagaggagcaagaacaacacagaggcaatgacatttgagctaggcctcttatatctgtagatgaacatttgatggtaggtagtagggaagatggaactaagaatatttgagctacttaatatatgccaggcagcatgctgagtgcttgtgttcatttaattctcaagacagccataagcggcagtacaggtattgggcctattattctaaatcccattttataagagagttaggattagattcagttccatctttctacaaaacctggcactgtcattccaggcaaagggagtacaatccatttttctcttaagaggttgattttgccaatgagacagaatgaatctctacagcattgttaagtttctacccagtcttttgggtgactgaaaaattcaaatgtaaagatgtggcaaaattggttctctaaggattttaagtacagccaaatgatatgtcacaagttttttcctaaatatccaaccatttagtctttcataagcttttaattccactagcctcactttctgagattgttgatgttttcttgttctaacctgaaattttctttgtttgatgttaacaggagtataatgaaggagtaaccatttttattttatgatagtctatcaatagactttttttaaccttctttaagctaggtgtgtttgtcctttattaaagtcagtttgacccagcctgtacaacattgcaagaccttaactttaataaaaaaaaaaaaaaaaaaaaaaagccaggtgtggtggtgcatgcctgtaatcccagctacttgggaggctgagatgggaggatcacttgagcccaggagattgaggctgcagtgacccgtgactgcgccactacactacagcctgggtgacagaacaagacactgttgatagatagactatatgaaacacgctctataaccaaaaaaatcattgctctggatataatgcaaagattttggtaacattttaccgtattttttcttattgattgattagagtagtggaggaggggagaaggaatttaagagatactatcatcaaccacttgcagattttagtatatttatacgctgctcttctcagtatttcatttttctatacatgagaaaagactatgtctgtattggaccattacaattgaccactttgttgaagacatcttcagttgtgacataggtcattttgatttgaacgaactgatagctataccaattttttttggctctgtgggaattttgggatagagaatgttatttga

SEQ ID NO: 436536 - DNA, 2800 bp, Homo sapiens
ctgactgagtccctggaagagtagtaattccaacaattccagccatttgttcaattaattttcccaacattcttctcccagtgctgggaatcacatttcctctgttctgtgcagaagacaaaaaggcaatcataaaagtttgttatatttgtgggggtgcctggaggaggattttcctcaacttaatggagccactgtccataaagtggctgttatcccttcatataattggtgagatcagccttctccttgacttggcacctaattatgcttcatgagatcctagattccacctgagtcaattgtgtccagagccccaaaccaggatggagttgttttccccagatatggggttctattcagccatagataatctagacagaggatttcagaatgaaaggaaaaatgtgtggagattagtcctagttcattctgagggccgactaagtggctcagccagcttcttactccatctgcagttcatactgccaaagagctcccacttccaaatccccagtgactttatggagaagattctgcattaaattgtctttcgaatgatggggaagcaaggcataatatgcgatgatgaggagaaagtagaccagtgaggtgattgcaagactaacaaggagactcaatgggaagtttttctttcttttagatattgcttttgaagtagatggtaaaatttttgtcatccttcttgtattttttgtaccccaagttacaatttttcttcttccttgtaaataatttaaacagtatttatttttgtaaggcataactagaaactaaaatatattctaaaaaattcattattctgaacaaagtgatcaaattagaatacatatttttcaacagtggtagagcttttaatatatgtttattgaaagttatctataatacttgcaccagtgttgaaaaaagttaacatgtaggcaagagcaatatgtttgtctcaaggatttttccatggtttcctcagtgatggtgtcctgggaattattcaggtggtgaccatcactgggtctaagtttgtgtgcaggggttttcagacgtgtttttgtgaaacttggtagaaccatggctaataaagaggacagtgttgtcagggtccatctgccctccatagaaaaatgtctctggctcataaaatgagactccctcagggactaaatatgaactgacagcagtaactctgatacagaataatctaaattgcatcaaatggccttaattcagagtttgttaggcttatcagtatgttgcttttaattggggtgggaaagtagagggagagaaagcaagacatttattaagcacctcgtatgtgccaggcactatgctaagcactttacataagttaggattaatccctgcaagaatcctataaagaatgttactagcatttacacttcccaaatgaaggtaccaaagctcaaacgcaatgttgtgaagctgtttccttcagatttaggttatgtgggatgatgtgggattgaagaggaaagaaaggtgggattatccccctaggaagactttcaggcctgacttcataggaattcatccatcttatcatgtggagtttatctcaccctgctgttgcaggatgctatttgcatgtgtccccaggtgatgttttttctttggggagtaggggtttggcttcctcattcatccctcttgctaaaagaggagatagttgatgttgcatctaaagatgctataagacaatgaaagtttgatgttgtacatacctacaagtaccatttttgtgcatgattacactccactgacatcttccaagtactgcatgtgattgaataagaaacaagaaagtgaccacaccaaagcctccctggctggtgtacagggatcaggtccacagtggtgcagattcaaccaccacccagggagtgcttgcagactctgcatagatgttgctgcatgcgtcccatgtgcctgtcagaatggcagtgtttaattctcttgaaagaaagttatttgctcactatccccagcctcaaggagccaaggaagagtcattcacatggaaggtccgggactggtcagccactctgacttttctaccacattaaattctccattacatctcactattggtaatggcttaagtgtaaagagccatgatgtgtatattaagctatgtgccacatatttatttttagactctccacagcattcatgtcaatatgggattaatgcctaaactttgtaaatattgtacagtttgtaaatcaatgaataaaggttttgagtgtatcttaccaggctcctccctgcaaatgcacatgtcaatcaatgattaatgcacccaggttatgtacaaggcactgggcttagcaccacagggaacttccttccagaggctcgctttctagttgtgtagacaagaatacatgcatgagaagatacaagacaattcacccatgccaaatgattcatacaggctgtttaagtactgcagaaaataaaagaaggaaaggctaccagacttttcaataaggtctacagcttcccaagagcatgtctttgttaaatcaggaaatataaaaattatgtgtgtatgtgtatgtatatatatataccaccctattaactattttaaaatcgtattctattttgggggttgtgttaatgatgatgaaccagaaaagattttctcttgatggtttcttcaacaggaaacagatattggaatagtgtacatgtcatttttatctatacaatgaatttattatgtttttcttagtaaagtgatagacattgaaagcaa

SEQ ID NO: 436537 - DNA, 2286 bp, Homo sapiens
ctgactgagtccctggaagagtagtaattccaacaattccagccatttgttcaattaattttcccaacattcttctcccagtgctgggaatcacatttcctctgttctgtgcagaagacaaaaaggcaatcataaaagtttgttatatttgtgggggtgcctggaggaggattttcctcaacttaatggagccactgtccataaagtggctgttatcccttcatataattggtgagatcagccttctccttgacttggcacctaattatgcttcatgagatcctagattccacctgagtcaattgtgtccagagccccaaaccaggatggagttgttttccccagatatggggttctattcagccatagataatctagacagaggatttcagaatgaaaggaaaaatgtgtggagattagtcctagttcattctgagggccgactaagtggctcagccagcttcttactccatctgcagttcatactgccaaagagctcccacttccaaatccccagtgactttatggagaagattctgcattaaattgtctttcgaatgatggggaagcaaggcataatatgcgatgatgaggagaaagtagaccagtgaggtgattgcaagactaacaaggagactcaatgggaagtttttctttcttttagatattgcttttgaagtagatggtaaaatttttgtcatccttcttgtattttttgtaccccaagttacaatttttcttcttccttgtaaataatttaaacagtatttatttttgtaaggcataactagaaactaaaatatattctaaaaaattcattattctgaacaaagtgatcaaattagaatacatatttttcaacagtggtagagcttttaatatatgtttattgaaagttatctataatacttgcaccagtgttgaaaaaagttaacatgtaggcaagagcaatatgtttgtctcaaggatttttccatggtttcctcagtgatggtgtcctgggaattattcaggtggtgaccatcactgggtctaagtttgtgtgcaggggttttcagacgtgtttttgtgaaacttggtagaaccatggctaataaagaggacagtgttgtcagggtccatctgccctccatagaaaaatgtctctggctcataaaatgagactccctcagggactaaatatgaactgacagcagtaactctgatacagaataatctaaattgcatcaaatggccttaattcagagtttgttaggcttatcagtatgttgcttttaattggggtgggaaagtagagggagagaaagcaagacatttattaagcacctcgtatgtgccaggcactatgctaagcactttacataagttaggattaatccctgcaagaatcctataaagaatgttactagcatttacacttcccaaatgaaggtaccaaagctcaaacgcaatgttgtgaagctgtttccttcagatttaggttatgtgggatgatgtgggattgaagaggaaagaaaggtgggattatccccctaggaagactttcaggcctgacttcataggaattcatccatcttatcatgtggagtttatctcaccctgctgttgcaggatgctatttgcatgtgtccccaggtgatgttttttctttggggagtaggggtttggcttcctcattcatccctcttgctaaaagaggagatagttgatgttgcatctaaagatgctataagacaatgaaagtttgatgttgtacatacctacaagtaccatttttgtgcatgattacactccactgacatcttccaagtactgcatgtgattgaataagaaacaagaaagtgaccacaccaaagcctccctggctggtgtacagggatcaggtccacagtggtgcagattcaaccaccacccagggagtgcttgcagactctgcatagatgttgctgcatgcgtcccatgtgcctgtcagaatggcagtgtttaattctcttgaaagaaagttatttgctcactatccccagcctcaaggagccaaggaagagtcattcacatggaaggtccgggactggtcagccactctgacttttctaccacattaaattctccattacatctcactattggtaatggcttaagtgtaaagagccatgatgtgtatattaagctatgtgccacatatttatttttagactctccacagcattcatgtcaatatgggattaatgcctaaactttgtaaatattgtacagtttgtaaatcaatgaataaaggttttgagtgta

SEQ ID NO: 436538 - DNA, 3674 bp, Homo sapiens
  misc_feature (560)..(560): n is a, c, g, or t
tgtgctctgtggagagagatacaatgatttagagaagcatatatgttcagtaaaacatgatgatgtttattttgatcattttcatccctgtgctgcgctaacgacagatattattgaaaagtatggattcccacctgatcttaccctcacccctcaagaaagcatccagctttatgataccatggctcaagtctgggaaacttggcccagggctcaggaattgtgtccagaggaattcattctttttaagaataagatagtcattaagaagttggatgctagaaaatatgaagaaaacttaaaggcagaattgacaaattggattaaaaatggccaagtgaagaaggtcaaaagagtactgaagaaccttagtccggattcattgtctagttcaaaagatatggtgaaaatgtttcctcttcttgttgaaaagttaagacaaatggataagttgcctgcaatattttttttgtttaagaatgatgatgtgggaaaaagagctggaagtgtgtgcacttttctggagaagacagagacaaaaagccatccccacactgaangtcatagttatgtctttgcaatagatgaagtacttgaaaaagtgaggaagacacagaaaaggatcactaaaaaaaaacccaaagaaggctgaaaaactggaaagaaaaaaagtgtatagagctgaatatattaatttcctggagaatctgaagattctggaaatttctgaggactgcacgtatgctgatgtcaaagccctacacactgaaattaccaggaataaagactcaactttggatagggtattaccgcgagtgcgatttacaagacacggcaaagaactgaaggctttagcacaaagggggattggatatcatcacagcagcatgtattttaaagaaaaagagtttgttgagatactctttgtaaaagggcttattagggtagtgacagctactgaaacacttgccttagggatccacatgccatgcaaatctgttgtttttgcccaagactcagtctatctggatgctttaaattacagacagatgtctggtcgtgctggaagaagaggtcaagacctgcttggaaatgtgtatttctttgatatcccattgcccaaaataaaaagactccttgcatccagtgttcctgagctgagaggacagttccctctcagcataaccctggtcctgcgactcatgctgctggcttccaagggagatgacccagaggatgccaaggcaaaggtgttgtcagtgctaaagcattcattgctgtcttttaagagacgaagagccatggagactttgaaactttactttttgttttccttgcagctccttatcaaagaggactatttaaataaaaagggtaatccaaagaaatttgcaggacttgcatcatatttgcatggtcatgaaccttcaaatcttgtttttgtaaattttctcaagagaggccttttccataatctctgtaagccagcctggaaaggctcacaacaattttcccaagatgtgatggaaaagctcgtgttagtattggcaaatttgtttggaagaaaatatattccagcaaaattccaaaatgctaatttaagtttttctcagtcaaaggtgatccttgccgaactcccggaggattttaaagctgctttatatgagtataacctggcagtaatgaaggattttgcctccttcctgctgattgcttccaagtcggtgaacatgaaaaaagagcatcaactccctttgtcaagaatcaaattcacaggtaaagaatgtgaagactcccaactcgtgtctcacttgatgagctgcaagaaaggaagagtagccatttcaccatttgtttgtctttcggggaacacagataatgatttgcttcgaccagagactatcaaccaggtcatcctgcgcacagtcggtgttagtggcactcaggctcctctgctgtggccatggaaattagataaccgaggaaggagaatgccactaaatgcatatgtgctcaatttctataaacacaactgcttgacaagattagaccaaaaaaatgggatgcgtgtgggacagcttttaaagtgtttgaaagattttgcattcaacattcaggctatcagtgactccttgagtgaactatgtgaaaataagcgtgacaatgtagtcctggcatttaaacaattgagtcaaaccttttatgagaaacttcaagaaatgcaaattcaaatgagtcaaaatcatttagaataacaccatggaaaactttcaagtctgattatgtggtatttatccctttgcaaggagagatataattaagcttacacaatgaaatggaaaaaatgtttgtcttggagtcaaacagaattaaactcagataccagctctgctattttctaactgaatgactttaagttatgtaatatatctgagctttaacttcatttttggcaaaaccagagtaaaaatgaatacctctagttgttttgaggattaaatgagataatgtaagaaaagtgattgggattgggtggtgacttaatgaacggtagtggttttttaagtagttaatgtatagcaaaattagtttcacattgtcaagttttcaatacatccccaagttaattgaattttaaattaatgatcaataaatcacaaaggacccaaatcaattctgaacaacaatttagttatgtaagaagacttctgagattacaagaaactcactgctgtggactggatgtttgtgccctcccctccaaaatttttatattgaaattctaaccctcaatgtgatggtattaggagatgataggtcatgagggtggagctccttggatgtaattagtgcctttaacagagagacaagagagcttgttctccaatctctgctcactaccactggatgatacaatgggaagatggccatctgcagaccaagaagcaagccctcaacagaactgaatctacttacaccatgatcttgaactttccagcctccaggattgtgagaaatacatgtttgttgtttagccatctagtctgtggttttctgttgaagcagtctgaattgactaaaacagtcacttggagtagttataaaccactttcctgttgaaagcagaacatgctgattcaactgttttgttcaatagcaatgatagattttgtttaagtcccctacactttcttatttctaaatgatcaagagtacacttcctggcagtgattaaggagtgtgtatctaacagaaaaaatatatataccctgtgaacccgaatatggaattcagattgtttctgccctcagtatcatacttaaaaaacaagcatacaaacaaacataagggaacaaacagcaaccataacaaaaacaaacctttaaaggtgggtttttgctgtgataaatgaatacggtactctgaaggagaaaaaagtttctcaaatgagcttaaactgcaagtgatttaaaaattagagaatataattcttaaagctattgaaagtttcaaccagaaaacctcaagtgaattttgtatgtaaatgaaatcttgaatgtaagttctgtgattctttaagcaaacaattagctgaaaacttggtattgttgtagtttatgtagtaagtgacttggcacccatcagaaaataaagggcattaaattgaaaaaaag

SEQ ID NO: 436539 - DNA, 3515 bp, Homo sapiens
  misc_feature (712)..(712): n is a, c, g, or t
  misc_feature (880)..(880): n is a, c, g, or t
  misc_feature (898)..(898): n is a, c, g, or t
  misc_feature (913)..(913): n is a, c, g, or t
  misc_feature (1442)..(1442): n is a, c, g, or t
acaagtctttaggatccaaactttccctcatcttcctgtcttcttctgagccctccacaaaattccaacctctgtccactatgcagttcaaaatcgcttccacattttcagatatctttatagcagtgccccactcctcagtatcaacttcctgtattagttcattctcacgctgctatacagagacacttgagactgggtaatttataaagaaaagacattttattggcttatggttctgcaggctgtacaggaagcataagtagcttctgcttctgggtaggcctcaggaaactttcaatcatgtcagaaagtgaagcagaagtaggccatgtgttacatgcatggctggagcaggaggaagagaggtagaagggaggtgctacacacttttaaacaaccagatctcatgataactcactatcatgagaacagcaccaaaggggaaattcacctccatgatccaatcacctccaatcaggccccacctccaacactggggattacaatttgacatgaaatttgggtgatgacacagatccaaatatttccattctgttgactgcaatctacctaattccattaggtttaatgggataactcaagattcagaacaatataattactctatttacctttagaatggcctaagacaactaatcttgtaagccggattggctttcatacttcattttttcaggccactattggncaccactgtttcagggatttagcagattatttgccaatctgggttatgtataacagttctgctttatatgatgtatttaattcaaggaagcatgtgccatgtgaagatacaatcaaagagataatatgaaatcaaatgaaatttactttcacgtaagatctggtaacnttatctatatagtatgtntgtgtactatttatnacatatcagtatttacaaatactgtttaaaactagataaattaaagtactcttcttttataggtgttgtcagtgctaaagcattcattgctgtcttttaagagacgaagagccatggagactttgaaactttactttttgttttccttgcagctccttatcaaagaggactatttaaataaaaagggtaatccaaagaaatttgcaggacttgcatcatatttgcatggtcatgaaccttcaaatcttgtttttgtaaattttctcaagagaggccttttccataatctctgtaagccagcctggaaaggctcacaacaattttcccaagatgtgatggaaaagctcgtgttagtattggcaaatttgtttggaagaaaatatattccagcaaaattccaaaatgctaatttaagtttttctcagtcaaagacacaacaacaaaataataacaagcaaacagaacccaagaaaatgtgcattagaacctgggaatgtagaagaagcttgtttctatccagtaaccctantgaatagagaacaaaaaggtgatccttgccgaactcccggaggattttaaagctgctttatatgagtataacctggcagtaatgaaggattttgcctccttcctgctgattgcttccaagtcggtgaacatgaaaaaagagcatcaactccctttgtcaagaatcaaattcacaggtaaagaatgtgaagactcccaactcgtgtctcacttgatgagctgcaagaaaggaagagtagccatttcaccatttgtttgtctttcggggaacacagataatgatttgcttcgaccagagactatcaaccaggtcatcctgcgcacagtcggtgttagtggcactcaggctcctctgctgtggccatggaaattagataaccgaggaaggagaatgccactaaatgcatatgtgctcaatttctataaacacaactgcttgacaagattagaccaaaaaaatgggatgcgtgtgggacagcttttaaagtgtttgaaagattttgcattcaacattcaggctatcagtgactccttgagtgaactatgtgaaaataagcgtgacaatgtagtcctggcatttaaacaattgagtcaaaccttttatgagaaacttcaagaaatgcaaattcaaatgagtcaaaatcatttagaataacaccatggaaaactttcaagtctgattatgtggtatttatccctttgcaaggagagatataattaagcttacacaatgaaatggaaaaaatgtttgtcttggagtcaaacagaattaaactcagataccagctctgctattttctaactgaatgactttaagttatgtaatatatctgagctttaacttcatttttggcaaaaccagagtaaaaatgaatacctctagttgttttgaggattaaatgagataatgtaagaaaagtgattgggattgggtggtgacttaatgaacggtagtggttttttaagtagttaatgtatagcaaaattagtttcacattgtcaagttttcaatacatccccaagttaattgaattttaaattaatgatcaataaatcacaaaggacccaaatcaattctgaacaacaatttagttatgtaagaagacttctgagattacaagaaactcactgctgtggactggatgtttgtgccctcccctccaaaatttttatattgaaattctaaccctcaatgtgatggtattaggagatgataggtcatgagggtggagctccttggatgtaattagtgcctttaacagagagacaagagagcttgttctccaatctctgctcactaccactggatgatacaatgggaagatggccatctgcagaccaagaagcaagccctcaacagaactgaatctacttacaccatgatcttgaactttccagcctccaggattgtgagaaatacatgtttgttgtttagccatctagtctgtggttttctgttgaagcagtctgaattgactaaaacagtcacttggagtagttataaaccactttcctgttgaaagcagaacatgctgattcaactgttttgttcaatagcaatgatagattttgtttaagtcccctacactttcttatttctaaatgatcaagagtacacttcctggcagtgattaaggagtgtgtatctaacagaaaaaatatatataccctgtgaacccgaatatggaattcagattgtttctgccctcagtatcatacttaaaaaacaagcatacaaacaaacataagggaacaaacagcaaccataacaaaaacaaacctttaaaggtgggtttttgctgtgataaatgaatacggtactctgaaggagaaaaaagtttctcaaatgagcttaaactgcaagtgatttaaaaattagagaatataattcttaaagctattgaaagtttcaaccagaaaacctcaagtgaattttgtatgtaaatgaaatcttgaatgtaagttctgtgattctttaagcaaacaattagctgaaaacttggtattgttgtagtttatgtagtaagtgacttggcacccatcagaaaataaagggcattaaattgaaaaaaag

SEQ ID NO: 436540 - DNA, 1840 bp, Homo sapiens
tttcaccctccccctttgataatggtcaaattatctctttaataattttttttgtggtttttacctatgcctctcaatttcattatgattaatacaatagaatgcttaactgggagtgcatttggcagataaattaactgccatggacagaccactattaaagtttgagttaattcttttatgtttatgtttttatactttttaattaagaaatgttgttctctttaggatgcgtgtgggacagcttttaaagtgtttgaaagattttgcattcaacattcaggctatcagtgactccttgagtgaactatgtgaaaataagcgtgacaatgtagtcctggcatttaaacaattgagtcaaaccttttatgagaaacttcaagaaatgcaaattcaaatgagtcaaaatcatttagaataacaccatggaaaactttcaagtctgattatgtggtatttatccctttgcaaggagagatataattaagcttacacaatgaaatggaaaaaatgtttgtcttggagtcaaacagaattaaactcagataccagctctgctattttctaactgaatgactttaagttatgtaatatatctgagctttaacttcatttttggcaaaaccagagtaaaaatgaatacctctagttgttttgaggattaaatgagataatgtaagaaaagtgattgggattgggtggtgacttaatgaacggtagtggttttttaagtagttaatgtatagcaaaattagtttcacattgtcaagttttcaatacatccccaagttaattgaattttaaattaatgatcaataaatcacaaaggacccaaatcaattctgaacaacaatttagttatgtaagaagacttctgagattacaagaaactcactgctgtggactggatgtttgtgccctcccctccaaaatttttatattgaaattctaaccctcaatgtgatggtattaggagatgataggtcatgagggtggagctccttggatgtaattagtgcctttaacagagagacaagagagcttgttctccaatctctgctcactaccactggatgatacaatgggaagatggccatctgcagaccaagaagcaagccctcaacagaactgaatctacttacaccatgatcttgaactttccagcctccaggattgtgagaaatacatgtttgttgtttagccatctagtctgtggttttctgttgaagcagtctgaattgactaaaacagtcacttggagtagttataaaccactttcctgttgaaagcagaacatgctgattcaactgttttgttcaatagcaatgatagattttgtttaagtcccctacactttcttatttctaaatgatcaagagtacacttcctggcagtgattaaggagtgtgtatctaacagaaaaaatatatataccctgtgaacccgaatatggaattcagattgtttctgccctcagtatcatacttaaaaaacaagcatacaaacaaacataagggaacaaacagcaaccataacaaaaacaaacctttaaaggtgggtttttgctgtgataaatgaatacggtactctgaaggagaaaaaagtttctcaaatgagcttaaactgcaagtgatttaaaaattagagaatataattcttaaagctattgaaagtttcaaccagaaaacctcaagtgaattttgtatgtaaatgaaatcttgaatgtaagttctgtgattctttaagcaaacaattagctgaaaacttggtattgttgtagtttatgtagtaagtgacttggcacccatcagaaaataaagggcattaaattgaaaaaaag

SEQ ID NO: 436541 - DNA, 637 bp, Homo sapiens
gtgaggaaggggagaccaagtcaggattgatggagctactgtcaacgtcggatgaccaagggaaatctgtggggccttaggcttcttgcagtaactgaatatgagttttcattacttaaaagtttttttttttttttaaatagtagcactaaaaaaaaacccaaagaaggctgaaaaactggaaagaaaaaaagtgtatagagctgaatatattaatttcctggagaatctgaagattctggaaatttctgaggactgcacgtatgctgatgtcaaagccctacacactgaaattaccaggaataaagactcagtacgtcagagaattattaatataatacgttacagttgtgacattttatcatagtgatcgtttaatatctttgaacactgaaatgacttgtgtaatacctttgaaatatgattatctctgtgtgtgattttgtttgttttgcaatgattatcccaatttaatgtgctaaagttctataagtgactcttccttgctcagtgtgaatgtcagcctcttattttatttcactctattatcctggattagtttatagcctgattctagaattcaattcaatatgatatattttaattctggtcacgtttgggttttatgacacaatat

SEQ ID NO: 436542 - DNA, 1285 bp, Homo sapiens
  misc_feature (560)..(560): n is a, c, g, or t
tgtgctctgtggagagagatacaatgatttagagaagcatatatgttcagtaaaacatgatgatgtttattttgatcattttcatccctgtgctgcgctaacgacagatattattgaaaagtatggattcccacctgatcttaccctcacccctcaagaaagcatccagctttatgataccatggctcaagtctgggaaacttggcccagggctcaggaattgtgtccagaggaattcattctttttaagaataagatagtcattaagaagttggatgctagaaaatatgaagaaaacttaaaggcagaattgacaaattggattaaaaatggccaagtgaagaaggtcaaaagagtactgaagaaccttagtccggattcattgtctagttcaaaagatatggtgaaaatgtttcctcttcttgttgaaaagttaagacaaatggataagttgcctgcaatattttttttgtttaagaatgatgatgtgggaaaaagagctggaagtgtgtgcacttttctggagaagacagagacaaaaagccatccccacactgaangtcatagttatgtctttgcaatagatgaagtacttgaaaaagtgaggaagacacagaaaaggatcactaaaaaaaaacccaaagaaggctgaaaaactggaaagaaaaaaagtgtatagagctgaatatattaatttcctggagaatctgaagattctggaaatttctgaggactgcacgtatgctgatgtcaaagccctacacactgaaattaccaggaataaagactcaactttggatagggtattaccgcgagtgcgatttacaagacacggcaaagaactgaaggctttagcacaaagggggattggatatcatcacagcagcatgtattttaaagaaaaagagtttgttgagatactctttgtaaaagggcttattagggtagtgacagctactgaaacacttgccttagggatccacatgccatgcaaatctgttgtttttgcccaagactcagtctatctggatgctttaaattacagacagatcatgtgaactctcctagactggaatatgaagactgtgattttacagagaaaaggagtttatctccatttcatgaccttttaggatgttgctgtttcaactttaaaagccatattttccttttctcaagtatagctatagaccatatcaccttttaccatgttctgttatgaaaaacaggaagtccctgagctggaatttttcagtctttctctttttcatgtagagagcaaagt

SEQ ID NO: 436543 - DNA, 939 bp, Homo sapiens
  misc_feature (22)..(22): n is a, c, g, or t
  misc_feature (27)..(28): n is a, c, g, or t
  misc_feature (30)..(30): n is a, c, g, or t
  misc_feature (37)..(37): n is a, c, g, or t
aaaaagttaggctagtacgagnctggnntnaatcggncgagcgtgtgggaccacattgaggtgtctgatgatgaagacgagacgcaccccaacatcgacacggccagtctcttccgctggcggcatcaggcccgggtggaacgcatggagcagttccagaaggagaaggaggaactggacaggggctgccgcgagtgcaagcgcaaggtggccgagtgccagaggaaactgaaggagctggaggtggccgagggcggcaaggcagagctggagcgcctgcaggccgaggcacagcagctgcgcaaggaggagcggagctgggagcagaagctggaggagatgcgcaagaaggagaagagcatgccctggaacgtggacacgctcagcaaagacggcttcagcaagagcatggtaaataccaagcccgagaagacggaggaggactcagaggaggtgagggagcagaaacacaagaccttcgtggaaaaatacgagaaacagatcaagcactttggcatgcttcgccgctgggatgacagccaaaagtacctgtcagacaacgtccacctggtgtgcgaggagacagccaattacctggtcatttggtgcattgacctagaggtggaggagaaatgtgcactcatggagcaggtggcccaccagacaatcgtcatgcaatttatcctggagctggccaagagcctaaaggtggacccccgggcctgcttccggcagttcttcactaagattaagacagccgatcgccagtacatggagggcttcaacgacgagctggaagccttcaaggagcgtgtgcggggccgtgccaagctgcgcatggctgacgataaggagggggacgagaaaaaacgtcgaccggggcggaccagtaggttagacccctggaaacaaaggtagtaaaaggcacagtgaggagca

SEQ ID NO: 436544 - DNA, 1692 bp, Homo sapiens
acagggcggggtttcccgcgctcggcggaagcggaaggggcggggctccgcgctcctagtctccactgctgccgccgtcgccgccacccgagccggagcgggctgggccgccaaggcaagatggtggactacagcgtgtgggaccacattgaggtgtctgatgatgaagacgagacgcaccccaacatcgacacggccagtctcttccgctggcggcatcaggcccgggtggaacgcatggagcagttccagaaggagaaggaggaactggacaggggctgccgcgagtgcaagcgcaaggtggccgagtgccagaggaaactgaaggagctggaggtggccgagggcggcaaggcagagctggagcgcctgcaggccgaggcacagcagctgcgcaaggaggagcggagctgggagcagaagctggaggagatgcgcaagaaggagaagagcatgccctggaacgtggacacgctcagcaaagacggcttcagcaagagcatggtaaataccaagcccgagaagacggaggaggactcagaggaggtgagggagcagaaacacaagaccttcgtggaaaaatacgagaaacagatcaagcactttggcatgcttcgccgctgggatgacagccaaaagtacctgtcagacaacgtccacctggtgtgcgaggagacagccaattacctggtcatttggtgcattgacctagaggtggaggagaaatgtgcactcatggagcaggtggcccaccagacaatcgtcatgcaatttatcctggagctggccaagagcctaaaggtggacccccgggcctgcttccggcagttcttcactaagattaagacagccgatcgccagtacatggagggcttcaacgacgagctggaagccttcaaggagcgtgtgcggggccgtgccaagctgcgcatcgagaaggccatgaaggagtacgaggaggaggagcgcaagaagcggctcggccccggcggcctggaccccgtcgaggtctacgagtccctccctgaggaactccagaagtgcttcgatgtgaaggacgtgcagatgctgcaggacgccatcagcaagatggaccccaccgacgcaaagtaccacatgcagcgctgcattgactctggcctctgggtccccaactctaaggccagcgaggccaaggagggagaggaggcaggtcctggggacccattactggaaggctgttcccaagacgggcgatgagaaggatgtcagtgtgtgacctgccccagctaccaccgccacctgcttccaggcccctatgtgccccttttcagaaaacagatagatgccatctcgcccgctcctgacttcctctacttgcgctgctcggcccagcctggggggcccgcccagccctccctggcctctccactgtctccactctccagcgcccattcaagtctctgctttgagtcaaggggcttcactgcctgcagccccccatcagcattatccaaagggccgggggtccggggaagggcagaggtcaccaggctggtctaccaggtagttggggagggtccccagccaaggggccggctctcgtcactgggctctgttttcactgttcgtctgctgtctgtgtcttctatttggcaaacagcaatgatcttccaataaaagatttcagatgctctctgggctgctgggagg

SEQ ID NO: 436545 - DNA, 1808 bp, Homo sapiens
acagggcggggtttcccgcgctcggcggaagcggaaggggcggggctccgcgctcctagtctccactgctgccgccgtcgccgccacccgagccggagcgggctgggccgccaaggcaagatggtggactacagcgtgtgggaccacattgaggtgtctgatgatgaagacgagacgcaccccaacatcgacacggccagtctcttccgctggcggcatcaggcccgggtggaacgcatggagcagttccagaaggagaaggaggaactggacaggggctgccgcgagtgcaagcgcaaggtggccgagtgccagaggaaactgaaggagctggaggtggccgagggcggcaaggcagagctggagcgcctgcaggccgaggcacagcagctgcgcaaggaggagcggagctgggagcagaagctggaggagatgcgcaagaaggagaagagcatgccctggaacgtggacacgctcagcaaagacggcttcagcaagagcatggtaaataccaagcccgagaagacggaggaggactcagaggaggtgagggagcagaaacacaagaccttcgtggaaaaatacgagaaacagatcaagcactttggcatgcttcgccgctgggatgacagccaaaagtacctgtcagacaacgtccacctggtgtgcgaggagacagccaattacctggtcatttggtgcattgacctagaggtggaggagaaatgtgcactcatggagcaggtggcccaccagacaatcgtcatgcaatttatcctggagctggccaagagcctaaaggtggacccccgggcctgcttccggcagttcttcactaagattaagacagccgatcgccagtacatggagggcttcaacgacgagctggaagccttcaaggagcgtgtgcggggccgtgccaagctgcgcatcgagaaggccatgaaggagtacgaggaggaggagcgcaagaagcggctcggccccggcggcctggaccccgtcgaggtctacgagtccctccctgaggaactccagaagtgcttcgatgtgaaggacgtgcagatgctgcaggacgccatcagcaagatggaccccaccgacgcaaagtaccacatgcagcgctgcattgactctggcctctgggtccccaactctaaggccagcgaggccaaggagggagaggaggcaggtcctggggacccattactggaaggctgttcccaagacgggcgatgagaaggatgtcagtgtgtgacctgccccagctaccaccgccacctgcttccaggcccctatgtgccccttttcagaaaacagatagatgccatctcaaaaaaaaaaaaaaaaaaaaaaaaaaaaaaaaaaaaaaaaaaaaaaaaaaaaaaaaaaaaaaaaaaaaaaaaaaaaaaaaaaaaaaaaaaaaaaaaaaaaagaaaaaaaaaaaaaaagaagggggtggggcgttgtgtaattaagtattatatcggatggtagtgcaaagtcagcaagaaaacattatttagtgatataaaggtagggtattctataatagtgtgggtttaataattttaaagaaacaggcacgcgctgtcatctttaacaacaacagtcgacgcaggcggcgaaaaacaacgcccctaagatgatcacttattcgtattgcgacacacctctctcactttctgagggctggcgtcaacacttgagctgtggtagcaccaactctccaccacgcactgattacagcacgtgccgtcagcgagacgagtataaacagcaagctcagcgatacatttagataggca

SEQ ID NO: 436546 - DNA, 1032 bp, Homo sapiens
acagggcggggtttcccgcgctcggcggaagcggaaggggcggggctccgcgctcctagtctccactgctgccgccgtcgccgccacccgagccggagcgggctgggccgccaaggcaagatggtggactacagcgtgtgggaccacattgaggtgtctgatgatgaagacgagacgcaccccaacatcgacacggccagtctcttccgctggcggcatcaggcccgggtggaacgcatggagcagttccagaaggagaaggaggaactggacaggggctgccgcgagtgcaagcgcaaggtggccgagtgccagaggaaactgaaggagctggaggtggccgagggcggcaaggcagagctggagcgcctgcaggccgaggcacagcagctgcgcaaggaggagcggagctgggagcagaagctggaggagatgcgcaagaaggagaagagcatgccctggaacgtggacacgctcagcaaagacggcttcagcaagagcatggtaaataccaagcccgagaagacggaggaggactcagaggaggtgagggagcagaaacacaagaccttcgtggaaaaatacgagaaacagatcaagcactttggcatgcttcgccgctgggatgacagccaaaagtacctgtcagacaacgtccacctggtgtgcgaggagacagccaattacctggtcatttggtgcattgacctagaggtggaggagaaatgtgcactcatggagcaggtggcccaccagacaatcgtcatgcaatttatcctggagctggccaagagcctaaaggtggacccccgggcctgcttccggcagttcttcactaagattaagacagccgatcgccagtacatggagggcttcaacgacgagctggaagccttcaaggagcgtgtgcggggccgtgccaagctgcgcatggctgacgataaggagggggacgagaaaaaacgtcgaccggggcggaccagtaggttagacccctggaaacaaaggtagtaaaaggcacagtgaggagca

SEQ ID NO: 436547 - DNA, 1258 bp, Homo sapiens
acagggcggggtttcccgcgctcggcggaagcggaaggggcggggctccgcgctcctagtctccactgctgccgccgtcgccgccacccgagccggagcgggctgggccgccaaggcaagatggtggactacagcgtgtgggaccacattgaggtgtctgatgatgaagacgagacgcaccccaacatcgacacggccagtctcttccgctggcggcatcaggcccgggtggaacgcatggagcagttccagaaggagaaggaggaactggacaggggctgccgcgagtgcaagcgcaaggtggccgagtgccagaggaaactgaaggagctggaggtggccgagggcggcaaggcagagctggagcgcctgcaggccgaggcacagcagctgcgcaaggaggagcggagctgggagcagaagctggaggagatgcgcaagaaggagaagagcatgccctggaacgtggacacgctcagcaaagacggcttcagcaagagcatggtaaataccaagcccgagaagacggaggaggactcagaggaggtgagggagcagaaacacaagaccttcgtggaaaaatacgagaaacagatcaagcactttggcatgcttcgccgctgggatgacagccaaaagtacctgtcagacaacgtccacctggtgtgcgaggagacagccaattacctggtcatttggtgcattgacctagaggtggaggagaaatgtgcactcatggagcaggtggcccaccagacaatcgtcatgcaatttatcctggagctgttcccaagacgggcgatgagaaggatgtcagtgtgtgacctgccccagctaccaccgccacctgcttccaggcccctatgtgccccttttcagaaaacagatagatgccatctcgcccgctcctgacttcctctacttgcgctgctcggcccagcctggggggcccgcccagccctccctggcctctccactgtctccactctccagcgcccattcaagtctctgctttgagtcaaggggcttcactgcctgcagccccccatcagcattatccaaagggccgggggtccggggaagggcagaggtcaccaggctggtctaccaggtagttggggagggtccccagccaaggggccggctctcgtcactgggctctgttttcactgttcgtctgctgtctgtgtcttctatttggcaaacagcaatgatcttccaataaaagatttcagatgctctctgggctgctgggagg

SEQ ID NO: 436548 - DNA, 1783 bp, Homo sapiens
acagggcggggtttcccgcgctcggcggaagcggaaggggcggggctccgcgctcctagtctccactgctgccgccgtcgccgccacccgagccggagcgggctgggccgccaaggcaagatggtggactacagcgtgtgggaccacattgaggtgtctgatgatgaagacgagacgcaccccaacatcgacacggccagtctcttccgctggcggcatcaggcccgggtggaacgcatggagcagttccagaaggagaaggaggaactggacaggggctgccgcgagtgcaagcgcaaggtggccgagtgccagaggaaactgaaggagctggaggtggccgagggcggcaaggcagagctggagcgcctgcaggccgaggcacagcagctgcgcaaggaggagcggagctgggagcagaagctggaggagatgcgcaagaaggagaagagcatgccctggaacgtggacacgctcagcaaagacggcttcagcaagagcatggtaaataccaagcccgagaagacggaggaggactcagaggaggtgagggagcagaaacacaagaccttcgtggaaaaatacgagaaacagatcaagcactttggtgagtggggcttgtgggttatggggggcaaggtcgaggcaggccctttgcctccagggccctccagcaccttgccagcatcttcccacaggcatgcttcgccgctgggatgacagccaaaagtacctgtcagacaacgtccacctggtgtgcgaggagacagccaattacctggtcatttggtgcattgacctagaggtggaggagaaatgtgcactcatggagcaggtggcccaccagacaatcgtcatgcaatttatcctggagctggccaagagcctaaaggtggacccccgggcctgcttccggcagttcttcactaagattaagacagccgatcgccagtacatggagggcttcaacgacgagctggaagccttcaaggagcgtgtgcggggccgtgccaagctgcgcatcgagaaggccatgaaggagtacgaggaggaggagcgcaagaagcggctcggccccggcggcctggaccccgtcgaggtctacgagtccctccctgaggaactccagaagtgcttcgatgtgaaggacgtgcagatgctgcaggacgccatcagcaagatggaccccaccgacgcaaagtaccacatgcagcgctgcattgactctggcctctgggtccccaactctaaggccagcgaggccaaggagggagaggaggcaggtcctggggacccattactggaaggctgttcccaagacgggcgatgagaaggatgtcagtgtgtgacctgccccagctaccaccgccacctgcttccaggcccctatgtgccccttttcagaaaacagatagatgccatctcgcccgctcctgacttcctctacttgcgctgctcggcccagcctggggggcccgcccagccctccctggcctctccactgtctccactctccagcgcccattcaagtctctgctttgagtcaaggggcttcactgcctgcagccccccatcagcattatccaaagggccgggggtccggggaagggcagaggtcaccaggctggtctaccaggtagttggggagggtccccagccaaggggccggctctcgtcactgggctctgttttcactgttcgtctgctgtctgtgtcttctatttggcaaacagcaatgatcttccaataaaagatttcagatgctctctgggctgctgggagg

SEQ ID NO: 436549 - DNA, 1604 bp, Homo sapiens
  misc_feature (22)..(22): n is a, c, g, or t
  misc_feature (27)..(28): n is a, c, g, or t
  misc_feature (30)..(30): n is a, c, g, or t
  misc_feature (37)..(37): n is a, c, g, or t
aaaaagttaggctagtacgagnctggnntnaatcggncggccacccgagccggagcgggctgggccgccaaggcaagatggtggactacagcgtgtgggaccacattgaggtgtctgatgatgaagacgagacgcaccccaacatcgacacggccagtctcttccgctggcggcatcaggcccgggtggaacgcatggagcagttccagaaggagaaggaggaactggacaggggctgccgcgagtgcaagcgcaagggcggcaaggcagagctggagcgcctgcaggccgaggcacagcagctgcgcaaggaggagcggagctgggagcagaagctggaggagatgcgcaagaaggagaagagcatgccctggaacgtggacacgctcagcaaagacggcttcagcaagagcatggtaaataccaagcccgagaagacggaggaggactcagaggaggtgagggagcagaaacacaagaccttcgtggaaaaatacgagaaacagatcaagcactttggcatgcttcgccgctgggatgacagccaaaagtacctgtcagacaacgtccacctggtgtgcgaggagacagccaattacctggtcatttggtgcattgacctagaggtggaggagaaatgtgcactcatggagcaggtggcccaccagacaatcgtcatgcaatttatcctggagctggccaagagcctaaaggtggacccccgggcctgcttccggcagttcttcactaagattaagacagccgatcgccagtacatggagggcttcaacgacgagctggaagccttcaaggagcgtgtgcggggccgtgccaagctgcgcatcgagaaggccatgaaggagtacgaggaggaggagcgcaagaagcggctcggccccggcggcctggaccccgtcgaggtctacgagtccctccctgaggaactccagaagtgcttcgatgtgaaggacgtgcagatgctgcaggacgccatcagcaagatggaccccaccgacgcaaagtaccacatgcagcgctgcattgactctggcctctgggtccccaactctaaggccagcgaggccaaggagggagaggaggcaggtcctggggacccattactggaaggctgttcccaagacgggcgatgagaaggatgtcagtgtgtgacctgccccagctaccaccgccacctgcttccaggcccctatgtgccccttttcagaaaacagatagatgccatctcgcccgctcctgacttcctctacttgcgctgctcggcccagcctggggggcccgcccagccctccctggcctctccactgtctccactctccagcgcccattcaagtctctgctttgagtcaaggggcttcactgcctgcagccccccatcagcattatccaaagggccgggggtccggggaagggcagaggtcaccaggctggtctaccaggtagttggggagggtccccagccaaggggccggctctcgtcactgggctctgttttcactgttcgtctgctgtctgtgtcttctatttggcaaacagcaatgatcttccaataaaagatttcagatgctctctgggctgctgggagg

SEQ ID NO: 436550 - DNA, 686 bp, Homo sapiens
acagggcggggtttcccgcgctcggcggaagcggaaggggcggggctccgcgctcctagtctccactgctgccgccgtcgccgccacccgagccggagcgggctgggccgccaaggcaagatggtggactacagcgtgtgggaccacattgaggtgtctgatgatgaagacgagacgcaccccaacatcgacacggccagtctcttccgctggcggcatcaggcccgggtggaacgcatggagcagttccagaaggagaaggaggaactggacaggggctgccgcgagtgcaagcgcaaggtggccgagtgccagaggaaactgaaggagctggaggtggccgagggcggcaaggcagagctggagcgcctgcaggccgaggcacagcagctgcgcaaggaggagcggagctgggagcagaagctggaggagatgcgcaagaaggagaagagcatgccctggaacgtggacacgctcagcaaagacggcttcagcaagagcatggtaaataccaagcccgagaagacggaggaggactcagaggaggtgagggtccccagccaaggggccggctctcgtcactgggctctgttttcactgttcgtctgctgtctgtgtcttctatttggcaaacagcaatgatcttccaataaaagatttcagatgctctctgggctgctgggagg

SEQ ID NO: 436551 - DNA, 911 bp, Homo sapiens
acagggcggggtttcccgcgctcggcggaagcggaaggggcggggctccgcgctcctagtctccactgctgccgccgtcgccgccacccgagccggagcgggctgggccgccaaggcaagatggtggactacagcgtgtgggaccacattgaggtgtctgatgatgaagacgagacgcaccccaacatcgacacggccagtctcttccgctggcggcatcaggcccgggtggaacgcatggagcagttccagaaggagaaggaggaactggacaggggctgccgcgagtgcaagcgcaaggtggccgagtgccagaggaaactgaaggagctggaggtggccgagggcggcaaggcagagctggagcgcctgcaggccgaggcacagcagctgcgcaaggagaggaggcaggtcctggggacccattactggaaggctgttcccaagacgggcgatgagaaggatgtcagtgtgtgacctgccccagctaccaccgccacctgcttccaggcccctatgtgccccttttcagaaaacagatagatgccatctcgcccgctcctgacttcctctacttgcgctgctcggcccagcctggggggcccgcccagccctccctggcctctccactgtctccactctccagcgcccattcaagtctctgctttgagtcaaggggcttcactgcctgcagccccccatcagcattatccaaagggccgggggtccggggaagggcagaggtcaccaggctggtctaccaggtagttggggagggtccccagccaaggggccggctctcgtcactgggctctgttttcactgttcgtctgctgtctgtgtcttctatttggcaaacagcaatgatcttccaataaaagatttcagatgctctctgggctgctgggagg

SEQ ID NO: 436552 - DNA, 229 bp, Homo sapiens
tgagagcatctgaaatcttttattggaagatcattgctgtttgccaaatagaagggcagaggtcaccaggctggtctaccaggtagttggggagggtccccagccaaggggccggctctcgtcactgggctctgttttcactgttcgtctgctgtctgtgtcttctatttggcaaacagcaatgatcttccaataaaagatttcagatgctctctgggctgctgggagg

SEQ ID NO: 436553 - DNA, 772 bp, Homo sapiens
acagggcggggtttcccgcgctcggcggaagcggaaggggcggggctccgcgctcctagtctccactgctgccgccgtcgccgccacccgagccggagcgggctgggccgccaaggcaagatggtggactacagcgtgtgggaccacattgaggtgtctgatgatgaagacgagacgcaccccaacatcgacacggccagtctcttccgctggcggcatcaggcccgggtggaacgcatggagcagttccagaaggagaaggaggaactggacaggggctgccgcgagtgcaagcgcaaggtggccgagtgccagaggaaactgaaggagctggaggtggccgagggcggcaaggcagagctggagcgcctgcaggccgaggcacagcagctgcgcaaggaggagcggagctgggagcagaagctggaggagatgcgcaagaaggagaagagcatgccctggaacgtggacacgctcagcaaagacggcttcagcaagagcatggtaaataccaagcccgagaagacggaggaggactcagaggaggtgagggagcagaaacacaagaccttcgtggaaaaatacgagaaacagatcaagcactttggcatgcttcgccgctgggatgacagccaaaagtacctgtcagacaacgtccacctggtgtgcgaggagacagccaattacctggtcatttggtgcattgacctagaggtggaggagaaatgtgcactcatggagcagcaggaggaattccgcgagcagcaggagg

SEQ ID NO: 436554 - DNA, 1560 bp, Homo sapiens
acagggcggggtttcccgcgctcggcggaagcggaaggggcggggctccgcgctcctagtctccactgctgccgccgtcgccgccacccgagccggagcgggctgggccgccaaggcaagatggtggactacagcgtgtgggaccacattgaggtgtctgatgatgaagacgagacgcaccccaacatcgacacggccagtctcttccgctggcggcatcaggcccgggtggaacgcatggagcagttccagaaggagaaggaggaactggacaggggctgccgcgagtgcaagcgcaaggtggccgagtgccagaggaaactgaaggagctggaggtggccgagggcggcaaggcagagctggagcgcctgcaggccgaggcacagcagctgcgcaaggaggagcggagctgggagcagaagctggaggagatgcgcaagaaggagaagagcatgccctggaacgtggacacgctcagcaaagacggcttcagcaagagcatggtaaataccaagcccgagaagacggaggaggactcagaggaggtgagggagcagaaacacaagaccttcgtggaaaaatacgagaaacagatcaagcactttggcatgcttcgccgctgggatgacagccaaaagtacctgtcagacaacgtccacctggtgtgcgaggagacagccaattacctggtcatttggtgcattgacctagaggtggaggagaaatgtgcactcatggagcaggtggcccaccagacaatcgtcatgcaatttatcctggagctggccaagagcctaaaggtggacccccgggcctgcttccggcagttcttcactaagattaagacagccgatcgccagtacatggagggcttcaacgacgagctggaagccttcaaggagcgtgtgcggggccgtgccaagctgcgcatcgagaaggccatgaaggagtacgaggaggaggagcgcaagaagcggctcggccccggcggcctggaccccgtcgaggtctacgagtccctccctgaggaactccagaagtgcttcgatgtgaaggacgtgcagatgctgcaggacgccatcagcaagatggaccccaccgacgcaaagtaccacatgcagcgctgcattgactctggcctctgggtccccaactctaaggccagcgaggccaaggagggagaggaggcaggtcctggggacccattactggaaggctgttcccaagacgggcgatgagaaggatgtcagtgtgtgacctgccccagctaccaccgccacctgcttccaggcccctatgtgccccttttcagaaaacagatagatgccatctcgcccgctcctgacttcctctacttgcgctgctcggcccagcctgggggaagggcagaggtcaccaggctggtctaccaggtagttggggagggtccccagccaaggggccggctctcgtcactgggctctgttttcactgttcgtctgctgtctgtgtcttctatttggcaaacagcaatgatcttccaataaaagatttcagatgctctctgggctgctgggagg

SEQ ID NO: 436555 - DNA, 1649 bp, Homo sapiens
  misc_feature (22)..(22): n is a, c, g, or t
  misc_feature (27)..(28): n is a, c, g, or t
  misc_feature (30)..(30): n is a, c, g, or t
  misc_feature (37)..(37): n is a, c, g, or t
aaaaagttaggctagtacgagnctggnntnaatcggncggccacccgagccggagcgggctgggccgccaaggcaagatggtggactacagcgtgtgggaccacattgaggtgtctgatgatgaagacgagacgcaccccaacatcgacacggccagtctcttccgctggcggcatcaggcccgggtggaacgcatggagcagttccagaaggagaaggaggaactggacaggggctgccgcgagtgcaagcgcaaggtggccgagtgccagaggaaactgaaggagctggaggtggccgagggcggcaaggcagagctggagcgcctgcaggccgaggcacagcagctgcgcaaggaggagcggagctgggagcagaagctggaggagatgcgcaagaaggagaagagcatgccctggaacgtggacacgctcagcaaagacggcttcagcaagagcatggtaaataccaagcccgagaagacggaggaggactcagaggaggtgagggagcagaaacacaagaccttcgtggaaaaatacgagaaacagatcaagcactttggcatgcttcgccgctgggatgacagccaaaagtacctgtcagacaacgtccacctggtgtgcgaggagacagccaattacctggtcatttggtgcattgacctagaggtggaggagaaatgtgcactcatggagcaggtggcccaccagacaatcgtcatgcaatttatcctggagctggccaagagcctaaaggtggacccccgggcctgcttccggcagttcttcactaagattaagacagccgatcgccagtacatggagggcttcaacgacgagctggaagccttcaaggagcgtgtgcggggccgtgccaagctgcgcatcgagaaggccatgaaggagtacgaggaggaggagcgcaagaagcggctcggccccggcggcctggaccccgtcgaggtctacgagtccctccctgaggaactccagaagtgcttcgatgtgaaggacgtgcagatgctgcaggacgccatcagcaagatggaccccaccgacgcaaagtaccacatgcagcgctgcattgactctggcctctgggtccccaactctaaggccagcgaggccaaggagggagaggaggcaggtcctggggacccattactggaaggctgttcccaagacgggcgatgagaaggatgtcagtgtgtgacctgccccagctaccaccgccacctgcttccaggcccctatgtgccccttttcagaaaacagatagatgccatctcgcccgctcctgacttcctctacttgcgctgctcggcccagcctggggggcccgcccagccctccctggcctctccactgtctccactctccagcgcccattcaagtctctgctttgagtcaaggggcttcactgcctgcagccccccatcagcattatccaaagggccgggggtccggggaagggcagaggtcaccaggctggtctaccaggtagttggggagggtccccagccaaggggccggctctcgtcactgggctctgttttcactgttcgtctgctgtctgtgtcttctatttggcaaacagcaatgatcttccaataaaagatttcagatgctctctgggctgctgggagg

SEQ ID NO: 436556 - DNA, 1071 bp, Homo sapiens
  misc_feature (1059)..(1059): n is a, c, g, or t
acagggcggggtttcccgcgctcggcggaagcggaaggggcggggctccgcgctcctagtctccactgctgccgccgtcgccgccacccgagccggagcgggctgggccgccaaggcaagatggtggactacagcgtgtgggaccacattgaggtgtctgatgatgaagacgagacgcaccccaacatcgacacggccagtctcttccgctggcggcatcaggcccgggtggaacgcatggagcagttccagaaggagaaggaggaactggacaggggctgccgcgagtgcaagcgcaaggtggccgagtgccagaggaaactgaaggagctggaggtggccgagggcggcaaggcagagctggagcgcctgcaggccgaggcacagcagctgcgcaaggaggagcggagctgggagcagaagctggaggagatgcgcaagaaggagaagagcatgccctggaacgtggacacgctcagcaaagacggcttcagcaagagcatggtaaataccaagcccgagaagacggaggaggactcagaggaggtgagggagcagaaacacaagaccttcgtggaaaaatacgagaaacagatcaagcactttggcatgcttcgccgctgggatgacagccaaaagtacctgtcagacaacgtccacctggtgtgcgaggagacagccaattacctggtcatttggtgcattgacctagaggtggaggagaaatgtgcactcatggagcaggtggcccaccagacaatcgtcatgcaatttatcctggagctgttcccaagacgggcgatgagaaggatgtcagtgtgtgacctgccccagctaccaccgccacctgcttccaggcccctatgtgccccttttcagaaaacagatagatgccatctcgcccgctcctgacttcctctacttgcgctgctcggcccagcctggggggcccgcccagccctccctggcctctccactgtctccactctccagcgcccattcaagtctctgctttgagtcaaggggcttcactgcctgcttcgggagttcttcactaanaataaaaaagcg

SEQ ID NO: 436557 - DNA, 1845 bp, Homo sapiens
acagggcggggtttcccgcgctcggcggaagcggaaggggcggggctccgcgctcctagtctccactgctgccgccgtcgccgccacccgagccggagcgggctgggccgccaaggcaagatggtggactacagcgtgtgggaccacattgaggtgtctgatgatgaagacgagacgcaccccaacatcgacacggccagtctcttccgctggcggcatcaggcccgggtggaacgcatggagcagttccagaaggagaaggaggaactggacaggggctgccgcgagtgcaagcgcaaggtggccgagtgccagaggaaactgaaggagctggaggtggccgagggcggcaaggcagagctggagcgcctgcaggccgaggcacagcagctgcgcaaggaggagcggagctgggagcagaagctggaggagatgcgcaagaaggagaagagcatgccctggaacgtggacacgctcagcaaagacggcttcagcaaggcccatgcccacgctcccgccaccttgatgctcatggcttcgtcaccacctccgccgtggatgggatgggcgctgcgaccacggcccgcccggccgcgctcgaggcgctccgcagccttgccccagcccactccccctctcaccctaccacagagcatggtaaataccaagcccgagaagacggaggaggactcagaggaggtgagggagcagaaacacaagaccttcgtggaaaaatacgagaaacagatcaagcactttggcatgcttcgccgctgggatgacagccaaaagtacctgtcagacaacgtccacctggtgtgcgaggagacagccaattacctggtcatttggtgcattgacctagaggtggaggagaaatgtgcactcatggagcaggtggcccaccagacaatcgtcatgcaatttatcctggagctggccaagagcctaaaggtggacccccgggcctgcttccggcagttcttcactaagattaagacagccgatcgccagtacatggagggcttcaacgacgagctggaagccttcaaggagcgtgtgcggggccgtgccaagctgcgcatcgagaaggccatgaaggagtacgaggaggaggagcgcaagaagcggctcggccccggcggcctggaccccgtcgaggtctacgagtccctccctgaggaactccagaagtgcttcgatgtgaaggacgtgcagatgctgcaggacgccatcagcaagatggaccccaccgacgcaaagtaccacatgcagcgctgcattgactctggcctctgggtccccaactctaaggccagcgaggccaaggagggagaggaggcaggtcctggggacccattactggaaggctgttcccaagacgggcgatgagaaggatgtcagtgtgtgacctgccccagctaccaccgccacctgcttccaggcccctatgtgccccttttcagaaaacagatagatgccatctcgcccgctcctgacttcctctacttgcgctgctcggcccagcctggggggcccgcccagccctccctggcctctccactgtctccactctccagcgcccattcaagtctctgctttgagtcaaggggcttcactgcctgcagccccccatcagcattatccaaagggccgggggtccggggaagggcagaggtcaccaggctggtctaccaggtagttggggagggtccccagccaaggggccggctctcgtcactgggctctgttttcactgttcgtctgctgtctgtgtcttctatttggcaaacagcaatgatcttccaataaaagatttcagatgctctctgggctgctgggagg

SEQ ID NO: 436558 - DNA, 1514 bp, Homo sapiens
  misc_feature (22)..(22): n is a, c, g, or t
  misc_feature (27)..(28): n is a, c, g, or t
  misc_feature (30)..(30): n is a, c, g, or t
  misc_feature (37)..(37): n is a, c, g, or t
aaaaagttaggctagtacgagnctggnntnaatcggncggccacccgagccggagcgggctgggccgccaaggcaagatggtggactacagcgtgtgggaccacattgaggtgtctgatgatgaagacgagacgcaccccaacatcgacacggccagtctcttccgctggcggcatcaggcccgggtggaacgcatggagcagttccagaaggagaaggaggaagagcggagctgggagcagaagctggaggagatgcgcaagaaggagaagagcatgccctggaacgtggacacgctcagcaaagacggcttcagcaagagcatggtaaataccaagcccgagaagacggaggaggactcagaggaggtgagggagcagaaacacaagaccttcgtggaaaaatacgagaaacagatcaagcactttggcatgcttcgccgctgggatgacagccaaaagtacctgtcagacaacgtccacctggtgtgcgaggagacagccaattacctggtcatttggtgcattgacctagaggtggaggagaaatgtgcactcatggagcaggtggcccaccagacaatcgtcatgcaatttatcctggagctggccaagagcctaaaggtggacccccgggcctgcttccggcagttcttcactaagattaagacagccgatcgccagtacatggagggcttcaacgacgagctggaagccttcaaggagcgtgtgcggggccgtgccaagctgcgcatcgagaaggccatgaaggagtacgaggaggaggagcgcaagaagcggctcggccccggcggcctggaccccgtcgaggtctacgagtccctccctgaggaactccagaagtgcttcgatgtgaaggacgtgcagatgctgcaggacgccatcagcaagatggaccccaccgacgcaaagtaccacatgcagcgctgcattgactctggcctctgggtccccaactctaaggccagcgaggccaaggagggagaggaggcaggtcctggggacccattactggaaggctgttcccaagacgggcgatgagaaggatgtcagtgtgtgacctgccccagctaccaccgccacctgcttccaggcccctatgtgccccttttcagaaaacagatagatgccatctcgcccgctcctgacttcctctacttgcgctgctcggcccagcctggggggcccgcccagccctccctggcctctccactgtctccactctccagcgcccattcaagtctctgctttgagtcaaggggcttcactgcctgcagccccccatcagcattatccaaagggccgggggtccggggaagggcagaggtcaccaggctggtctaccaggtagttggggagggtccccagccaaggggccggctctcgtcactgggctctgttttcactgttcgtctgctgtctgtgtcttctatttggcaaacagcaatgatcttccaataaaagatttcagatgctctctgggctgctgggagg

SEQ ID NO: 436559 - DNA, 449 bp, Homo sapiens
gcgctccgcagccttgccccagcccactccccctctcaccctaccacagagcatggtaaataccaagcccgagaagacggaggaggactcagaggaggtgagggagcagaaacacaagaccttcgtggaaaaatacgagaaacagatcaagcactttggtgagtggggcttgtgggttatggggggcaaggtcgaggcaggccctttgcctccagggccctccagcaccttgccagcatcttcccacaggcatgcttcgccgctgggatgacagccaaaagtacctgtcagacaacgtccacctggtgtgcgaggagacagccaattacctggtcatttggtgcattgacctagaggtggaggaggtgagtggagctttccccgggactgtgaaaaggcgctgccatgaggccgccacttggtgacgctgtgcctgttcttcctggcag

SEQ ID NO: 436560 - DNA, 2160 bp, Homo sapiens
cctccctcttgttcgtcctccctccccctgtggactgcggcgctggcgttccgcgcacgccggctcactgcgcctgcccggcgtgtggacgccacacgctcccggaagtgggaggtggccgctggagtttgtgtggccgccgccgcgggaacgcgagcccggtaatttttcaacggagaaaggcgaggctttcgggctctgcagagtgagagttagcaagtgtccggctccagcaactctcctctggcgtgacagccggcatggaggatccacagagtaaagagcctgccggcgaggccgtggctcccgcgctgctggagtcgccgcggccggagggcggggaggagccgccgcgtcccagtcccgaggaaactcaacagtgtaaatttgatggccaggagacaaaaggatccaagttcattacctccagtgcgagtgacttcagtgacccggtttacaaagagattgccattacgaatggctgtattaatagaatgagtaaggaagaactcagagctaagctttcagaattcaagcttgaaactagaggagtaaaggatgttctaaagaagagactgaaaaactattataagaagcagaagctgatgctgaaagagagcaattttgctgacagttattatgactacatttgtattattgactttgaagccacttgtgaagaaggaaacccacctgagtttgtacatgaaataattgaatttccggttgttttactgaatacgcatactttagaaatagaagacacgtttcagcagtatgtaagaccagagattaacacacagctgtctgatttctgcatcagtctaactggaattactcaggatcaggtagacagagctgataccttccctcaggtactaaaaaaagtaattgactggatgaaattgaaggaattaggaacaaagtataaatactcacttttaacagatggttcttgggatatgagtaagttcttgaacattcagtgtcaactcagcaggctcaaataccctccttttgcgaaaaagtggatcaatattcggaagtcatatggaaatttttacaaggttcctagaagccaaaccaaactgacaataatgcttgaaaaattaggaatggattatgatgggcggcctcactgtggtcttgatgactctaagaatatcgcccgaatagcagttcgaatgcttcaggatgggtgtgaactccgaatcaacgagaaaatgcatgcaggacagctaatgagtgtgtcctcttccttaccaatagagggcactccaccaccacaaatgccacattttagaaagtaacaacagttttgtgtgtggatcattccaattgaagttgctatgaagagggagaagtttctgcctggattgaaacaaaaaaacacaggcgtcacaagcatgttacctattaagagagagagggtatctctgaagactaattaaaatggtaatttttaaaaagatgtgaccagttgacttttagtatatcatcccaagtattatccccaaaatgataatgcaaaacagaataatttggagaccaggagaaaaactggtatgattactggggaggggaagaagcacaggtggtcaagataataatgcatgtttggcctcagctgtagttgccaaagaaactacctgcctcacagatgagcacgcacgggtgcattgtcaaagtctgagaaggatgtattgtactttgaaggaagactttccatttctaagctaccatggagaagtatatgctcctcgagaccagagactgtgacttctgcatctttgattccagcgacatatgataaaatgttttgcacatagttgaatccagcgttgatacatgaaggacagcattacatcttttttctattatacttagaaatttcctctttgttctgcaccaccaacctgtatatcaagcctccttgccccacaaagcttccaaagcccgtaaatttgttaatctagagcaggggtcagcaaactaccacccatgggccaaatctggcctgctgcctatttttgtatggcctacaaactatggtttttatattcccttttgttaatggctcaaaataatattttgtataatatgaaaattacgaaattttagtttctctaaataaagttttggaaagaacaaaaaatctca

SEQ ID NO: 436561 - DNA, 2278 bp, Homo sapiens
atcagtgaaccttctctactctgatgagacgcaggtccaagaaagtaattattgtttgcatctatgagttagcaaccatcagattgcatccctgaaaagcatgctaaccaggaaggcaaaaccttactaaaaacctttataaggacagtaatacatgaacaaagcaatacaagagcactgtacatctgcatacattaggaagtgaaatacgtaaactgcataaaacaaattcaattcatgttgaggcataacagaagcaacctggttgtatcaggatgtctgttccagctcataaagttcttaccagagacaactacgaaatctgtcagtgcctataagggtcatagcaaagaacagaatttgggaaagagagagtattccaaagtactgtgaattcctctcctgtaccacaagtcacttcccccaccactacacattaaacaactacctacattttctactaactaaatccttgccctaagttttccctctttaaagtattaaggaaattttttcctgtgtaaaaatatctgactttataatgaaaatcactgagaaaatgagatctactgtgcagccaattttgcagaaatataaccttcagacaagtcaggggtcctcataagagctacaagtacactgagaaggattttaagtgtgttatctgtgttctttaagttactttacttctaagaagtctatgttatataatatttcttgactacagttgactgtgccagtaaattacagggagaagtagtattacttctggacctattttctatctctaaggaaagcctttccatttttacagctaacgtgacaaaatccacttttcagccaaacttcctcaacacagcagtttagatactatttcaaatactattaaatttaacggcatgcctaaattcagacttctcatttcacttttgcacccactggaaattatttcactcaaaataattatgtcttcagatgatttcctatttccacttaaagtagaaacaaattagaacacttaaaattctatttgcacttcccaaatacagtaatgactcatttatctggcatcatcagaaaacgaggttctccacacattaagcattttccaggtaactgaagcccacaaacacagagaacttgtctgccttgttccttgctgttatccccaggacctagaacagtatccagtacgtggtagataggcagtaataattactgaatgtgtgaataaataaaagtactaaagctcttttatttttaaccatttgtgaaaatgtttcctacactgaattatagccatcccgcccttttaaaaaaacatgacactgaaaagaaataaagtttttcttattaatttgggataccactataaatagcaatcactttactcccctgcaatgtatcttagtgtctttaaagctattaaaatacactgggctttttgccaccatgtaaaaatggacacagcatggtatgctctcataacttttcctttccttatattaactgtcattgctgtgtttgctcttgctgtcttattttacacacaaaagtctggcaaggttctaaactcaattctgcctccaaagcagaataaaatacatggacttggttacaattcagaagtcttttccacttatttctgacctgtaactgcattctgattctatttatttaacaaactccttgcacacacacatcctctaccacattctacataaaatctgagatggttctattagttttaaatgagtatcttaaggattttcacttaagtgctaagtttcaaatattaatcatgagtaatgaatggctcaaagactacctccaatataaacctcagggcattttttttttttaatccattcaggagacaccagccacgacaaagctggacttcatcttgcttgataggcagtgatagggccataatttagattcacggttccaaagttcatggccaagcaaagaaaggaaaaggagcagaatgaggctgaagaaagaagctctaggtgattgggggaaaggaaagaattcactagaaatttgtttagggtccagttgatttgtgtatttttgttatcatttaatttgtaattttcgtttcagaagcaaatattcgtgttgtacaaatttctgattgccctaaatgtagagagactgatggggaaagtatgatgggtttgatttttatatcaaatcatcaggcatggagaaatatcttttagaagtgttaaaataaatgttcctactgtatatttaaaatacaaaaaaa

SEQ ID NO: 436562 - DNA, 574 bp, Homo sapiens
  misc_feature (12)..(12): n is a, c, g, or t
aagagagttagnattgggaaaattctgccatcagaaaaagctgttgtgacagaaccagcaaaaggtgaagaggccttccagatgagtgaagttgatgaggaatctggattaaaggattcagaaccagagcgaaaacgcaagaagactgaagactcttcttcaggcaaatcagtggcgtctgatgtccctgagggtgaaaaagcaatgacaaatcactgcaagagtacacgtcataagcaaaatactgagaaattcatggccaagcaaagaaaggaaaaggagcagaatgaggctgaagaaagaagctctaggtgattgggggaaaggaaagaattcactagaaatttgtttagggtccagttgatttgtgtatttttgttatcatttaatttgtaattttcgtttcagaagcaaatattcgtgttgtacaaatttctgattgccctaaatgtagagagactgatggggaaagtatgatgggtttgatttttatatcaaatcatcaggcatggagaaatatcttttagaagtgttaaaataaatgttcctactgtatatttaaaatacaaaaaaa

SEQ ID NO: 436563 - DNA, 4627 bp, Homo sapiens
cctccctcttgttcgtcctccctccccctgtggactgcggcgctggcgttccgcgcacgccggctcactgcgcctgcccggcgtgtggacgccacacgctcccggaagtgggaggtggccgctggagtttgtgtggccgccgccgcgggaacgcgagcccggtaatttttcaacggagaaaggcgaggctttcgggctctgcagagtgagagttagcaagtgtccggctccagcaactctcctctggcgtgacagccggcatggaggatccacagagtaaagagcctgccggcgaggccgtggctcccgcgctgctggagtcgccgcggccggagggcggggaggagccgccgcgtcccagtcccgaggaaactcaacagtgtaaatttgatggccaggagacaaaaggatccaagttcattacctccagtgcgagtgacttcagtgacccggtttacaaagagattgccattacgaatggctgtattaatagaatgagtaaggaagaactcagagctaagctttcagaattcaagcttgaaactagaggagtaaaggatgttctaaagaagagactgaaaaactattataagaagcagaagctgatgctgaaagagagcaattttgctgacagttattatgactacatttgtattattgactttgaagccacttgtgaagaaggaaacccacctgagtttgtacatgaaataattgaatttccggttgttttactgaatacgcatactttagaaatagaagacacgtttcagcagtatgtaagaccagagattaacacacagctgtctgatttctgcatcagtctaactggaattactcaggatcaggtagacagagctgataccttccctcaggtactaaaaaaagtaattgactggatgaaattgaaggaattaggaacaaagtataaatactcacttttaacagatggttcttgggatatgagtaagttcttgaacattcagtgtcaactcagcaggctcaaataccctccttttgcgaaaaagtggatcaatattcggaagtcatatggaaatttttacaaggttcctagaagccaaaccaaactgacaataatgcttgaaaaattaggaatggattatgatgggcggcctcactgtggtcttgatgactctaagaatatcgcccgaatagcagttcgaatgcttcaggatgggtgtgaactccgaatcaacgagaaaatgcatgcaggacagctaatgagtgtgtcctcttccttaccaatagagggcactccaccaccacaaatgccacattttagaaagtaacaacagttttgtgtgtggatcattccaattgaagttgctatgaagaggtagcagatgaatctcattgaattagtcctgtagtgcaaactttaagcaccttaaaacatttaaaatcttattacaggtgatagagatagatacatgtatgtgaacagattttgtaggaaggcatactgaattctttgtcaccagcacttttgatatgaacagtattcgttacatagtaacagttcctgcttacaactgaattttataatttaaggtgttcaagatatattctttttggttttaaaatgcaaaatcttattggctgttctgttgaatgtcatatcttactggtgtttaaatatgtaatgtgtttctttattaacatcactagatgaaaccatatcttaaaatgcagaaatgattggaaggtagatcttatctagcctttggatttcaagaatatcatagtccttttgattttcaaagtttatatgtgaagttcaccatgtatgtggtgaatttcgtaaggtacttggtatacatatctgcctatgtttcttttcaactcataattggaagaattatgatggattatagggtttggttaaaaatccagttactgaaggaattaatgaaaacgtagaagaaagtactaaaaggaatatcataagggctgtagctcaaacttcataatacataaatcactggggtctttttggatttggttgtttgattcgccttccttttttgacatatgtatgccttaattcttaaatctgagggaccatgctttgaaatagactgaaaattaagggtcaccacctaattttactttgtattcagtatcgtaagtgaggttaataaagtcaatactttctaccatatattacgtttttgttattaaaaaacttcattggccactagtgaagttagtcaataaaagacttgtttttctgattttacatagtaaatggctgctaagtattgagtaattcttaactaattctaaaaactaaaatgtgcatttcgacttgataaggtaaaactcttatctagaggctaaacccatgtattttcagaattgaatttttctccttgtagctttcagggaacaatttcattgacattgcttgcttcctgccttttaccttttaataaaaattgtgatgctactttattctaaagatttatattttataaccagatgaatttcctcaaaggtttccaaacctatatcatatagggtgaaaagcaggaaagtagacatttttcttggcgtgggaattctctacatagggcagtagatttcttaagccaatgaatttctgcttttcagcagtagtcatataatcagtatcataaagaataatgtgtaaataacagaaggcatatgagagtgtggtgttcctagatgaactgttacagattatagtaaaataaggaaatctaagtgctttaagtttatacagttaactcttaggataagagggatgtatgctgagatgtttgtgcatcccagatagcactgtacgataacctgtaaagtattactgaatactgaatagctgaaactgcaattggaaaatctgatgatgacgaggaaatattacgtttccagtttttttagctctatctgctaatttctttgcctgttttcactttcgccaagtaccaacaagctcatgttgtatttctttttaagaacttcaacattataagctctcagtaccctattttgttgttgttgttgtttgagacagagtttttgctcgtctgccaggatggagtgcagtggtgcgatcttggctcactgcaacctccgcctcctgggctcaggtgatcctcttgcctcagcctcctgagtagctcagattacaggcgcgtgccaccacacccgcctaatttttgtatttttggtagaggcggggtttcaccatgttggtcaggctggtcttgaactcctgacctcaagtgatttgcccaccttgacctcctacagacgtgagccactgcgctcagccatagattttactgtcttaacccattttaattcctctgttgagtctctgtcctcccctccaatttgatttgggattttgctgatgagatgatactaaacattgagagtactgctttttactctgacttttattgtgttgtctttgaaagacaaatagtacaactttttacaaggaaacacgtaagagatggatgtccatgaaaacaatattagtatattctattattgtttcttattaatagttacttagtatttacaaacaatttattattagctgtgttaacttttattctatgcttcatatgctctgacattgacatagtggatttctgctgatttttttcaaatccgcaatctttataaccaactgaagtatataatagagcattacattttatctttatttgtgttctgttggatcaagtatttaacatttgctctgaaaaaaatgtttttgtgatgtgtctttgttgccttgagatagatccatttatcctgcctcctagggagaagtttctgcctggattgaaacaaaaaaacacaggcgtcacaagcatgttacctattaagagagagagggtatctctgaagactaattaaaatggtaatttttaaaaagatgtgaccagttgacttttagtatatcatcccaagtattatccccaaaatgataatgcaaaacagaataatttggagaccaggagaaaaactggtatgattactggggaggggaagaagcacaggtggtcaagataataatgcatgtttggcctcagctgtagttgccaaagaaactacctgcctcacagatgagcacgcacgggtgcattgtcaaagtctgagaaggatgtattgtactttgaaggaagactttccatttctaagctaccatggagaagtatatgctcctcgagaccagagactgtgacttctgcatctttgattccagcgacatatgataaaatgttttgcacatagttgaatccagcgttgatacatgaaggacagcattacatcttttttctattatacttagaaatttcctctttgttctgcaccaccaacctgtatatcaagcctccttgccccacaaagcttccaaagcccgtaaatttgttaatctagagcaggggtcagcaaactaccacccatgggccaaatctggcctgctgcctatttttgtatggcctacaaactatggtttttatattcccttttgttaatggctcaaaataatattttgtataatatgaaaattacgaaattttagtttctctaaataaagttttggaaagaacaaaaaatctca

SEQ ID NO: 436564 - DNA, 4734 bp, Homo sapiens
cctccctcttgttcgtcctccctccccctgtggactgcggcgctggcgttccgcgcacgccggctcactgcgcctgcccggcgtgtggacgccacacgctcccggaagtgggaggtggccgctggagtttgtgtggccgccgccgcgggaacgcgagcccggtaatttttcaacggagaaaggcgaggctttcgggctctgcagagtgagagttagcaagtgtccggctccagcaactctcctctggcgtgacagccggcatggaggatccacagagtaaagagcctgccggcgaggccgtggctcccgcgctgctggagtcgccgcggccggagggcggggaggagccgccgcgtcccagtcccgaggaaactcaacagtgtaaatttgatggccaggagacaaaaggatccaagttcattacctccagtgcgagtgacttcagtgacccggtttacaaagagattgccattacgaatggctgtattaatagaatgagtaaggaagaactcagagctaagctttcagaattcaagcttgaaactaggtacaacttgtagcctacagaagattttccgagcaaaatttttgtccttcccaggtgtgaagatcagttgcttactcctggcttgcgtgggagctagcgatctagataggagtaaaggatgttctaaagaagagactgaaaaactattataagaagcagaagctgatgctgaaagagagcaattttgctgacagttattatgactacatttgtattattgactttgaagccacttgtgaagaaggaaacccacctgagtttgtacatgaaataattgaatttccggttgttttactgaatacgcatactttagaaatagaagacacgtttcagcagtatgtaagaccagagattaacacacagctgtctgatttctgcatcagtctaactggaattactcaggatcaggtagacagagctgataccttccctcaggtactaaaaaaagtaattgactggatgaaattgaaggaattaggaacaaagtataaatactcacttttaacagatggttcttgggatatgagtaagttcttgaacattcagtgtcaactcagcaggctcaaataccctccttttgcgaaaaagtggatcaatattcggaagtcatatggaaatttttacaaggttcctagaagccaaaccaaactgacaataatgcttgaaaaattaggaatggattatgatgggcggcctcactgtggtcttgatgactctaagaatatcgcccgaatagcagttcgaatgcttcaggatgggtgtgaactccgaatcaacgagaaaatgcatgcaggacagctaatgagtgtgtcctcttccttaccaatagagggcactccaccaccacaaatgccacattttagaaagtaacaacagttttgtgtgtggatcattccaattgaagttgctatgaagaggtagcagatgaatctcattgaattagtcctgtagtgcaaactttaagcaccttaaaacatttaaaatcttattacaggtgatagagatagatacatgtatgtgaacagattttgtaggaaggcatactgaattctttgtcaccagcacttttgatatgaacagtattcgttacatagtaacagttcctgcttacaactgaattttataatttaaggtgttcaagatatattctttttggttttaaaatgcaaaatcttattggctgttctgttgaatgtcatatcttactggtgtttaaatatgtaatgtgtttctttattaacatcactagatgaaaccatatcttaaaatgcagaaatgattggaaggtagatcttatctagcctttggatttcaagaatatcatagtccttttgattttcaaagtttatatgtgaagttcaccatgtatgtggtgaatttcgtaaggtacttggtatacatatctgcctatgtttcttttcaactcataattggaagaattatgatggattatagggtttggttaaaaatccagttactgaaggaattaatgaaaacgtagaagaaagtactaaaaggaatatcataagggctgtagctcaaacttcataatacataaatcactggggtctttttggatttggttgtttgattcgccttccttttttgacatatgtatgccttaattcttaaatctgagggaccatgctttgaaatagactgaaaattaagggtcaccacctaattttactttgtattcagtatcgtaagtgaggttaataaagtcaatactttctaccatatattacgtttttgttattaaaaaacttcattggccactagtgaagttagtcaataaaagacttgtttttctgattttacatagtaaatggctgctaagtattgagtaattcttaactaattctaaaaactaaaatgtgcatttcgacttgataaggtaaaactcttatctagaggctaaacccatgtattttcagaattgaatttttctccttgtagctttcagggaacaatttcattgacattgcttgcttcctgccttttaccttttaataaaaattgtgatgctactttattctaaagatttatattttataaccagatgaatttcctcaaaggtttccaaacctatatcatatagggtgaaaagcaggaaagtagacatttttcttggcgtgggaattctctacatagggcagtagatttcttaagccaatgaatttctgcttttcagcagtagtcatataatcagtatcataaagaataatgtgtaaataacagaaggcatatgagagtgtggtgttcctagatgaactgttacagattatagtaaaataaggaaatctaagtgctttaagtttatacagttaactcttaggataagagggatgtatgctgagatgtttgtgcatcccagatagcactgtacgataacctgtaaagtattactgaatactgaatagctgaaactgcaattggaaaatctgatgatgacgaggaaatattacgtttccagtttttttagctctatctgctaatttctttgcctgttttcactttcgccaagtaccaacaagctcatgttgtatttctttttaagaacttcaacattataagctctcagtaccctattttgttgttgttgttgtttgagacagagtttttgctcgtctgccaggatggagtgcagtggtgcgatcttggctcactgcaacctccgcctcctgggctcaggtgatcctcttgcctcagcctcctgagtagctcagattacaggcgcgtgccaccacacccgcctaatttttgtatttttggtagaggcggggtttcaccatgttggtcaggctggtcttgaactcctgacctcaagtgatttgcccaccttgacctcctacagacgtgagccactgcgctcagccatagattttactgtcttaacccattttaattcctctgttgagtctctgtcctcccctccaatttgatttgggattttgctgatgagatgatactaaacattgagagtactgctttttactctgacttttattgtgttgtctttgaaagacaaatagtacaactttttacaaggaaacacgtaagagatggatgtccatgaaaacaatattagtatattctattattgtttcttattaatagttacttagtatttacaaacaatttattattagctgtgttaacttttattctatgcttcatatgctctgacattgacatagtggatttctgctgatttttttcaaatccgcaatctttataaccaactgaagtatataatagagcattacattttatctttatttgtgttctgttggatcaagtatttaacatttgctctgaaaaaaatgtttttgtgatgtgtctttgttgccttgagatagatccatttatcctgcctcctagggagaagtttctgcctggattgaaacaaaaaaacacaggcgtcacaagcatgttacctattaagagagagagggtatctctgaagactaattaaaatggtaatttttaaaaagatgtgaccagttgacttttagtatatcatcccaagtattatccccaaaatgataatgcaaaacagaataatttggagaccaggagaaaaactggtatgattactggggaggggaagaagcacaggtggtcaagataataatgcatgtttggcctcagctgtagttgccaaagaaactacctgcctcacagatgagcacgcacgggtgcattgtcaaagtctgagaaggatgtattgtactttgaaggaagactttccatttctaagctaccatggagaagtatatgctcctcgagaccagagactgtgacttctgcatctttgattccagcgacatatgataaaatgttttgcacatagttgaatccagcgttgatacatgaaggacagcattacatcttttttctattatacttagaaatttcctctttgttctgcaccaccaacctgtatatcaagcctccttgccccacaaagcttccaaagcccgtaaatttgttaatctagagcaggggtcagcaaactaccacccatgggccaaatctggcctgctgcctatttttgtatggcctacaaactatggtttttatattcccttttgttaatggctcaaaataatattttgtataatatgaaaattacgaaattttagtttctctaaataaagttttggaaagaacaaaaaatctca

SEQ ID NO: 436565 - DNA, 4419 bp, Homo sapiens
tcaacattactgtagatacacagtgttagcaactcttaaactacctatatatcatacagttaaattttgactatttagaatttagttcaattggatttttatatgaaaataaagactattcaggagtaaatgagagaaaaatagtttaaagctaatttattataactgcaggctggcatttcttcaaaagaatttattatttttaaaacttagtatcttgaagtagaggatgcattaatgcgctttatagttttaaaatattatgaacaaaattattaatattttgttcctcaggaaaataattaaattttgggttgaaatctttcacacactcactttatcgtaaaatattttaaattatgaatcaattcattttttaatttaaaaattaagagtgctttcgatgtggggaattattcttaaaaactggaagggtttatgccgtgagatcctatgaaattgcaacctgctgtgatgaattcgtcgtgtatcatgtatcgtgtatcttaactcatataaattactttaacttgctatccttcccttgcaggaagacacgtttcagcagtatgtaagaccagagattaacacacagctgtctgatttctgcatcagtctaactggaattactcaggatcaggtagacagagctgataccttccctcaggtactaaaaaaagtaattgactggatgaaattgaaggaattaggaacaaagtataaatactcacttttaacagatggttcttgggatatgagtaagttcttgaacattcagtgtcaactcagcaggctcaaataccctccttttgcgaaaaagtggatcaatattcggaagtcatatggaaatttttacaaggttcctagaagccaaaccaaactgacaataatgcttgaaaaattaggaatggattatgatgggcggcctcactgtggtcttgatgactctaagaatatcgcccgaatagcagttcgaatgcttcaggatgggtgtgaactccgaatcaacgagaaaatgcatgcaggacagctaatgagtgtgtcctcttccttaccaatagagggcactccaccaccacaaatgccacattttagaaagtaacaacagttttgtgtgtggatcattccaattgaagttgctatgaagaggtagcagatgaatctcattgaattagtcctgtagtgcaaactttaagcaccttaaaacatttaaaatcttattacaggtgatagagatagatacatgtatgtgaacagattttgtaggaaggcatactgaattctttgtcaccagcacttttgatatgaacagtattcgttacatagtaacagttcctgcttacaactgaattttataatttaaggtgttcaagatatattctttttggttttaaaatgcaaaatcttattggctgttctgttgaatgtcatatcttactggtgtttaaatatgtaatgtgtttctttattaacatcactagatgaaaccatatcttaaaatgcagaaatgattggaaggtagatcttatctagcctttggatttcaagaatatcatagtccttttgattttcaaagtttatatgtgaagttcaccatgtatgtggtgaatttcgtaaggtacttggtatacatatctgcctatgtttcttttcaactcataattggaagaattatgatggattatagggtttggttaaaaatccagttactgaaggaattaatgaaaacgtagaagaaagtactaaaaggaatatcataagggctgtagctcaaacttcataatacataaatcactggggtctttttggatttggttgtttgattcgccttccttttttgacatatgtatgccttaattcttaaatctgagggaccatgctttgaaatagactgaaaattaagggtcaccacctaattttactttgtattcagtatcgtaagtgaggttaataaagtcaatactttctaccatatattacgtttttgttattaaaaaacttcattggccactagtgaagttagtcaataaaagacttgtttttctgattttacatagtaaatggctgctaagtattgagtaattcttaactaattctaaaaactaaaatgtgcatttcgacttgataaggtaaaactcttatctagaggctaaacccatgtattttcagaattgaatttttctccttgtagctttcagggaacaatttcattgacattgcttgcttcctgccttttaccttttaataaaaattgtgatgctactttattctaaagatttatattttataaccagatgaatttcctcaaaggtttccaaacctatatcatatagggtgaaaagcaggaaagtagacatttttcttggcgtgggaattctctacatagggcagtagatttcttaagccaatgaatttctgcttttcagcagtagtcatataatcagtatcataaagaataatgtgtaaataacagaaggcatatgagagtgtggtgttcctagatgaactgttacagattatagtaaaataaggaaatctaagtgctttaagtttatacagttaactcttaggataagagggatgtatgctgagatgtttgtgcatcccagatagcactgtacgataacctgtaaagtattactgaatactgaatagctgaaactgcaattggaaaatctgatgatgacgaggaaatattacgtttccagtttttttagctctatctgctaatttctttgcctgttttcactttcgccaagtaccaacaagctcatgttgtatttctttttaagaacttcaacattataagctctcagtaccctattttgttgttgttgttgtttgagacagagtttttgctcgtctgccaggatggagtgcagtggtgcgatcttggctcactgcaacctccgcctcctgggctcaggtgatcctcttgcctcagcctcctgagtagctcagattacaggcgcgtgccaccacacccgcctaatttttgtatttttggtagaggcggggtttcaccatgttggtcaggctggtcttgaactcctgacctcaagtgatttgcccaccttgacctcctacagacgtgagccactgcgctcagccatagattttactgtcttaacccattttaattcctctgttgagtctctgtcctcccctccaatttgatttgggattttgctgatgagatgatactaaacattgagagtactgctttttactctgacttttattgtgttgtctttgaaagacaaatagtacaactttttacaaggaaacacgtaagagatggatgtccatgaaaacaatattagtatattctattattgtttcttattaatagttacttagtatttacaaacaatttattattagctgtgttaacttttattctatgcttcatatgctctgacattgacatagtggatttctgctgatttttttcaaatccgcaatctttataaccaactgaagtatataatagagcattacattttatctttatttgtgttctgttggatcaagtatttaacatttgctctgaaaaaaatgtttttgtgatgtgtctttgttgccttgagatagatccatttatcctgcctcctagggagaagtttctgcctggattgaaacaaaaaaacacaggcgtcacaagcatgttacctattaagagagagagggtatctctgaagactaattaaaatggtaatttttaaaaagatgtgaccagttgacttttagtatatcatcccaagtattatccccaaaatgataatgcaaaacagaataatttggagaccaggagaaaaactggtatgattactggggaggggaagaagcacaggtggtcaagataataatgcatgtttggcctcagctgtagttgccaaagaaactacctgcctcacagatgagcacgcacgggtgcattgtcaaagtctgagaaggatgtattgtactttgaaggaagactttccatttctaagctaccatggagaagtatatgctcctcgagaccagagactgtgacttctgcatctttgattccagcgacatatgataaaatgttttgcacatagttgaatccagcgttgatacatgaaggacagcattacatcttttttctattatacttagaaatttcctctttgttctgcaccaccaacctgtatatcaagcctccttgccccacaaagcttccaaagcccgtaaatttgttaatctagagcaggggtcagcaaactaccacccatgggccaaatctggcctgctgcctatttttgtatggcctacaaactatggtttttatattcccttttgttaatggctcaaaataatattttgtataatatgaaaattacgaaattttagtttctctaaataaagttttggaaagaacaaaaaatctca

SEQ ID NO: 436566 - DNA, 3867 bp, Homo sapiens
agagtgattaccccccaaacccccacccaatagggtttagaagcttaaataccacctaaaggttacagaaagagtgtgggctcggatcagtggcataacatgttcggggagctggagaaggggaagcctggctagcaaaggtggcctgaattttttatatgccttatttgagtgggggtattgccctttgcctagctttatttagctgttagtgctaattttcagtttcttatttttcatcttaactgtggcttatattacagtttagaacaccaaagaattatttactaagctgtttatttttcaggttcctagaagccaaaccaaactgacaataatgcttgaaaaattaggaatggattatgatgggcggcctcactgtggtcttgatgactctaagaatatcgcccgaatagcagttcgaatgcttcaggatgggtgtgaactccgaatcaacgagaaaatgcatgcaggacagctaatgagtgtgtcctcttccttaccaatagagggcactccaccaccacaaatgccacattttagaaagtaacaacagttttgtgtgtggatcattccaattgaagttgctatgaagaggtagcagatgaatctcattgaattagtcctgtagtgcaaactttaagcaccttaaaacatttaaaatcttattacaggtgatagagatagatacatgtatgtgaacagattttgtaggaaggcatactgaattctttgtcaccagcacttttgatatgaacagtattcgttacatagtaacagttcctgcttacaactgaattttataatttaaggtgttcaagatatattctttttggttttaaaatgcaaaatcttattggctgttctgttgaatgtcatatcttactggtgtttaaatatgtaatgtgtttctttattaacatcactagatgaaaccatatcttaaaatgcagaaatgattggaaggtagatcttatctagcctttggatttcaagaatatcatagtccttttgattttcaaagtttatatgtgaagttcaccatgtatgtggtgaatttcgtaaggtacttggtatacatatctgcctatgtttcttttcaactcataattggaagaattatgatggattatagggtttggttaaaaatccagttactgaaggaattaatgaaaacgtagaagaaagtactaaaaggaatatcataagggctgtagctcaaacttcataatacataaatcactggggtctttttggatttggttgtttgattcgccttccttttttgacatatgtatgccttaattcttaaatctgagggaccatgctttgaaatagactgaaaattaagggtcaccacctaattttactttgtattcagtatcgtaagtgaggttaataaagtcaatactttctaccatatattacgtttttgttattaaaaaacttcattggccactagtgaagttagtcaataaaagacttgtttttctgattttacatagtaaatggctgctaagtattgagtaattcttaactaattctaaaaactaaaatgtgcatttcgacttgataaggtaaaactcttatctagaggctaaacccatgtattttcagaattgaatttttctccttgtagctttcagggaacaatttcattgacattgcttgcttcctgccttttaccttttaataaaaattgtgatgctactttattctaaagatttatattttataaccagatgaatttcctcaaaggtttccaaacctatatcatatagggtgaaaagcaggaaagtagacatttttcttggcgtgggaattctctacatagggcagtagatttcttaagccaatgaatttctgcttttcagcagtagtcatataatcagtatcataaagaataatgtgtaaataacagaaggcatatgagagtgtggtgttcctagatgaactgttacagattatagtaaaataaggaaatctaagtgctttaagtttatacagttaactcttaggataagagggatgtatgctgagatgtttgtgcatcccagatagcactgtacgataacctgtaaagtattactgaatactgaatagctgaaactgcaattggaaaatctgatgatgacgaggaaatattacgtttccagtttttttagctctatctgctaatttctttgcctgttttcactttcgccaagtaccaacaagctcatgttgtatttctttttaagaacttcaacattataagctctcagtaccctattttgttgttgttgttgtttgagacagagtttttgctcgtctgccaggatggagtgcagtggtgcgatcttggctcactgcaacctccgcctcctgggctcaggtgatcctcttgcctcagcctcctgagtagctcagattacaggcgcgtgccaccacacccgcctaatttttgtatttttggtagaggcggggtttcaccatgttggtcaggctggtcttgaactcctgacctcaagtgatttgcccaccttgacctcctacagacgtgagccactgcgctcagccatagattttactgtcttaacccattttaattcctctgttgagtctctgtcctcccctccaatttgatttgggattttgctgatgagatgatactaaacattgagagtactgctttttactctgacttttattgtgttgtctttgaaagacaaatagtacaactttttacaaggaaacacgtaagagatggatgtccatgaaaacaatattagtatattctattattgtttcttattaatagttacttagtatttacaaacaatttattattagctgtgttaacttttattctatgcttcatatgctctgacattgacatagtggatttctgctgatttttttcaaatccgcaatctttataaccaactgaagtatataatagagcattacattttatctttatttgtgttctgttggatcaagtatttaacatttgctctgaaaaaaatgtttttgtgatgtgtctttgttgccttgagatagatccatttatcctgcctcctagggagaagtttctgcctggattgaaacaaaaaaacacaggcgtcacaagcatgttacctattaagagagagagggtatctctgaagactaattaaaatggtaatttttaaaaagatgtgaccagttgacttttagtatatcatcccaagtattatccccaaaatgataatgcaaaacagaataatttggagaccaggagaaaaactggtatgattactggggaggggaagaagcacaggtggtcaagataataatgcatgtttggcctcagctgtagttgccaaagaaactacctgcctcacagatgagcacgcacgggtgcattgtcaaagtctgagaaggatgtattgtactttgaaggaagactttccatttctaagctaccatggagaagtatatgctcctcgagaccagagactgtgacttctgcatctttgattccagcgacatatgataaaatgttttgcacatagttgaatccagcgttgatacatgaaggacagcattacatcttttttctattatacttagaaatttcctctttgttctgcaccaccaacctgtatatcaagcctccttgccccacaaagcttccaaagcccgtaaatttgttaatctagagcaggggtcagcaaactaccacccatgggccaaatctggcctgctgcctatttttgtatggcctacaaactatggtttttatattcccttttgttaatggctcaaaataatattttgtataatatgaaaattacgaaattttagtttctctaaataaagttttggaaagaacaaaaaatctca

SEQ ID NO: 436567 - DNA, 1700 bp, Homo sapiens
cctccctcttgttcgtcctccctccccctgtggactgcggcgctggcgttccgcgcacgccggctcactgcgcctgcccggcgtgtggacgccacacgctcccggaagtgggaggtggccgctggagtttgtgtggccgccgccgcgggaacgcgagcccggtaatttttcaacggagaaaggcgaggctttcgggctctgcagagtgagagttagcaagtgtccggctccagcaactctcctctggcgtgacagccggcatggaggatccacagagtaaagagcctgccggcgaggccgtggctcccgcgctgctggagtcgccgcggccggagggcggggaggagccgccgcgtcccagtcccgaggaaactcaacagtgtaaatttgatggccaggagacaaaaggatccaagttcattacctccagtgcgagtgacttcagtgacccggtttacaaagagattgccattacgaatggctgtattaatagaatgagtaaggaagaactcagagctaagctttcagaattcaagcttgaaactagaggagtaaaggatgttctaaagaagagactgaaaaactattataagaagcagaagctgatgctgaaagagagcaattttgctgacagttattatgactacatttgtattattgactttgaagccacttgtgaagaaggaaacccacctgagtttgtacatgaaataattgaatttccggttgttttactgaatacgcatactttagaaatagaagacacgtttcagcagtatgtaagaccagagattaacacacagctgtctgatttctgcatcagtctaactggaattactcaggatcaggtagacagagctgataccttccctcaggtactaaaaaaagtaattgactggatgaaattgaaggaattaggaacaaagtataaatactcacttttaacagatggttcttgggatatgagtaagttcttgaacattcagtgtcaactcagcaggctcaaataccctccttttgcgaaaaagtggatcaatattcggaagtcatatggaaatttttacaagagaaagaggaaaggaccaggagtggcgaccggcaaaccacagcttgtgtgggaaggaaatttgacatgtgatgcaagcggacgtttgtgtaaactgctgggagattaacaacgggatctcactctgtcacccaggctggaattgcatgatcatggctcactgcagcctcagacttttgggctcaagcaatgctcccgcctcagcctcccaaaatgctggattacaggcacaactgtgagtggaattgctgagtcatgtggcaaactaccagttctgttgaacctcagggccatcattctgttcatgtcagctcgttgtagaaccacatcgatgaagaccaagatggtaaagatgaaaaattgtagctaacatttactgcacatttactacaagccaagcattgcactatgaagtttaagtgcattattcattaaccccttcaataaaatttgtaattttcgtttcagaagcaaatattcgtgttgtacaaatttctgattgccctaaatgtagagagactgatggggaaagtatgatgggtttgatttttatatcaaatcatcaggcatggagaaatatcttttagaagtgttaaaataaatgttcctactgtatatttaaaatacaaaaaaa

SEQ ID NO: 436568 - DNA, 637 bp, Homo sapiens
  misc_feature (12)..(12): n is a, c, g, or t
aagagagttagnattgggaaaattctgccatcagaaaaagctgttgtgacagaaccagcaaaaggtgaagaggccttccagatgagtgaagttgatgaggaatctggattaaaggattcagaaccagagcgaaaacgcaagaagactgaagactcttcttcaggcaaatcagtggcgtctgatgtccctgaggaattagactttcttgtacctaaggctggattcttctgtccaatttgttccctcttctactcaggtgaaaaagcaatgacaaatcactgcaagagtacacgtcataagcaaaatactgagaaattcatggccaagcaaagaaaggaaaaggagcagaatgaggctgaagaaagaagctctaggtgattgggggaaaggaaagaattcactagaaatttgtttagggtccagttgatttgtgtatttttgttatcatttaatttgtaattttcgtttcagaagcaaatattcgtgttgtacaaatttctgattgccctaaatgtagagagactgatggggaaagtatgatgggtttgatttttatatcaaatcatcaggcatggagaaatatcttttagaagtgttaaaataaatgttcctactgtatatttaaaatacaaaaaaa

SEQ ID NO: 436569 - DNA, 723 bp, Homo sapiens
cctccctcttgttcgtcctccctccccctgtggactgcggcgctggcgttccgcgcacgccggctcactgcgcctgcccggcgtgtggacgccacacgctcccggaagtgggaggtggccgctggagtttgtgtggccgccgccgcgggaacgcgagcccggtaatttttcaacggagaaaggcgaggctttcgggctctgcagagtgagagttagcaagtgtccggctccagcaactctcctctggcgtgacagccggcatggaggatccacagagtaaagagcctgccggcgaggccgtggctcccgcgctgctggagtcgccgcggccggagggcggggaggagccgccgcgtcccagtcccgaggaaactcaacagtgtaaatttgatggccaggagacaaaagagattgccattacgaatggctgtattaatagaatgagtaaggaagaactcagagctaagctttcagaattcaagcttgaaactagaggagtaaaggatgttctaaagaagagactgaaaaactattataagaagcagaagctgatgctgaaagagagcaattttgctgacagttattatgactacatttgtattattgactttgaagccacttgtgaagaaggaaacccacctgagtttgtacatgaaataattgaatttccggttgttttactgaatacgcatactttagaaatagtaagtgaatttttgtatt

SEQ ID NO: 436570 - DNA, 1467 bp, Homo sapiens
cctccctcttgttcgtcctccctccccctgtggactgcggcgctggcgttccgcgcacgccggctcactgcgcctgcccggcgtgtggacgccacacgctcccggaagtgggaggtggccgctggagtttgtgtggccgccgccgcgggaacgcgagcccggtaatttttcaacggagaaaggcgaggctttcgggctctgcagagtgagagttagcaagtgtccggctccagcaactctcctctggcgtgacagccggcatggaggatccacagagtaaagagcctgccggcgaggccgtggctcccgcgctgctggagtcgccgcggccggagggcggggaggagccgccgcgtcccagtcccgaggaaactcaacagtgtaaatttgatggccaggagacaaaaggatccaagttcattacctccagtgcgagtgacttcagtgacccggtttacaaagagattgccattacgaatggctgtattaatagaatgagtaaggaagaactcagagctaagctttcagaattcaagcttgaaactagaggagtaaaggatgttctaaagaagagactgaaaaactattataagaagcagaagctgatgctgaaagagagcaattttgctgacagttattatgactacatttgtattattgactttgaagccacttgtgaagaaggaaacccacctgagtttgtacatgaaataattgaatttccggttgttttactgaatacgcatactttagaaatagaagacacgtttcagcagtatgtaagaccagagattaacacacagctgtctgatttctgcatcagtctaactggaattactcaggatcaggtagacagagctgataccttccctcaggtactaaaaaaagtaattgactggatgaaattgaaggaattaggaacaaagtataaatactcacttttaacagatggttcttgggatatgagtaagttcttgaacattcagtgtcaactcagcaggctcaaataccctccttttgcgaaaaagtggatcaatattcggaagtcatatggaaatttttacaagggggaacatccgcatccaagagacgcctgcagtccagggggctccagagggagggagtcctgtggatgtggaagatacgcttttgtctgagagtcatgagattggactgtgggtccctgttgttgttaacccctgtgtgatcttgggcaattcactgttcctgtctttacctctacttgctcctcagtaagtcagagtgaactgagatctcttcctgaaattacttagcctaattctatggttggtttctggtggccaggaaccagaaataaatctctcagcaaaattttgcttatggaccatgaatcttagagtatccatggtatcactgatatctttaattcccagatattttccagtaatgaaattcatataataaagccaggatctctggttctta

SEQ ID NO: 436571 - DNA, 481 bp, Homo sapiens
tgccggcgaggccgtggctcccgcgctgctggagtcgccgcggccggagggcggggaggagccgccgcgtcccagtcccgaggtgaggagtcgacccgcgcctggctgttggcgccagctgccccgtccccaaagcgccctcggcacccctttcttctcaggtgtcccgcagaaggtgcagctgtgcgcccttggaccccagcctcttcctcggtgcccagctccctggctttatcctcgggtgggtgtcttggagccccctcagggccgaatcactctctgggagggaggaaatcgtcaagaccagttctgtctacagtgggttaacaggttctaagagggagttttgctttaaacttaattctgtgttcacggttgctgttgtcactccatgtagccgttatgggtagtttgcaaggctttatgtttttaaaatctcaccatatacgctaggtatgtcacttcatgcctgtttttaaaa

SEQ ID NO: 436572 - DNA, 4143 bp, Homo sapiens
gggggcccgctgcagggagaacggactccgggcggagggcagccaatccgtttcagcgcaggtcttgctcgggttgggcttgccactgcctggaacatacctgtccccctggcgcaacactcagctggctgcgaccgcaaccccgagcctggacactgcgccaggaatcctaaaaccaaaatattagaacgaaaacagaaacatggctcactatattacatttctctgcatggttttggtgctgcttcttcagaattctgtgttagctgaagatggggaagtaagatcaagttgtcgtactgctccgacagatttagttttcatcttagatggctcttatagtgttggcccagaaaactttgaaatagtgaaaaagtggcttgtcaatatcacaaaaaactttgacatagggccgaagtttattcaagttggagtggttcaatatagtgactaccctgtgctggagattcctctcggaagctatgattcaggagaacatttgacggcagcagtggaatccatactctacttaggaggaaacacaaagacagggaaggccatccagtttgcgctcgattacctttttgccaagtcctcacgatttctgactaagatagcagtggtacttacggatggcaagtcccaagatgacgtcaaggatgcagctcaagcagcaagagatagtaagataacattatttgctattggtgttggttcagaaacagaagatgccgaacttagagctattgccaacaagccttcgtctacttatgtgttttatgtggaagactatattgcaatatccaaaataagggaagtgatgaagcagaaactttgtgaagaatctgtctgtccaacacgaattccagtggcagctcgtgatgaaaggggatttgatattcttttgggtttagatgtaaataaaaaggttaagaaaagaatacagctttcaccaaaaaagataaaaggatatgaagtaacatcaaaagttgatttatcagaactcacaagcaatgttttcccagaaggtcttcctccatcatatgtatttgtgtctactcaaagatttaaagtcaagaaaatttgggatttatggagaatattaactattgatggaaggccacaaatagcagttaccttaaatggtgtggacaaaatcttattatttacaacaaccagcgtaattaatggctcacaagtggttacctttgctaaccctcaagttaagacgttgtttgatgaaggctggcaccaaattcgtctcttagtaacagaacaagatgtgactttgtatattgatgaccaacaaattgaaaacaagcccttacatccagttttagggatcttgatcaatgggcaaacccaaattggaaaatattctggaaaagaagaaactgttcagtttgatgtccaaaagttgcgaatctactgtgacccagaacagaacaaccgggagacagcatgtgagattcctggatttaatggagagtgccttaatggtcccagtgatgtaggttcaactccagctccctgtatttgtcctccgggaaaaccaggacttcaaggccccaaaggtgaccctggactgcctgggaaccctggctaccctggacaacctggtcaagatggtaagcctggatatcagggaattgcagggacaccaggtgttccaggatctccaggaatacaaggagctcgaggactaccaggttacaaaggagaaccagggcgagatggtgacaagggtgatcgtggacttcctggttttcctgggcttcatggcatgccaggatcaaagggtgaaatgggtgccaaaggagacaaaggatcacctggattttatggcaaaaagggtgcaaaaggtgaaaaggggaatgctggcttccctggcctccctggacctgctggagaaccaggaagacatggaaaggatggattaatgggtagtcccggtttcaagggagaagcaggatcccctggtgctccggggcaggatggaacacggggagagcctggaatcccaggatttcctggaaaccgaggattaatgggccaaaagggagaaattgggcctccaggacagcaaggaaaaaaaggagccccagggatgcctggtttaatgggaagcaatggctcaccaggccagcctggaacaccgggatctaagggaagcaaaggtgaacctggaattcaagggatgcctggggcttcagggctcaagggagaaccaggagcaacgggttccccaggagaaccaggatacatgggtttacccgggattcaaggaaaaaagggggacaaaggaaatcaaggtgaaaaaggtattcagggtcaaaagggagaaaatggaagacagggaattccagggcaacagggaattcaaggccatcatggtgcaaaaggagagagaggtgaaaagggagaacctggtgtccgaggtgccattggatcaaaaggagaatctggggtggatggcttgatggggcccgcaggtcctaaggggcaacctggggatccaggtcctcagggacccccaggtttggatgggaagcccggaagagagttttcagaacaatttattcgacaagtttgcacagatgtaataagagcccagctaccagtcttacttcagagtggaagaattagaaattgtgatcattgcctgtcccaacatggctccccgggtattcctgggccacctggtccgataggcccagagggtcccagaggattacctggtttgccaggaagagatggtgttcctggattagtgggtgtccctggacgtccaggtgtcagaggattaaaaggcctaccaggaagaaatggggaaaaagggagccaagggtttgggtatcctggagaacaaggtcctcctggtcccccaggtccagagggccctcctggaataagcaaagaaggtcctccaggagacccaggtctccctggcaaagatggagaccatggaaaacctggaatccaagggcaaccaggccccccaggcatctgcgacccatcactatgttttagtgtaattgccagaagagatccgttcagaaaaggaccaaactattagtgtctgatgcctcattcagcagcctaggcatggtgctttttctgtggtcttttgcatctcaggaagataaccaacagtaatcccttgaaaagaaacttaagtacctcggtgtttttattttttttttcttatggaaaaaaatataaaagatcacatatactgattttaaaggctcctcagtcatttggagcccttggattagcagcattaattaaatctcaagggtttcttgtaaagtccatttatgttaatcaaagttgaatataaaaatccaccattgcctgttagccagtcagttttagtcactgtgaaatatttcacattcagcctccatgcagtagagatttgagtttaatttcatgtccatgtgactttcatgtttcctatctcatagctcatgctactacataagccaaaacatgtatctcatcattggaagtaagatcagggctgatattcacctgggatagacagtattggtgaactactcatttactacagtgtctcagccttgataaagggcagtggattgcctgttgttcggtgttgtgaatagcacctctgaataagattagagtgtttcttaattcatttcaaactctaaaattagattaatggtggtgctaagaaagagtattaattactttgggaatggtcaaaattaacattaaaaacattttagacaaaaagtttcattgtacattcaaagaaaatgtaagtttggaagtactaaaagactattttatacttgttgattaatcggaatgtttgttgtatgccttcattttccatttcacttatatgtgtatgtccatatatgttaattttcattgtagcaaagctaatggaaataaagctaatgctctagttgaaagaaaaggaaaactcctgaaatcctagaatgtcttgttatttttagctgactgtaaaatattatgaacagtctttgtgtattgtgcttaatgcttttgtaagaaacagaatttgaaatatttcatccttgtcatgctcaaaattttgttacatgcttgttattcagagtataataaagttttgtacaggcctga

SEQ ID NO: 436573 - DNA, 397 bp, Homo sapiens
tcatagagataattgaatgctgatatgaaattaactgtttgcagatagatttgaagtggattttgacaagggtgaggttgaagaatagatgatgatattgtttaggctggaatggtttttctttgtaattaatttcagttttattttcagggtgatcgtggacttcctggttttcctgggcttcatggcatgccaggatcaaagggtgaaatgggtgccaaaggagacaaaggatcacctggattttatggcaaaaagggaagtatagatcacacaacaaagtattcatattgaacttttaatgtaatggaaacagaaaactagaattgcagttctaacccagcattagaacagttagctctgttcacccttcttaggggattaattcagaacaatg

SEQ ID NO: 436574 - DNA, 2771 bp, Homo sapiens
  misc_feature (2700)..(2700): n is a, c, g, or t
atgattgcatcagtaagggagttattaagagaaaagattgccattttttatatgaatatttaggttcttgggtatttcaaggctcaggtgggaggcaatcatttaattaaattaatttttaactaaggtggtgacactgagggcttgtggaactgttgcgctaaatcagaacttatatcatttaacagattttcttgcatgattcattagaatacaagaatgtgttcaaatgaaacatcattttaattttatcactcatgtgttggggtgcaagaactgagatgaatttcctcatagtttctttttcaaaaagcctttatttaaagctctaaatatcagtaatattcatataatgctatatctcctaagttgtcttttccatattggattattacaaatagcaatattataatatgtatacatttgaaaatatgttatttaccagttaaaattccaattgtgactgtttcttctttaatgataaagtcttcaattttttataagttaaaaatctattttatttgtttttagggaatcccaggatttcctggaaaccgaggattaatgggccaaaagggagaaattgggcctccaggacagcaaggaaaaaaaggagccccagggatgcctggtttaatgggaagcaatggctcaccaggccagcctggaacaccgggatctaagggaagcaaaggtgaacctggaattcaagggatgcctggggcttcagggctcaagggagaaccaggagcaacgggttccccaggagaaccaggatacatgggtttacccgggattcaaggaaaaaagggggacaaaggaaatcaaggtgaaaaaggtattcagggtcaaaagggagaaaatggaagacagggaattccagggcaacagggaattcaaggccatcatggtgcaaaaggagagagaggtgaaaagggagaacctggtgtccgaggtgccattggatcaaaaggagaatctggggtggatggcttgatggggcccgcaggtcctaaggggcaacctggggatccaggtcctcagggacccccaggtttggatgggaagcccggaagagagttttcagaacaatttattcgacaagtttgcacagatgtaataagagcccagctaccagtcttacttcagagtggaagaattagaaattgtgatcattgcctgtcccaacatggctccccgggtattcctgggccacctggtccgataggcccagagggtcccagaggattacctggtttgccaggaagagatggtgttcctggattagtgggtgtccctggacgtccaggtgtcagaggattaaaaggcctaccaggaagaaatggggaaaaagggagccaagggtttgggtatcctggagaacaaggtcctcctggtcccccaggtccagagggccctcctggaataagcaaagaaggtcctccaggagacccaggtctccctggcaaagatggagaccatggaaaacctggaatccaagggcaaccaggccccccaggcatctgcgacccatcactatgttttagtgtaattgccagaagagatccgttcagaaaaggaccaaactattagtgtctgatgcctcattcagcagcctaggcatggtgctttttctgtggtcttttgcatctcaggaagataaccaacagtaatcccttgaaaagaaacttaagtacctcggtgtttttattttttttttcttatggaaaaaaatataaaagatcacatatactgattttaaaggctcctcagtcatttggagcccttggattagcagcattaattaaatctcaagggtttcttgtaaagtccatttatgttaatcaaagttgaatataaaaatccaccattgcctgttagccagtcagttttagtcactgtgaaatatttcacattcagcctccatgcagtagagatttgagtttaatttcatgtccatgtgactttcatgtttcctatctcatagctcatgctactacataagccaaaacatgtatctcatcattggaagtaagatcagggctgatattcacctgggatagacagtattggtgaactactcatttactacagtgtctcagccttgataaagggcagtggattgcctgttgttcggtgttgtgaatagcacctctgaataagattagagtgtttcttaattcatttcaaactctaaaattagattaatggtggtgctaagaaagagtattaattactttgggaatggtcaaaattaacattaaaaacattttagacaaaaagtttcattgtacattcaaagaaaatgtaagtttggaagtactaaaagactattttatacttgttgattaatcggaatgtttgttgtatgccttcattttccatttcacttatatgtgtatgtccatatatgttaattttcattgtagcaaagctaatggaaataaagctaatgctctagttgaaagaaaaggaaaactcctgaaatcctagaatgtcttgttatttttagctgactgtaaaatattatgaacagtctttgtgtattgtgcttaatgcttttgtaagaaacagaatttgaaatatttcatccttgtcatgctcaaaattttgttacatgcttgttattcagagtataataaagttttgtacaggcctgaaaaaaaaaccgaaacagacgagctacctaagacagctaanagagcacactcgtctatgtagctagtggggattattggtagaggcgaccctaccgagccttgtgatgctgt

SEQ ID NO: 436575 - DNA, 3903 bp, Homo sapiens
  misc_feature (3832)..(3832): n is a, c, g, or t
gggggcccgctgcagggagaacggactccgggcggagggcagccaatccgtttcagcgcaggtcttgctcgggttgggcttgccactgcctggaacatacctgtccccctggcgcaacactcagctggctgcgaccgcaaccccgagcctggacactgcgccaggaatcctaaaaccaaaatattagaacgaaaacagaaacatggctcactatattacatttctctgcatggttttggtgctgcttcttcagaattctgtgttagctgaagatggggaagtaagatcaagttgtcgtactgctccgacagatttagttttcatcttagatggctcttatagtgttggcccagaaaactttgaaatagtgaaaaagtggcttgtcaatatcacaaaaaactttgacatagggccgaagtttattcaagttggagtggttcaatatagtgactaccctgtgctggagattcctctcggaagctatgattcaggagaacatttgacggcagcagtggaatccatactctacttaggaggaaacacaaagacagggaaggccatccagtttgcgctcgattacctttttgccaagtcctcacgatttctgactaagatagcagtggtacttacggatggcaagtcccaagatgacgtcaaggatgcagctcaagcagcaagagatagtaagataacattatttgctattggtgttggttcagaaacagaagatgccgaacttagagctattgccaacaagccttcgtctacttatgtgttttatgtggaagactatattgcaatatccaaaataagggaagtgatgaagcagaaactttgtgaagaatctgtctgtccaacacgaattccagtggcagctcgtgatgaaaggggatttgatattcttttgggtttagatgtaaataaaaaggttaagaaaagaatacagctttcaccaaaaaagataaaaggatatgaagtaacatcaaaagttgatttatcagaactcacaagcaatgttttcccagaaggtcttcctccatcatatgtatttgtgtctactcaaagatttaaagtcaagaaaatttgggatttatggagaatattaactattgatggaaggccacaaatagcagttaccttaaatggtgtggacaaaatcttattatttacaacaaccagcgtaattaatggctcacaagtggttacctttgctaaccctcaagttaagacgttgtttgatgaaggctggcaccaaattcgtctcttagtaacagaacaagatgtgactttgtatattgatgaccaacaaattgaaaacaagcccttacatccagttttagggatcttgatcaatgggcaaacccaaattggaaaatattctggaaaagaagaaactgttcagtttgatgtccaaaagttgcgaatctactgtgacccagaacagaacaaccgggagacagcatgtgagattcctggatttaatggagagtgccttaatggtcccagtgatgtaggttcaactccagctccctgtatttgtcctccgggaaaaccaggacttcaaggccccaaaggtgaccctggactgcctgggaaccctggctaccctggacaacctggtcaagatggtaagcctggatatcagggaattgcagggacaccaggtgttccaggatctccaggaatacaaggagctcgaggactaccaggttacaaaggagaaccagggcgagatggtgacaagggtgatcgtggacttcctggttttcctgggcttcatggcatgccaggatcaaagggtgaaatgggtgccaaaggagacaaaggatcacctggattttatggcaaaaagggtgcaaaaggtgaaaaggggaatgctggcttccctggcctccctggacctgctggagaaccaggaagacatggaaaggatggattaatgggtagtcccggtttcaagggagaagcaggatcccctggtgctccggggcaggatggaacacggggagagcctggaatcccaggatttcctggaaaccgaggattaatgggccaaaagggagaaattgggcctccaggacagcaaggaaaaaaaggagccccagggatgcctggtttaatgggaagcaatggctcaccaggccagcctggaacaccgggatctaagggaagcaaaggtgaacctggaattcaagggatgcctggggcttcagggctcaagggagaaccaggagcaacgggttccccaggagaaccaggatacatgggtttacccgggattcaaggaaaaaagggggacaaaggaaatcaaggtgaaaaaggtattcagggtcaaaagggagaaaatggaagacagggaattccagggcaacagggaattcaaggccatcatggtgcaaaaggagagagaggtgaaaagggagaacctggtgtccgaggtgccattggatcaaaaggagaatctggggtggatggcttgatggggcccgcaggtcctaaggggcaacctggggatccaggtcctcagggacccccaggtttggatgggaagcccggaagagagttttcagaacaatttattcgacaagtttgcacagatgtaataagagaccatggaaaacctggaatccaagggcaaccaggccccccaggcatctgcgacccatcactatgttttagtgtaattgccagaagagatccgttcagaaaaggaccaaactattagtgtctgatgcctcattcagcagcctaggcatggtgctttttctgtggtcttttgcatctcaggaagataaccaacagtaatcccttgaaaagaaacttaagtacctcggtgtttttattttttttttcttatggaaaaaaatataaaagatcacatatactgattttaaaggctcctcagtcatttggagcccttggattagcagcattaattaaatctcaagggtttcttgtaaagtccatttatgttaatcaaagttgaatataaaaatccaccattgcctgttagccagtcagttttagtcactgtgaaatatttcacattcagcctccatgcagtagagatttgagtttaatttcatgtccatgtgactttcatgtttcctatctcatagctcatgctactacataagccaaaacatgtatctcatcattggaagtaagatcagggctgatattcacctgggatagacagtattggtgaactactcatttactacagtgtctcagccttgataaagggcagtggattgcctgttgttcggtgttgtgaatagcacctctgaataagattagagtgtttcttaattcatttcaaactctaaaattagattaatggtggtgctaagaaagagtattaattactttgggaatggtcaaaattaacattaaaaacattttagacaaaaagtttcattgtacattcaaagaaaatgtaagtttggaagtactaaaagactattttatacttgttgattaatcggaatgtttgttgtatgccttcattttccatttcacttatatgtgtatgtccatatatgttaattttcattgtagcaaagctaatggaaataaagctaatgctctagttgaaagaaaaggaaaactcctgaaatcctagaatgtcttgttatttttagctgactgtaaaatattatgaacagtctttgtgtattgtgcttaatgcttttgtaagaaacagaatttgaaatatttcatccttgtcatgctcaaaattttgttacatgcttgttattcagagtataataaagttttgtacaggcctgaaaaaaaaaccgaaacagacgagctacctaagacagctaanagagcacactcgtctatgtagctagtggggattattggtagaggcgaccctaccgagccttgtgatgctgt

SEQ ID NO: 436576 - DNA, 4435 bp, Homo sapiens
gggggcccgctgcagggagaacggactccgggcggagggcagccaatccgtttcagcgcaggtcttgctcgggttgggcttgccactgcctggaacatacctgtccccctggcgcaacactcagctggctgcgaccgcaaccccgagcctggacactgcgccaggaatcctaaaaccaaaatattagaacgaaaacagaaacatggctcactatattacatttctctgcatggttttggtgctgcttcttcagaattctgtgttagctgaagatggggaagtaagatcaagttgtcgtactgctccgacagatttagttttcatcttagatggctcttatagtgttggcccagaaaactttgaaatagtgaaaaagtggcttgtcaatatcacaaaaaactttgacatagggccgaagtttattcaagttggagtggttcaatatagtgactaccctgtgctggagattcctctcggaagctatgattcaggagaacatttgacggcagcagtggaatccatactctacttaggaggaaacacaaagacagggaaggccatccagtttgcgctcgattacctttttgccaagtcctcacgatttctgactaagatagcagtggtacttacggatggcaagtcccaagatgacgtcaaggatgcagctcaagcagcaagagatagtaagataacattatttgctattggtgttggttcagaaacagaagatgccgaacttagagctattgccaacaagccttcgtctacttatgtgttttatgtggaagactatattgcaatatccaaaataagggaagtgatgaagcagaaactttgtgaagaatctgtctgtccaacacgaattccagtggcagctcgtgatgaaaggggatttgatattcttttgggtttagatgtaaataaaaaggttaagaaaagaatacagctttcaccaaaaaagataaaaggatatgaagtaacatcaaaagttgatttatcagaactcacaagcaatgttttcccagaaggtcttcctccatcatatgtatttgtgtctactcaaagatttaaagtcaagaaaatttgggatttatggagaatattaactattgatggaaggccacaaatagcagttaccttaaatggtgtggacaaaatcttattatttacaacaaccagcgtaattaatggctcacaagtggttacctttgctaaccctcaagttaagacgttgtttgatgaaggctggcaccaaattcgtctcttagtaacagaacaagatgtgactttgtatattgatgaccaacaaattgaaaacaagcccttacatccagttttagggatcttgatcaatgggcaaacccaaattggaaaatattctggaaaagaagaaactgttcagtttgatgtccaaaagttgcgaatctactgtgacccagaacagaacaaccgggagacagcatgtgagattcctggatttaatggagagtgccttaatggtcccagtgatgtaggttcaactccagctccctgtatttgtcctccgggaaaaccaggacttcaaggccccaaaggtgaccctggactgcctgggaaccctggctaccctggacaacctggtcaagatggtaagcctggatatcagggaattgcagggacaccaggtgttccaggatctccaggaatacaaggagctcgaggactaccaggttacaaaggagaaccagggcgagatggtgacaagggtgatcgtggacttcctggttttcctgggcttcatggcatgccaggatcaaagggtgaaatgggtgccaaaggagacaaaggatcacctggattttatggcaaaaagggtgcaaaaggtgaaaaggggaatgctggcttccctggcctccctggacctgctggagaaccaggaagacatggaaaggatggattaatgggtagtcccggtttcaagggagaagcaggatcccctggtgctccggggcaggatggaacacggggagagcctggaatcccaggatttcctggaaaccgaggattaatgggccaaaagggagaaattgggcctccaggacagcaaggaaaaaaaggagccccagggatgcctggtttaatgggaagcaatggctcaccaggccagcctggaacaccgggatctaagggaagcaaaggtgaacctggaattcaagggatgcctggggcttcagggctcaagggagaaccaggagcaacgggttccccaggagaaccaggatacatgggtttacccgggattcaaggaaaaaagggggacaaaggaaatcaaggtgaaaaaggtattcagggtcaaaagggagaaaatggaagacagggaattccagggcaacagggaattcaaggccatcatggtgcaaaaggagagagaggtgaaaagggagaacctggtgtccgaggtgccattggatcaaaaggagaatctggggtggatggcttgatggggcccgcaggtcctaaggggcaacctggggatccaggtcctcagggacccccaggtttggatgggaagcccggaagagagttttcagaacaatttattcgacaagtttgcacagatgtaataagagcccagctaccagtcttacttcagagtggaagaattagaaattgtgatcattgcctgtcccaacatggctccccgggtattcctgggccacctggtccgataggcccagagggtcccagaggattacctggtttgccaggaagagatggtgttcctggattagtgggtgtccctggacgtccaggtgtcagaggattaaaaggcctaccaggaagaaatggggaaaaagggagccaagggtttgggtatcctggagaacaaggtcctcctggtcccccaggtccagagggccctcctggaataagcaaagaaggtcctccaggagacccaggtctccctggcaaagatggagaccatggaaaacctggaatccaagggcaaccaggccccccaggcatctgcgacccatcactatgttttagtgtaattgccagaagagatccgttcagaaaaggaccaaactattagtgtctgatgcctcattcagcagcctaggcatggtgctttttctgtggtcttttgcatctcaggaagataaccaacagtaatcccttgaaaagaaacttaagtacctcggtgtttttattttttttttcttatggaaaaaaatataaaagatcacatatactgattttaaaggctcctcagtcatttggagcccttggattagcagcattaattaaatctcaagggtttcttgtaaagtccatttatgttaatcaaagttgaatataaaaatccaccattgcctgttagccagtcagttttagtcactgtgaaatatttcacattcagcctccatgcagtagagatttgagtttaatttcatgtccatgtgactttcatgtttcctatctcatagctcatgctactacataagccaaaacatgtatctcatcattggaagtaagatcagggctgatattcacctgggatagacagtattggtgaactactcatttactacagtgtctcagccttgataaagggcagtggattgcctgttgttcggtgttgtgaatagcacctctgaataagattagagtgtttcttaattcatttcaaactctaaaattagattaatggtggtgctaagaaagagtattaattactttgggaatggtcaaaattaacattaaaaacattttagacaaaaagtttcattgtacattcaaagaaaatgtaagtttggaagtactaaaagactattttatacttgttgattaatcggaatgtttgttgtatgccttcattttccatttcacttatatgtgtatgtccatatatgttaattttcattgtagcaaagctaatggaaataaagctaatgctctagttgaaagaaaaggaaaactcctgaaatcctagaatgtcttgttatttttagctgactgtaaaatattatgaacagtctttgtgtattgtgcttaatgcttttgtaagaaacagaatttgaaatatttcatccttgtcatgctcaaaattttgttacatgcttgttattcagagtataataaagttttgtacaggcctgaaaaaaaaaaaaaaaaaaaaaaaaaaaaaaaaaaaaaaaaaaaaaaaaaaaaaaaaaaacacaacaaaaaaaaaaaaaaaaaaaaaaaaaaagatgtgcgtgcgcgcgcgcgagcgcgcgagcgagaaagagatctcgtacaaacacgtgcggtgggggcgcgcgcggccaaaaggaaagaacgaaaacggagaaaaacaggcgctccaaaaaaaacccggagaaaaaaacgcgggggggctatccccacaaaaaaaaagcgccggcgcgggaaaaagagggtcataaaaaac

SEQ ID NO: 436577 - DNA, 2341 bp, Homo sapiens
gggggcccgctgcagggagaacggactccgggcggagggcagccaatccgtttcagcgcaggtcttgctcgggttgggcttgccactgcctggaacatacctgtccccctggcgcaacactcagctggctgcgaccgcaaccccgagcctggacactgcgccaggaatcctaaaaccaaaatattagaacgaaaacagaaacatggctcactatattacatttctctgcatggttttggtgctgcttcttcagaattctgtgttagctgaagatggggaagtaagatcaagttgtcgtactgctccgacagatttagttttcatcttagatggctcttatagtgttggcccagaaaactttgaaatagtgaaaaagtggcttgtcaatatcacaaaaaactttgacatagggccgaagtttattcaagttggagtggttcaatatagtgactaccctgtgctggagattcctctcggaagctatgattcaggagaacatttgacggcagcagtggaatccatactctacttaggaggaaacacaaagacagggaaggccatccagtttgcgctcgattacctttttgccaagtcctcacgatttctgactaagatagcagtggtacttacggatggcaagtcccaagatgacgtcaaggatgcagctcaagcagcaagagatagtaagataacattatttgctattggtgttggttcagaaacagaagatgccgaacttagagctattgccaacaagccttcgtctacttatgtgttttatgtggaagactatattgcaatatccaaaataagggaagtgatgaagcagaaactttgtgaagaatctgtctgtccaacacgaattccagtggcagctcgtgatgaaaggggatttgatattcttttgggtttagatgtaaataaaaaggttaagaaaagaatacagctttcaccaaaaaagataaaaggatatgaagtaacatcaaaagttgatttatcagaactcacaagcaatgttttcccagaaggtcttcctccatcatatgtatttgtgtctactcaaagatttaaagtcaagaaaatttgggatttatggagaatattaactattgatggaaggccacaaatagcagttaccttaaatggtgtggacaaaatcttattatttacaacaaccagcgtaattaatggctcacaagtggttacctttgctaaccctcaagttaagacgttgtttgatgaaggctggcaccaaattcgtctcttagtaacagaacaagatgtgactttgtatattgatgaccaacaaattgaaaacaagcccttacatccagttttagggatcttgatcaatgggcaaacccaaattggaaaatattctggaaaagaagaaactgttcagtttgatgtccaaaagttgcgaatctactgtgacccagaacagaacaaccgggagacagcatgtgagattcctggatttaatggagagtgccttaatggtcccagtgatgtaggttcaactccagctccctgtatttgtcctccgggaaaaccaggacttcaaggccccaaaggtgaccctggactgcctgggaaccctggctaccctggacaacctggtcaagatggtaagcctggatatcagggaattgcagggacaccaggtgttccaggatctccaggaatacaaggagctcgaggactaccaggttacaaaggagaaccagggcgagatggtgacaagggtgatcgtggacttcctggttttcctgggcttcatggcatgccaggatcaaagggtgaaatgggtgccaaaggagacaaaggatcacctggattttatggcaaaaagggtgcaaaaggtgaaaaggggaatgctggcttccctggcctccctggacctgctggagaaccaggaagacatggaaaggatggattaatgggtagtcccggtttcaagggagaagcaggatcccctggtgctccggggcaggatggaacacggggagagcctggaatcccaggatttcctggaaaccgaggattaatgggccaaaagggagaaattgggcctccaggacagcaaggaaaaaaaggagccccagggatgcctggtttaatgggaagcaatggctcaccaggccagcctggaacaccgggatctaagggaagcaaaggtgaacctggaattcaagggatgcctggggcttcagggctcaagggagaaccaggagcaacgggttccccaggagaaccaggatacatgggtttacccgggattcaaggaaaaaaggtatgcattggttaggagatacagttcgcttttaaccagttacttgca

SEQ ID NO: 436578 - DNA, 487 bp, Homo sapiens
aaaaatataattaacaccaactcaccatttaaacataagggatggggtttctttgtttttgaaagcccagctaccagtcttacttcagagtggaagaattagaaattgtgatcattgcctgtcccaacatggctccccgggtattcctgggccacctggtccgataggcccagagggtcccagaggattacctggtttgccaggaagagatggtgttcctggattagtgggtgtccctggacgtccaggtgtcagaggattaaaaggtatgcagttagtttcaacaagaaaatgaattttaaaaagtctttttttaaaaattcataccctatatccatttaatagtcgagttaacttttttcatgataaaaaaatctgtaaatgctcgtctttaaataatttgccaactgaattaaagagaaattattttcttaatgcaatattctcaaaaagagaagtcaaatttatgaacacataaacttacaaa

SEQ ID NO: 436579 - DNA, 4254 bp, Homo sapiens
  misc_feature (4183)..(4183): n is a, c, g, or t
gggggcccgctgcagggagaacggactccgggcggagggcagccaatccgtttcagcgcaggtcttgctcgggttgggcttgccactgcctggaacatacctgtccccctggcgcaacactcagctggctgcgaccgcaaccccgagcctggacactgcgccaggaatcctaaaaccaaaatattagaacgaaaacagaaacatggctcactatattacatttctctgcatggttttggtgctgcttcttcagaattctgtgttagctgaagatggggaagtaagatcaagttgtcgtactgctccgacagatttagttttcatcttagatggctcttatagtgttggcccagaaaactttgaaatagtgaaaaagtggcttgtcaatatcacaaaaaactttgacatagggccgaagtttattcaagttggagtggttcaatatagtgactaccctgtgctggagattcctctcggaagctatgattcaggagaacatttgacggcagcagtggaatccatactctacttaggaggaaacacaaagacagggaaggccatccagtttgcgctcgattacctttttgccaagtcctcacgatttctgactaagatagcagtggtacttacggatggcaagtcccaagatgacgtcaaggatgcagctcaagcagcaagagatagtaagataacattatttgctattggtgttggttcagaaacagaagatgccgaacttagagctattgccaacaagccttcgtctacttatgtgttttatgtggaagactatattgcaatatccaaaataagggaagtgatgaagcagaaactttgtgaagaatctgtctgtccaacacgaattccagtggcagctcgtgatgaaaggggatttgatattcttttgggtttagatgtaaataaaaaggttaagaaaagaatacagctttcaccaaaaaagataaaaggatatgaagtaacatcaaaagttgatttatcagaactcacaagcaatgttttcccagaaggtcttcctccatcatatgtatttgtgtctactcaaagatttaaagtcaagaaaatttgggatttatggagaatattaactattgatggaaggccacaaatagcagttaccttaaatggtgtggacaaaatcttattatttacaacaaccagcgtaattaatggctcacaagtggttacctttgctaaccctcaagttaagacgttgtttgatgaaggctggcaccaaattcgtctcttagtaacagaacaagatgtgactttgtatattgatgaccaacaaattgaaaacaagcccttacatccagttttagggatcttgatcaatgggcaaacccaaattggaaaatattctggaaaagaagaaactgttcagtttgatgtccaaaagttgcgaatctactgtgacccagaacagaacaaccgggagacagcatgtgagattcctggatttaatggagagtgccttaatggtcccagtgatgtaggttcaactccagctccctgtatttgtcctccgggaaaaccaggacttcaaggccccaaaggtgaccctggactgcctgggaaccctggctaccctggacaacctggtcaagatggtaagcctggatatcagggaattgcagggacaccaggtgttccaggatctccaggaatacaaggagctcgaggactaccaggttacaaaggagaaccagggcgagatggtgacaagggtgatcgtggacttcctggttttcctgggcttcatggcatgccaggatcaaagggtgaaatgggtgccaaaggagacaaaggatcacctggattttatggcaaaaagggtgcaaaaggtgaaaaggggaatgctggcttccctggcctccctggacctgctggagaaccaggaagacatggaaaggatggattaatgggtagtcccggtttcaagggagaagcaggatcccctggtgctccggggcaggatggaacacggggagagcctggaatcccaggatttcctggaaaccgaggattaatgggccaaaagggagaaattgggcctccaggacagcaaggaaaaaaaggagccccagggatgcctggtttaatgggaagcaatggctcaccaggccagcctggaacaccgggatctaagggaagcaaaggtgaacctggaattcaagggatgcctggggcttcagggctcaagggagaaccaggagcaacgggttccccaggagaaccaggatacatgggtttacccgggattcaaggaaaaaagggggacaaaggaaatcaaggtgaaaaaggtattcagggtcaaaagggagaaaatggaagacagggaattccagggcaacagggaattcaaggccatcatggtgcaaaaggagagagaggtgaaaagggagaacctggtgtccgaggtgccattggatcaaaaggagaatctggggtggatggcttgatggggcccgcaggtcctaaggggcaacctggggatccaggtcctcagggacccccaggtttggatgggaagcccggaagagagttttcagaacaatttattcgacaagtttgcacagatgtaataagagcccagctaccagtcttacttcagagtggaagaattagaaattgtgatcattgcctgtcccaacatggctccccgggtattcctgggccacctggtccgataggcccagagggtcccagaggattacctggtttgccaggaagagatggtgttcctggattagtgggtgtccctggacgtccaggtgtcagaggattaaaaggcctaccaggaagaaatggggaaaaagggagccaagggtttgggtatcctggagaacaaggtcctcctggtcccccaggtccagagggccctcctggaataagcaaagaaggtcctccaggagacccaggtctccctggcaaagatggagaccatggaaaacctggaatccaagggcaaccaggccccccaggcatctgcgacccatcactatgttttagtgtaattgccagaagagatccgttcagaaaaggaccaaactattagtgtctgatgcctcattcagcagcctaggcatggtgctttttctgtggtcttttgcatctcaggaagataaccaacagtaatcccttgaaaagaaacttaagtacctcggtgtttttattttttttttcttatggaaaaaaatataaaagatcacatatactgattttaaaggctcctcagtcatttggagcccttggattagcagcattaattaaatctcaagggtttcttgtaaagtccatttatgttaatcaaagttgaatataaaaatccaccattgcctgttagccagtcagttttagtcactgtgaaatatttcacattcagcctccatgcagtagagatttgagtttaatttcatgtccatgtgactttcatgtttcctatctcatagctcatgctactacataagccaaaacatgtatctcatcattggaagtaagatcagggctgatattcacctgggatagacagtattggtgaactactcatttactacagtgtctcagccttgataaagggcagtggattgcctgttgttcggtgttgtgaatagcacctctgaataagattagagtgtttcttaattcatttcaaactctaaaattagattaatggtggtgctaagaaagagtattaattactttgggaatggtcaaaattaacattaaaaacattttagacaaaaagtttcattgtacattcaaagaaaatgtaagtttggaagtactaaaagactattttatacttgttgattaatcggaatgtttgttgtatgccttcattttccatttcacttatatgtgtatgtccatatatgttaattttcattgtagcaaagctaatggaaataaagctaatgctctagttgaaagaaaaggaaaactcctgaaatcctagaatgtcttgttatttttagctgactgtaaaatattatgaacagtctttgtgtattgtgcttaatgcttttgtaagaaacagaatttgaaatatttcatccttgtcatgctcaaaattttgttacatgcttgttattcagagtataataaagttttgtacaggcctgaaaaaaaaaccgaaacagacgagctacctaagacagctaanagagcacactcgtctatgtagctagtggggattattggtagaggcgaccctaccgagccttgtgatgctgt

SEQ ID NO: 436580 - DNA, 2331 bp, Homo sapiens
  misc_feature (2260)..(2260): n is a, c, g, or t
gtaggcagggactgggttctactgtgagctgagatccctggagctccatgaaaaggagaaaaagaatgccgtgtttcctggatctatggagggaatcccaggatttcctggaaaccgaggattaatgggccaaaagggagaaattgggcctccaggacagcaaggaaaaaaaggagccccagggatgcctggtttaatgggaagcaatggctcaccaggccagcctggaacaccgggatctaagggaagcaaaggtgaacctggaattcaagggatgcctggggcttcagggctcaagggagaaccaggagcaacgggttccccaggagaaccaggatacatgggtttacccgggattcaaggaaaaaagggggacaaaggaaatcaaggtgaaaaaggtattcagggtcaaaagggagaaaatggaagacagggaattccagggcaacagggaattcaaggccatcatggtgcaaaaggagagagaggtgaaaagggagaacctggtgtccgaggtgccattggatcaaaaggagaatctggggtggatggcttgatggggcccgcaggtcctaaggggcaacctggggatccaggtcctcagggacccccaggtttggatgggaagcccggaagagagttttcagaacaatttattcgacaagtttgcacagatgtaataagagcccagctaccagtcttacttcagagtggaagaattagaaattgtgatcattgcctgtcccaacatggctccccgggtattcctgggccacctggtccgataggcccagagggtcccagaggattacctggtttgccaggaagagatggtgttcctggattagtgggtgtccctggacgtccaggtgtcagaggattaaaaggcctaccaggaagaaatggggaaaaagggagccaagggtttgggtatcctggagaacaaggtcctcctggtcccccaggtccagagggccctcctggaataagcaaagaaggtcctccaggagacccaggtctccctggcaaagatggagaccatggaaaacctggaatccaagggcaaccaggccccccaggcatctgcgacccatcactatgttttagtgtaattgccagaagagatccgttcagaaaaggaccaaactattagtgtctgatgcctcattcagcagcctaggcatggtgctttttctgtggtcttttgcatctcaggaagataaccaacagtaatcccttgaaaagaaacttaagtacctcggtgtttttattttttttttcttatggaaaaaaatataaaagatcacatatactgattttaaaggctcctcagtcatttggagcccttggattagcagcattaattaaatctcaagggtttcttgtaaagtccatttatgttaatcaaagttgaatataaaaatccaccattgcctgttagccagtcagttttagtcactgtgaaatatttcacattcagcctccatgcagtagagatttgagtttaatttcatgtccatgtgactttcatgtttcctatctcatagctcatgctactacataagccaaaacatgtatctcatcattggaagtaagatcagggctgatattcacctgggatagacagtattggtgaactactcatttactacagtgtctcagccttgataaagggcagtggattgcctgttgttcggtgttgtgaatagcacctctgaataagattagagtgtttcttaattcatttcaaactctaaaattagattaatggtggtgctaagaaagagtattaattactttgggaatggtcaaaattaacattaaaaacattttagacaaaaagtttcattgtacattcaaagaaaatgtaagtttggaagtactaaaagactattttatacttgttgattaatcggaatgtttgttgtatgccttcattttccatttcacttatatgtgtatgtccatatatgttaattttcattgtagcaaagctaatggaaataaagctaatgctctagttgaaagaaaaggaaaactcctgaaatcctagaatgtcttgttatttttagctgactgtaaaatattatgaacagtctttgtgtattgtgcttaatgcttttgtaagaaacagaatttgaaatatttcatccttgtcatgctcaaaattttgttacatgcttgttattcagagtataataaagttttgtacaggcctgaaaaaaaaaccgaaacagacgagctacctaagacagctaanagagcacactcgtctatgtagctagtggggattattggtagaggcgaccctaccgagccttgtgatgctgt

SEQ ID NO: 436581 - DNA, 1928 bp, Homo sapiens
gggggcccgctgcagggagaacggactccgggcggagggcagccaatccgtttcagcgcaggtcttgctcgggttgggcttgccactgcctggaacatacctgtccccctggcgcaacactcagctggctgcgaccgcaaccccgagcctggacactgcgccaggaatcctaaaaccaaaatattagaacgaaaacagaaacatggctcactatattacatttctctgcatggttttggtgctgcttcttcagaattctgtgttagctgaagatggggaagtaagatcaagttgtcgtactgctccgacagatttagttttcatcttagatggctcttatagtgttggcccagaaaactttgaaatagtgaaaaagtggcttgtcaatatcacaaaaaactttgacatagggccgaagtttattcaagttggagtggttcaatatagtgactaccctgtgctggagattcctctcggaagctatgattcaggagaacatttgacggcagcagtggaatccatactctacttaggaggaaacacaaagacagggaaggccatccagtttgcgctcgattacctttttgccaagtcctcacgatttctgactaagatagcagtggtacttacggatggcaagtcccaagatgacgtcaaggatgcagctcaagcagcaagagatagtaagataacattatttgctattggtgttggttcagaaacagaagatgccgaacttagagctattgccaacaagccttcgtctacttatgtgttttatgtggaagactatattgcaatatccaaaataagggaagtgatgaagcagaaactttgtgaagaatctgtctgtccaacacgaattccagtggcagctcgtgatgaaaggggatttgatattcttttgggtttagatgtaaataaaaaggttaagaaaagaatacagctttcaccaaaaaagataaaaggatatgaagtaacatcaaaagttgatttatcagaactcacaagcaatgttttcccagaaggtcttcctccatcatatgtatttgtgtctactcaaagatttaaagtcaagaaaatttgggatttatggagaatattaactattgatggaaggccacaaatagcagttaccttaaatggtgtggacaaaatcttattatttacaacaaccagcgtaattaatggctcacaagtggttacctttgctaaccctcaagttaagacgttgtttgatgaaggctggcaccaaattcgtctcttagtaacagaacaagatgtgactttgtatattgatgaccaacaaattgaaaacaagcccttacatccagttttagggatcttgatcaatgggcaaacccaaattggaaaatattctggaaaagaagaaactgttcagtttgatgtccaaaagttgcgaatctactgtgacccagaacagaacaaccgggagacagcatgtgagattcctggatttaatggagagtgccttaatggtcccagtgatgtaggttcaactccagctccctgtatttgtcctccgggaaaaccaggacttcaaggccccaaaggatatcagggaattgcagggacaccaggtgttccaggatctccaggaatacaaggagctcgaggactaccaggttacaaaggagaaccagggcgagatggtgacaagggtgatcgtggacttcctggttttcctgggcttcatggcatgccaggatcaaagggtgaaatgggtgccaaaggagacaaaggatcacctggattttatggcaaaaagggaagtatagatcacacaacaaagtattcatattgaacttttaatgtaatggaaacagaaaactagaattgcagttctaacccagcattagaacagttagctctgttcacccttcttaggggattaattcagaacaatg

SEQ ID NO: 436582 - DNA, 2311 bp, Homo sapiens
atacgactacacctgctccggagcccgcggcggtacctgcagcggaggagctctgtcttccccttcatctcacgcgagcccggcgtcccgccgcgtgcgccccggcgcagcccgccagtccgcccggagcccgcccagtcgccgcgctgcacgcccggggtgaaccctctgccctcgctgggacagagggccccgcagccgtcatgctttccgccatctacacagtcctggcgggactgctgttcctgccgctcctggtgaacctctgctgcccatacttcttccaggacataggctacttcttgaaggtggccgccgtgggccggagggtgcgcagctacgggcagcggcggccggcgcgcaccatcctgcgggcgttcctggagaaagcgcgccagacgccacacaagccttttctgctcttccgcgacgagactctcacctacgcgcaggtggaccggcgcagcaatcaagtggcccgggcgctgcacgaccacctcggcctgcgccagggagactgcgtggcgctccttatgggtaacgagccggcctacgtgtggctgtggctggggctggtgaagctgggctgtgccatggcgtgcctcaattacaacatccgcgcgaagtccctgctgcactgcttccagtgctgcggggcgaaggtgctgctggtgtcgccagaactacaagcagctgtcgaagagatactgccaagccttaaaaaagatgatgtgtccatctattatgtgagcagaacttctaacacagatgggattgactctttcctggacaaagtggatgaagtatcaactgaacctatcccagagtcatggaggtctgaagtcactttttccactcctgccttatacatttatacttctggaaccacaggtcttccaaaagcagccatgatcactcatcagcgcatatggtatggaactggcctcacttttgtaagcggattgaaggcagatgatgtcatctatatcactctgcccttttaccacagtgctgcactactgattggcattcacggatgtattgtggctggtgctactcttgccttgcggactaaattttcagccagccagttttgggatgactgcagaaaatacaacgtcactgtcattcagtatatcggtgaactgcttcggtatttatgcaactcaccacagaaaccaaatgaccgtgatcataaagtgagactggcactgggaaatggcttacgaggagatgtgtggagacaatttgtcaagagatttggggacatatgcatctatgagttctatgctgccactgaaggcaatattggatttatgaattatgcgagaaaagttggtgctgttggaagagtaaactacctacagaaaaaaatcataacttatgacctgattaaatatgatgtggagaaagatgaacctgtccgtgatgaaaatggatattgcgtcagagttcccaaaggtgaagttggacttctggtttgcaaaatcacacaacttacaccatttaatggctatgctggagcaaaggctcagacagagaagaaaaaactgagagatgtctttaagaaaggagacctctatttcaacagtggagatctcttaatggttgaccatgaaaatttcatctatttccacgacagagttggagatacattccggtggaaaggggaaaatgtggccaccactgaagttgctgatacagttggactggttgattttgtccaagaagtaaatgtttatggagtgcatgtgccagatcatgagggtcgcattggcatggcctccatcaaaatgaaagctagttatgcaaggccccggtttctaagaatacaggacaccattgagatcactggaacttttaaacaccgcaaaatgaccctggtggaggagggctttaaccctgctgtcatcaaagatgccttgtatttcttggatgacacagcaaaaatgtatgtgcctatgactgaggacatctataatgccataagtgctaaaaccctgaaactctgaatattcccaggaggataactcaacatttccagaaagaaactgaatggacagccacttgatataatccaactttaatttgattgaagattgtgaggaaattttgtaggaaatttgcatacccgtaaagggagacttttttaaataacagttgagtctttgcaagtaaaaagatttagagattattatttttcagtgtgcacctactgtttgtatttgcaaactgagcttgttggagggaaggcattattttttaaaatacttagtaaattaaatgaacaccaacatgtgaaaaaaaaatg

SEQ ID NO: 436583 - DNA, 476 bp, Homo sapiens
gagactggcactgggaaatggcttacgaggagatgtgtggagacaatttgtcaagagatttggggacatatgcatctatgagttctatgctgccactgaaggcaatattggatttatgaattatgcgagaaaagttggtgctgttggaagagtaaactacctacagaaagtaagtacattgaaaaatgagagcatacgtagccagttttcagaatacagagacttcttaaaagccaagtcatgatgatgttatcagaagtcaggcagcatcagagccatggcccattcctatcaccaagagaagttttgctcattctctgtgatgatgacttcaaaaaatcagatcctccaattaaaagcatctcaacttctattaagaacaatccattgtgcccttgccatctgcaacttaggtgaagtcttcctgatgccatttatacttgcatgtgataaaacacctgaaggttacaagttcc

SEQ ID NO: 436584 - DNA, 2365 bp, Homo sapiens
atacgactacacctgctccggagcccgcggcggtacctgcagcggaggagctctgtcttccccttcatctcacgcgagcccggcgtcccgccgcgtgcgccccggcgcagcccgccagtccgcccggagcccgcccagtcgccgcgctgcacgcccggggtgaaccctctgccctcgctgggacagagggccccgcagccgtcatgctttccgccatctacacagtcctggcgggactgctgttcctgccgctcctggtgaacctctgctgcccatacttcttccaggacataggctacttcttgaaggtggccgccgtgggccggagggtgcgcagctacgggcagcggcggccggcgcgcaccatcctgcgggcgttcctggagaaagcgcgccagacgccacacaagccttttctgctcttccgcgacgagactctcacctacgcgcaggtggaccggcgcagcaatcaagtggcccgggcgctgcacgaccacctcggcctgcgccagggagactgcgtggcgctccttatgggtaacgagccggcctacgtgtggctgtggctggggctggtgaagctgggctgtgccatggcgtgcctcaattacaacatccgcgcgaagtccctgctgcactgcttccagtgctgcggggcgaaggtgctgctggtgtcgccagaactacaagcagctgtcgaagagatactgccaagccttaaaaaagatgatgtgtccatctattatgtgagcagaacttctaacacagatgggattgactctttcctggacaaagtggatgaagtatcaactgaacctatcccagagtcatggaggtctgaagtcactttttccactcctgccttatacatttatacttctggaaccacaggtcttccaaaagcagccatgatcactcatcagcgcatatggtatggaactggcctcacttttgtaagcggattgaaggcagatgatgtcatctatatcactctgcccttttaccacagtgctgcactactgattggcattcacggatgtattgtggctggtgctactcttgccttgcggactaaattttcagccagccagttttgggatgactgcagaaaatacaacgtcactgtcattcagtatatcggtgaactgcttcggtatttatgcaactcaccacagaaaccaaatgaccgtgatcataaagtgagactggcactgggaaatggcttacgaggagatgtgtggagacaatttgtcaagagatttggggacatatgcatctatgagttctatgctgccactgaaggcaatattggatttatgaattatgcgagaaaagttggtgctgttggaagagtaaactacctacagaaaaaaatcataacttatgacctgattaaatatgatgtggagaaagatgaacctgtccgtgatgaaaatggatattgcgtcagagttcccaaaggtgaagttggacttctggtttgcaaaatcacacaacttacaccatttaatggctatgctggagcaaaggctcagacagagaagaaaaaactgagagatgtctttaagaaaggagacctctatttcaacagtggagatctcttaatggttgaccatgaaaatttcatctatttccacgacagagttggagatacattccggtggaaaggggaaaatgtggccaccactgaagttgctgatacagttggactggttgattttgtccaagaagtaaatgtttatggagtgcatgtgccagatcatgagggtcgcattggcatggcctccatcaaaatgaaagaaaaccatgaatttgatggaaagaaactctttcagcacattgctgattacctacctagttatgcaaggccccggtttctaagaatacaggacaccattgagatcactggaacttttaaacaccgcaaaatgaccctggtggaggagggctttaaccctgctgtcatcaaagatgccttgtatttcttggatgacacagcaaaaatgtatgtgcctatgactgaggacatctataatgccataagtgctaaaaccctgaaactctgaatattcccaggaggataactcaacatttccagaaagaaactgaatggacagccacttgatataatccaactttaatttgattgaagattgtgaggaaattttgtaggaaatttgcatacccgtaaagggagacttttttaaataacagttgagtctttgcaagtaaaaagatttagagattattatttttcagtgtgcacctactgtttgtatttgcaaactgagcttgttggagggaaggcattattttttaaaatacttagtaaattaaatgaacaccaacatgtgaaaaaaaaatg

SEQ ID NO: 436585 - DNA, 1185 bp, Homo sapiens
gtgaaccgaagtccttatattcccgggcttctttctcctctgggtaccagctccttactgccctgcagacaagcgtgccgtgcgtgcttgtggccaagggaaggaagagctggttgatccacagatagctccttcctccccgccccttcctttttgtttggaggtcccaggatctgtgttcacagacatctgggggaagaaaaggagcaggaaactaccccgcacagagttaagcaggaaacaacaacaacatcatgcaaaaaccctgcaaagaaaacgaaggaaagccaaagtgcagcgtgccaaagagggaggaaaaacgcccgtatggagaatttgaacgccagcaaacagaagggaattttagacagaggctgcttcagtctctcgaagaatttaaagaggacatagactataggcattttaaagatgaagaaatgacaagggagggagatgagatggaaaggtgtttggaagagataaggggtctgagaaagaaatttagggctctgcattctaaccataggcattctcgggaccgtccttatcccatttaattaatttctctgacaattcaattattttctgttattaatgttgccactgctttctgtttgtctgcactttcttgataaatatttgctatcgttttactccagtcattcgatgttgctgagatttacatatgactcttgtcaacatctcatcttttgacccaatcttattcatttaataagaggtctcattcatttgcatggaaaaatgctcattgtatattgcaaagtgaaaataacgagttgcaaaacagtgtatacatatatgtgtgtatatatgtacactttatttgtacatttctatgtgacataatgcaaaggaaagtgtctgattttattatacaccaaaggttaacagtgaatctctgtgtgatctctttttttttctttttgcctatctgcatcttctcacttgccaaaaaatgaatatatgtttatgtgtgtatattacttgtgtcacaaaaaaccctaaagtagacagtaaaagaacttgtcaatcgcctttggaaggcaatgaaacacttaataaactctcaataacagaagcgtaaaaatgaaatgtaaacctccaattacctctggatctcttagccagagtaataaactggtaattattacagataaaaaaaaa

SEQ ID NO: 436586 - DNA, 1131 bp, Homo sapiens
gtgaaccgaagtccttatattcccgggcttctttctcctctgggtaccagctccttactgccctgcagacaagcgtgccgtgcgtgcttgtggccaagggaaggaagaggtcccaggatctgtgttcacagacatctgggggaagaaaaggagcaggaaactaccccgcacagagttaagcaggaaacaacaacaacatcatgcaaaaaccctgcaaagaaaacgaaggaaagccaaagtgcagcgtgccaaagagggaggaaaaacgcccgtatggagaatttgaacgccagcaaacagaagggaattttagacagaggctgcttcagtctctcgaagaatttaaagaggacatagactataggcattttaaagatgaagaaatgacaagggagggagatgagatggaaaggtgtttggaagagataaggggtctgagaaagaaatttagggctctgcattctaaccataggcattctcgggaccgtccttatcccatttaattaatttctctgacaattcaattattttctgttattaatgttgccactgctttctgtttgtctgcactttcttgataaatatttgctatcgttttactccagtcattcgatgttgctgagatttacatatgactcttgtcaacatctcatcttttgacccaatcttattcatttaataagaggtctcattcatttgcatggaaaaatgctcattgtatattgcaaagtgaaaataacgagttgcaaaacagtgtatacatatatgtgtgtatatatgtacactttatttgtacatttctatgtgacataatgcaaaggaaagtgtctgattttattatacaccaaaggttaacagtgaatctctgtgtgatctctttttttttctttttgcctatctgcatcttctcacttgccaaaaaatgaatatatgtttatgtgtgtatattacttgtgtcacaaaaaaccctaaagtagacagtaaaagaacttgtcaatcgcctttggaaggcaatgaaacacttaataaactctcaataacagaagcgtaaaaatgaaatgtaaacctccaattacctctggatctcttagccagagtaataaactggtaattattacagataaaaaaaaa

SEQ ID NO: 436587 - DNA, 1803 bp, Homo sapiens
gtgaaccgaagtccttatattcccgggcttctttctcctctgggtaccagctccttactgccctgcagacaagcgtgccgtgcgtgcttgtggccaagggaaggaagaggtaaattccttaaatcccagcaggttggagtgaaggaaccactggacccccggggtcagtagtgggtgaatctaatgactggaataggtccagacttgctttcccaaaaccgctgcaaaatcgtcggagataattgtatcttttgcagggggaagcaagggggtaggtcgaaatcttttgagagacacctagagatttagtgacagctttgaaataatcggcttctctcaccctggcatgctttctttttatccttctcctcatctttctccaattttgttaagagaaaattttaggcctggggtatgtgttggtgtgtggagaaaggctgaaatcccgggatggagacaacagaaatttagagatcatttgaaaatagttcacctcactcaatgccggcctgtggtggtggggtggggcgcgggacggggcgaaggagggagacgcgggccttgcaaggcccaggcctgagggtgaggagtggggagtggaaacggaaatcctgaaggaaaggatacagacaggaaggaggggccaggaggtagaaatccggggggcgatgacggtgatgatgagaatcccaggttcaaaataataacgtctgtcttgtctctggagctggttgatccacagatagctccttcctccccgccccttcctttttgtttggaggtcccaggatctgtgttcacagacatctgggggaagaaaaggagcaggaaactaccccgcacagagttaagcaggaaacaacaacaacatcatgcaaaaaccctgcaaagaaaacgaaggaaagccaaagtgcagcgtgccaaagagggaggaaaaacgcccgtatggagaatttgaacgccagcaaacagaagggaattttagacagaggctgcttcagtctctcgaagaatttaaagaggacatagactataggcattttaaagatgaagaaatgacaagggagggagatgagatggaaaggtgtttggaagagataaggggtctgagaaagaaatttagggctctgcattctaaccataggcattctcgggaccgtccttatcccatttaattaatttctctgacaattcaattattttctgttattaatgttgccactgctttctgtttgtctgcactttcttgataaatatttgctatcgttttactccagtcattcgatgttgctgagatttacatatgactcttgtcaacatctcatcttttgacccaatcttattcatttaataagaggtctcattcatttgcatggaaaaatgctcattgtatattgcaaagtgaaaataacgagttgcaaaacagtgtatacatatatgtgtgtatatatgtacactttatttgtacatttctatgtgacataatgcaaaggaaagtgtctgattttattatacaccaaaggttaacagtgaatctctgtgtgatctctttttttttctttttgcctatctgcatcttctcacttgccaaaaaatgaatatatgtttatgtgtgtatattacttgtgtcacaaaaaaccctaaagtagacagtaaaagaacttgtcaatcgcctttggaaggcaatgaaacacttaataaactctcaataacagaagcgtaaaaatgaaatgtaaacctccaattacctctggatctcttagccagagtaataaactggtaattattacagataaaaaaaaa

SEQ ID NO: 436588 - DNA, 1169 bp, Homo sapiens
gcttcggtgcagagctggagagccgcggctgggaccggagtggggagcgcggcgtggaggtgccacccggcgcgggtggcggagagatcagaagcctcttccccaagccgagccaacctcagcggggacccgggctcagggacgcggcggcggcggcggcgactgcagtggctggacgatggcagcgtccgccggagccggggcggtgattgcagccccagacagccggcgctggctgtggtcggtgctggcggcggcgcttgggctcttgacagctggagtatcagccttggaagtatatacgccaaaagaaatcttcgtggcaaatggtacacaagggaagctgacctgcaagttcaagtctactagtacgactggcgggttgacctcagtctcctggagcttccagccagagggggccgacactactgtgtcgtttttccactactcccaagggcaagtgtaccttgggaattatccaccatttaaagacagaatcagctgggctggagaccttgacaagaaagatgcatcaatcaacatagaaaatatgcagtttatacacaatggcacctatatctgtgatgtcaaaaaccctcctgacatcgttgtccagcctggacacattaggctctatgtcgtagaaaaagagaatttgcctgtgtttccagtttgggtagtggtgggcatagttactgctgtggtcctaggtctcactctgctcatcagcatgattctggctgtcctctatagaaggaaaaactctaaacgggattacactggctgcagtacatcagagagtttgtcaccagttaagcaggctcctcggaagtccccctccgacactgagggtcttgtaaagagtctgccttctggatctcaccagggcccagtcatatatgcacagttagaccactccggcggacatcacagtgacaagattaacaagtcagagtctgtggtgtatgcggatatccgaaagaattaagagaatacctagaacatatcctcagcaagaaacaaaaccaaactggactctcgtgcagaaaatgtagcccattaccacatgtagccttggagacccaggcaaggacaagtacacgtgtactcacagagggagagaaagatgtgtacaaaggatatgtataaatattctatttagtcatcct

SEQ ID NO: 436589 - DNA, 1319 bp, Homo sapiens
gcttcggtgcagagctggagagccgcggctgggaccggagtggggagcgcggcgtggaggtgccacccggcgcgggtggcggagagatcagaagcctcttccccaagccgagccaacctcagcggggacccgggctcagggacgcggcggcggcggcggcgactgcagtggctggacgatggcagcgtccgccggagccggggcggtgattgcagccccagacagccggcgctggctgtggtcggtgctggcggcggcgcttgggctcttgacagctggagtatcagccttggaagtatatacgccaaaagaaatcttcgtggcaaatggtacacaagggaagctgacctgcaagttcaagtctactagtacgactggcgggttgacctcagtctcctggagcttccagccagagggggccgacactactgtgtcgtttttccactactcccaagggcaagtgtaccttgggaattatccaccatttaaagacagaatcagctgggctggagaccttgacaagaaagatgcatcaatcaacatagaaaatatgcagtttatacacaatggcacctatatctgtgatgtcaaaaaccctcctgacatcgttgtccagcctggacacattaggctctatgtcgtagaaaaagagaatttgcctgtgtttccagtttgggtagtggtgggcatagttactgctgtggtcctaggtctcactctgctcatcagcatgattctggctgtcctctatagaaggaaaaactctaaacgggattacactgggtaagaaacactgtttttttagggcaggggtggagggagggaatcagggtttatagaaacttctgtatttaatgaaaaaaggattttaaagaattaactactattttctttcatgtcagaatcaggcagtctccttaggaggtgttctaacatgggcaagtggaaatcagtgggcctgctattaaatgtggaatatgattctaatctctgttccagtttccttcttaggtttggtgagatgagctgctcagcagtctgtgctctgtgtttcaataccatccactatgcaattagtattcttaagacatcacttacccaatttaagagtttaatttcaatttcttgctaataaactcacaaggtggttctttccagttaggaaatataaaaccctaattaagaagttgtgagctggaattagtggcatgtgcctgtaagtcccagctacttaggctgtggcaggaggattgcttgagccgaggcgtttgaatctagcctaggcaacatagcaagatcctgtctctttaaaaaaaaaa

SEQ ID NO: 436590 - DNA, 423 bp, Homo sapiens
  misc_feature (57)..(57): n is a, c, g, or t
agggggggggcaaggggggaaacccccttctcttctttctcccaaaaaggggccccncttgggcaaacaaacccacaaccccactagcaaagaccccttatgtgtgcgttcacgcactcttattgttaacccaccacctttgggcactcctttcctggttgcagataacgaactaaggttgcctaaagggcagatctgccctctccatgtcttcgtcctggcaaacagggtcgtcttaaaattatgcgctaattctgtatgggagcactcaaaaggcattacttagagattgaaatttcaaactatctctagtttttcaatggaaatatatcagctagggaaaaaccatcaagctcattattattttttgatcttcagttgtatttttgtgaatattttaatacatctttttcaatttctgaa

SEQ ID NO: 436591 - DNA, 3787 bp, Homo sapiens
gcttcggtgcagagctggagagccgcggctgggaccggagtggggagcgcggcgtggaggtgccacccggcgcgggtggcggagagatcagaagcctcttccccaagccgagccaacctcagcggggacccgggctcagggacgcggcggcggcggcggcgactgcagtggctggacgatggcagcgtccgccggagccggggcggtgattgcagccccagacagccggcgctggctgtggtcggtgctggcggcggcgcttgggctcttgacagctggagtatcagccttggaagtatatacgccaaaagaaatcttcgtggcaaatggtacacaagggaagctgacctgcaagttcaagtctactagtacgactggcgggttgacctcagtctcctggagcttccagccagagggggccgacactactgtgtcgtttttccactactcccaagggcaagtgtaccttgggaattatccaccatttaaagacagaatcagctgggctggagaccttgacaagaaagatgcatcaatcaacatagaaaatatgcagtttatacacaatggcacctatatctgtgatgtcaaaaaccctcctgacatcgttgtccagcctggacacattaggctctatgtcgtagaaaaagagaatttgcctgtgtttccagtttgggtagtggtgggcatagttactgctgtggtcctaggtctcactctgctcatcagcatgattctggctgtcctctatagaaggaaaaactctaaacgggattacactggggcccagtcatatatgcacagttagaccactccggcggacatcacagtgacaagattaacaagtcagagtctgtggtgtatgcggatatccgaaagaattaagagaatacctagaacatatcctcagcaagaaacaaaaccaaactggactctcgtgcagaaaatgtagcccattaccacatgtagccttggagacccaggcaaggacaagtacacgtgtactcacagagggagagaaagatgtgtacaaaggatatgtataaatattctatttagtcatcctgatatgaggagccagtgttgcatgatgaaaagatggtatgattctacatatgtacccattgtcttgctgtttttgtactttcttttcaggtcatttacaattgggagatttcagaaacattcctttcaccatcatttagaaatggtttgccttaatggagacaatagcagatcctgtagtatttccagtagacatggccttttaatctaagggcttaagactgattagtcttagcatttactgtagttggaggatggagatgctatgatggaagcatacccagggtggcctttagcacagtatcagtaccatttatttgtctgccgcttttaaaaaatacccattggctatgccacttgaaaacaatttgagaagtttttttgaagtttttctcactaaaatatggggcaattgttagccttacatgttgtgtagacttactttaagtttgcacccttgaaatgtgtcatatcaatttctggattcataatagcaagattagcaaaggataaatgccgaaggtcacttcattctggacacagttggatcaatactgattaagtagaaaatccaagctttgcttgagaacttttgtaacgtggagagtaaaaagtatcggttttattctttgctgatgtcctttctgcttgaaataacagtcaccatacagctaaaggagaggagtttctttccttctaagtaggcagaaatggtatcattatgttgccgctctccaatctcccagagctcgctctctagagaatcaccttctttcgcttttttttttttttttgaggtagagtctcactatgttgcccagactagccttgaactcttgggctcaagtgattctccctcctcagcctcccgagtagctggaacgaactatagttgcaccactgcagctggcaagaatcaccttctttataaagcgtcagtcatgcttccagcaagaggcagcatcagtcatggctttataacagcttcatggtgcctcaaagactgttgaggttaatgagagcctagattagacagtttggctgtccttccctaaaacttgttttctcctattcactactccccaccgcacttaaaatctatgagtttttactttttactgggaatggaaagtgtggtgaagatcattcaacacttatgttgtcatttctcccattttctgaatttttttttaaatttccccccttttaaaattgttcgaaagcccacagttatggaaagaattactgtctagatggtctgcagaacgtgtttggggtgagtgggagtgaggggcaatgttactttttctccctgtagtttggagtccattatgagctgctgctttttcttctcatcttgtcatcttctggggatgtttgaaggctgagttccaacagaattcacaaagggaataaaacaggattgagattttgaggtgtgcacaaggtggtaagataaagggcatatgagcttcaaaactaatgctgttgcatacatgaagccttttgttttttgaggagctatttttgttattcttgtaacgctccaccttacatgccacgtctgtgtgagtcaacagggatcaggtttggtcaccacacatgtctgaagctgggcagcgtctgctctgtgttctgtgtggaatggagaaaaaaacgcctgccctgctgccttccatgttcataggcccagcccaagagagtgacacacagtgctggccctgagacatttccacaaagtggtcaactctgccttgcatcctaaaactttttgggcatctattttgaaaactataggagcctttggaaggcctcttatgtttggaggggaagggtgttgagattgtcaccatccttcaagctgagactcctggtgagcctttgccaccatgaaaaccacatagctgaccagggctgtgcttgaggtacagaggacacacatcgtagacaggcctgtgtcatgtttccttacagtcgttttttacagagaaaaggggcattgttttttcactgctttctcaacagttcctgtgaataaatgaaacatttcggagctccctgagagcaagagccttcacttcttcttgcggtgccgggaccatgtgttggtgaagctggtgctgtgggggccactcactcgaatgacacctggaggcctgttcctcccttaccactcccttccccagcccgacttcttggcctcctgcccaaccagacacctcaaactctgtcagtgccctggcattctggcagagaatcctcaccagttctcaccaaccttccccccaggcaagggcagctgccagcatggtgctctgccaggacaggtttccctgaaggaagctgctcacactgagatgagcctctcagggcaggacctcttcccaagccctgcacacccacccctgcagcccttttggctccccttttccctgtgcctcagcactcctttcctggttgcagataacgaactaaggttgcctaaagggcagatctgccctctccatgtcttcgtcctggcaaacagggtcgtcttaaaattatgcgctaattctgtatgggagcactcaaaaggcattacttagagattgaaatttcaaactatctctagtttttcaatggaaatatatcagctagggaaaaaccatcaagctcattattattttttgatcttcagttgtatttttgtgaatattttaatacatctttttcaatttctgaa

SEQ ID NO: 436592 - DNA, 3717 bp, Homo sapiens
gcttcggtgcagagctggagagccgcggctgggaccggagtggggagcgcggcgtggaggtgccacccggcgcgggtggcggagagatcagaagcctcttccccaagccgagccaacctcagcggggacccgggctcagggacgcggcggcggcggcggcgactgcagtggctggacgatggcagcgtccgccggagccggggcggtgattgcagccccagacagccggcgctggctgtggtcggtgctggcggcggcgcttgggctcttgacagctggagtatcagccttggaagtatatacgccaaaagaaatcttcgtggcaaatggtacacaagggaagctgacctgcaagttcaagtctactagtacgactggcgggttgacctcagtctcctggagcttccagccagagggggccgacactactgtgtcgtttttccactactcccaagggcaagtgtaccttgggaattatccaccatttaaagacagaatcagctgggctggagaccttgacaagaaagatgcatcaatcaacatagaaaatatgcagtttatacacaatggcacctatatctgtgatgtcaaaaaccctcctgacatcgttgtccagcctggacacattaggctctatgtcgtagaaaaagagaatttgcctgtgtttccagtttgggtagtggtgggcatagttactgctgtggtcctaggtctcactctgctcatcagcatgattctggctgtcctctatagaaggaaaaactctaaacgggattacactggctgcagtacatcagagagtttgtcaccagttaagcaggctcctcggaagtccccctccgacactgagggtcttgtaaagagtctgccttctggatctcaccagggcccagtcatatatgcacagttagaccactccggcggacatcacagtgacaagattaacaagtcagagtctgtggtgtatgcggatatccgaaagaattaagagaatacctagaacatatcctcagcaagaaacaaaaccaaactggactctcgtgcagaaaatgtagcccattaccacatgtagccttggagacccaggcaaggacaagtacacgtgtactcacagagggagagaaagatgtgtacaaaggatatgtataaatattctatttagtcatcctgatatgaggagccagtgttgcatgatgaaaagatggtatgattctacatatgtacccattgtcttgctgtttttgtactttcttttcaggtcatttacaattgggagatttcagaaacattcctttcaccatcatttagaaatggtttgccttaatggagacaatagcagatcctgtagtatttccagtagacatggccttttaatctaagggcttaagactgattagtcttagcatttactgtagttggaggatggagatgctatgatggaagcatacccagggtggcctttagcacagtatcagtaccatttatttgtctgccgcttttaaaaaatacccattggctatgccacttgaaaacaatttgagaagtttttttgaagtttttctcactaaaatatggggcaattgttagccttacatgttgtgtagacttactttaagtttgcacccttgaaatgtgtcatatcaatttctggattcataatagcaagattagcaaaggataaatgccgaaggtcacttcattctggacacagttggatcaatactgattaagtagaaaatccaagctttgcttgagaacttttgtaacgtggagagtaaaaagtatcggttttattctttgctgatgtcctttctgcttgaaataacagtcaccatacagctaaaggagaggagtttctttccttctaagtaggcagaaatggtatcattatgttgccgctctccaatctcccagagctcgctctctagagaatcaccttctttcgcttttttttttttttttgaggtagagtctcactatgttgcccagactagccttgaactcttgggctcaagtgattctccctcctcagcctcccgagtagctggaacgaactatagttgcaccactgcagctggcaagaatcaccttctttataaagcgtcagtcatgcttccagcaagaggcagcatcagtcatggctttataacagcttcatggtgcctcaaagactgttgaggttaatgagagcctagattagacagtttggctgtccttccctaaaacttgttttctcctattcactactccccaccgcacttaaaatctatgagtttttactttttactgggaatggaaagtgtggtgaagatcattcaacacttatgttgtcatttctcccattttctgaatttttttttaaatttccccccttttaaaattgttcgaaagcccacagttatggaaagaattactgtctagatggtctgcagaacgtgtttggggtgagtgggagtgaggggcaatgttactttttctccctgtagtttggagtccattatgagctgctgctttttcttctcatcttgtcatcttctggggatgtttgaaggctgagttccaacagaattcacaaagggaataaaacaggattgagattttgaggtgtgcacaaggtggtaagataaagggcatatgagcttcaaaactaatgctgttgcatacatgaagccttttgttttttgaggagctatttttgttattcttgtaacgctccaccttacatttccacaaagtggtcaactctgccttgcatcctaaaactttttgggcatctattttgaaaactataggagcctttggaaggcctcttatgtttggaggggaagggtgttgagattgtcaccatccttcaagctgagactcctggtgagcctttgccaccatgaaaaccacatagctgaccagggctgtgcttgaggtacagaggacacacatcgtagacaggcctgtgtcatgtttccttacagtcgttttttacagagaaaaggggcattgttttttcactgctttctcaacagttcctgtgaataaatgaaacatttcggagctccctgagagcaagagccttcacttcttcttgcggtgccgggaccatgtgttggtgaagctggtgctgtgggggccactcactcgaatgacacctggaggcctgttcctcccttaccactcccttccccagcccgacttcttggcctcctgcccaaccagacacctcaaactctgtcagtgccctggcattctggcagagaatcctcaccagttctcaccaaccttccccccaggcaagggcagctgccagcatggtgctctgccaggacaggtttccctgaaggaagctgctcacactgagatgagcctctcagggcaggacctcttcccaagccctgcacacccacccctgcagcccttttggctccccttttccctgtgcctcagcactcctttcctggttgcagataacgaactaaggttgcctaaagggcagatctgccctctccatgtcttcgtcctggcaaacagggtcgtcttaaaattatgcgctaattctgtatgggagcactcaaaaggcattacttagagattgaaatttcaaactatctctagtttttcaatggaaatatatcagctagggaaaaaccatcaagctcattattattttttgatcttcagttgtatttttgtgaatattttaatacatctttttcaatttctgaa

SEQ ID NO: 436593 - DNA, 3126 bp, Homo sapiens
tcgctaggtggcctaggtattctcttaattctttcggatatccgcatacaccacaggctcctcggaagtccccctccgacactgagggtcttgtaaagagtctgccttctggatctcaccagggcccagtcatatatgcacagttagaccactccggcggacatcacagtgacaagattaacaagtcagagtctgtggtgtatgcggatatccgaaagaattaagagaatacctagaacatatcctcagcaagaaacaaaaccaaactggactctcgtgcagaaaatgtagcccattaccacatgtagccttggagacccaggcaaggacaagtacacgtgtactcacagagggagagaaagatgtgtacaaaggatatgtataaatattctatttagtcatcctgatatgaggagccagtgttgcatgatgaaaagatggtatgattctacatatgtacccattgtcttgctgtttttgtactttcttttcaggtcatttacaattgggagatttcagaaacattcctttcaccatcatttagaaatggtttgccttaatggagacaatagcagatcctgtagtatttccagtagacatggccttttaatctaagggcttaagactgattagtcttagcatttactgtagttggaggatggagatgctatgatggaagcatacccagggtggcctttagcacagtatcagtaccatttatttgtctgccgcttttaaaaaatacccattggctatgccacttgaaaacaatttgagaagtttttttgaagtttttctcactaaaatatggggcaattgttagccttacatgttgtgtagacttactttaagtttgcacccttgaaatgtgtcatatcaatttctggattcataatagcaagattagcaaaggataaatgccgaaggtcacttcattctggacacagttggatcaatactgattaagtagaaaatccaagctttgcttgagaacttttgtaacgtggagagtaaaaagtatcggttttattctttgctgatgtcctttctgcttgaaataacagtcaccatacagctaaaggagaggagtttctttccttctaagtaggcagaaatggtatcattatgttgccgctctccaatctcccagagctcgctctctagagaatcaccttctttcgcttttttttttttttttgaggtagagtctcactatgttgcccagactagccttgaactcttgggctcaagtgattctccctcctcagcctcccgagtagctggaacgaactatagttgcaccactgcagctggcaagaatcaccttctttataaagcgtcagtcatgcttccagcaagaggcagcatcagtcatggctttataacagcttcatggtgcctcaaagactgttgaggttaatgagagcctagattagacagtttggctgtccttccctaaaacttgttttctcctattcactactccccaccgcacttaaaatctatgagtttttactttttactgggaatggaaagtgtggtgaagatcattcaacacttatgttgtcatttctcccattttctgaatttttttttaaatttccccccttttaaaattgttcgaaagcccacagttatggaaagaattactgtctagatggtctgcagaacgtgtttggggtgagtgggagtgaggggcaatgttactttttctccctgtagtttggagtccattatgagctgctgctttttcttctcatcttgtcatcttctggggatgtttgaaggctgagttccaacagaattcacaaagggaataaaacaggattgagattttgaggtgtgcacaaggtggtaagataaagggcatatgagcttcaaaactaatgctgttgcatacatgaagccttttgttttttgaggagctatttttgttattcttgtaacgctccaccttacatgccacgtctgtgtgagtcaacagggatcaggtttggtcaccacacatgtctgaagctgggcagcgtctgctctgtgttctgtgtggaatggagaaaaaaacgcctgccctgctgccttccatgttcataggcccagcccaagagagtgacacacagtgctggccctgagacatttccacaaagtggtcaactctgccttgcatcctaaaactttttgggcatctattttgaaaactataggagcctttggaaggcctcttatgtttggaggggaagggtgttgagattgtcaccatccttcaagctgagactcctggtgagcctttgccaccatgaaaaccacatagctgaccagggctgtgcttgaggtacagaggacacacatcgtagacaggcctgtgtcatgtttccttacagtcgttttttacagagaaaaggggcattgttttttcactgctttctcaacagttcctgtgaataaatgaaacatttcggagctccctgagagcaagagccttcacttcttcttgcggtgccgggaccatgtgttggtgaagctggtgctgtgggggccactcactcgaatgacacctggaggcctgttcctcccttaccactcccttccccagcccgacttcttggcctcctgcccaaccagacacctcaaactctgtcagtgccctggcattctggcagagaatcctcaccagttctcaccaaccttccccccaggcaagggcagctgccagcatggtgctctgccaggacaggtttccctgaaggaagctgctcacactgagatgagcctctcagggcaggacctcttcccaagccctgcacacccacccctgcagcccttttggctccccttttccctgtgcctcagcactcctttcctggttgcagataacgaactaaggttgcctaaagggcagatctgccctctccatgtcttcgtcctggcaaacagggtcgtcttaaaattatgcgctaattctgtatgggagcactcaaaaggcattacttagagattgaaatttcaaactatctctagtttttcaatggaaatatatcagctagggaaaaaccatcaagctcattattattttttgatcttcagttgtatttttgtgaatattttaatacatctttttcaatttctgaa

SEQ ID NO: 436594 - DNA, 3440 bp, Homo sapiens
gcttcggtgcagagctggagagccgcggctgggaccggagtggggagcgcggcgtggaggtgccacccggcgcgggtggcggagagatcagaagcctcttccccaagccgagccaacctcagcggggacccgggctcagggacgcggcggcggcggcggcgactgcagtggctggacgatggcagcgtccgccggagccggggcggtgattgcagccccagacagccggcgctggctgtggtcggtgctggcggcggcgcttgggctcttgacagctggagtatcagccttggaagtatatacgccaaaagaaatcttcgtggcaaatggtacacaagggaagctgacctgcaagttcaagtctactagtacgactggcgggttgacctcagtctcctggagcttccagccagagggggccgacactactgtgtcgggcccagtcatatatgcacagttagaccactccggcggacatcacagtgacaagattaacaagtcagagtctgtggtgtatgcggatatccgaaagaattaagagaatacctagaacatatcctcagcaagaaacaaaaccaaactggactctcgtgcagaaaatgtagcccattaccacatgtagccttggagacccaggcaaggacaagtacacgtgtactcacagagggagagaaagatgtgtacaaaggatatgtataaatattctatttagtcatcctgatatgaggagccagtgttgcatgatgaaaagatggtatgattctacatatgtacccattgtcttgctgtttttgtactttcttttcaggtcatttacaattgggagatttcagaaacattcctttcaccatcatttagaaatggtttgccttaatggagacaatagcagatcctgtagtatttccagtagacatggccttttaatctaagggcttaagactgattagtcttagcatttactgtagttggaggatggagatgctatgatggaagcatacccagggtggcctttagcacagtatcagtaccatttatttgtctgccgcttttaaaaaatacccattggctatgccacttgaaaacaatttgagaagtttttttgaagtttttctcactaaaatatggggcaattgttagccttacatgttgtgtagacttactttaagtttgcacccttgaaatgtgtcatatcaatttctggattcataatagcaagattagcaaaggataaatgccgaaggtcacttcattctggacacagttggatcaatactgattaagtagaaaatccaagctttgcttgagaacttttgtaacgtggagagtaaaaagtatcggttttattctttgctgatgtcctttctgcttgaaataacagtcaccatacagctaaaggagaggagtttctttccttctaagtaggcagaaatggtatcattatgttgccgctctccaatctcccagagctcgctctctagagaatcaccttctttcgcttttttttttttttttgaggtagagtctcactatgttgcccagactagccttgaactcttgggctcaagtgattctccctcctcagcctcccgagtagctggaacgaactatagttgcaccactgcagctggcaagaatcaccttctttataaagcgtcagtcatgcttccagcaagaggcagcatcagtcatggctttataacagcttcatggtgcctcaaagactgttgaggttaatgagagcctagattagacagtttggctgtccttccctaaaacttgttttctcctattcactactccccaccgcacttaaaatctatgagtttttactttttactgggaatggaaagtgtggtgaagatcattcaacacttatgttgtcatttctcccattttctgaatttttttttaaatttccccccttttaaaattgttcgaaagcccacagttatggaaagaattactgtctagatggtctgcagaacgtgtttggggtgagtgggagtgaggggcaatgttactttttctccctgtagtttggagtccattatgagctgctgctttttcttctcatcttgtcatcttctggggatgtttgaaggctgagttccaacagaattcacaaagggaataaaacaggattgagattttgaggtgtgcacaaggtggtaagataaagggcatatgagcttcaaaactaatgctgttgcatacatgaagccttttgttttttgaggagctatttttgttattcttgtaacgctccaccttacatgccacgtctgtgtgagtcaacagggatcaggtttggtcaccacacatgtctgaagctgggcagcgtctgctctgtgttctgtgtggaatggagaaaaaaacgcctgccctgctgccttccatgttcataggcccagcccaagagagtgacacacagtgctggccctgagacatttccacaaagtggtcaactctgccttgcatcctaaaactttttgggcatctattttgaaaactataggagcctttggaaggcctcttatgtttggaggggaagggtgttgagattgtcaccatccttcaagctgagactcctggtgagcctttgccaccatgaaaaccacatagctgaccagggctgtgcttgaggtacagaggacacacatcgtagacaggcctgtgtcatgtttccttacagtcgttttttacagagaaaaggggcattgttttttcactgctttctcaacagttcctgtgaataaatgaaacatttcggagctccctgagagcaagagccttcacttcttcttgcggtgccgggaccatgtgttggtgaagctggtgctgtgggggccactcactcgaatgacacctggaggcctgttcctcccttaccactcccttccccagcccgacttcttggcctcctgcccaaccagacacctcaaactctgtcagtgccctggcattctggcagagaatcctcaccagttctcaccaaccttccccccaggcaagggcagctgccagcatggtgctctgccaggacaggtttccctgaaggaagctgctcacactgagatgagcctctcagggcaggacctcttcccaagccctgcacacccacccctgcagcccttttggctccccttttccctgtgcctcagcactcctttcctggttgcagataacgaactaaggttgcctaaagggcagatctgccctctccatgtcttcgtcctggcaaacagggtcgtcttaaaattatgcgctaattctgtatgggagcactcaaaaggcattacttagagattgaaatttcaaactatctctagtttttcaatggaaatatatcagctagggaaaaaccatcaagctcattattattttttgatcttcagttgtatttttgtgaatattttaatacatctttttcaatttctgaa

SEQ ID NO: 436595 - DNA, 3075 bp, Homo sapiens
gggccctggtgagatccagaaggcagactctttacaagaccctcagtgtcggagggggacttccgaggagcctgcttaactggtgacaaactctctgatgtactgcagccagtgtaatcccgtttagagtttttccttctatagaggacagccagaatcatgctgatgagcagagtgagacctagaacatatcctcagcaagaaacaaaaccaaactggactctcgtgcagaaaatgtagcccattaccacatgtagccttggagacccaggcaaggacaagtacacgtgtactcacagagggagagaaagatgtgtacaaaggatatgtataaatattctatttagtcatcctgatatgaggagccagtgttgcatgatgaaaagatggtatgattctacatatgtacccattgtcttgctgtttttgtactttcttttcaggtcatttacaattgggagatttcagaaacattcctttcaccatcatttagaaatggtttgccttaatggagacaatagcagatcctgtagtatttccagtagacatggccttttaatctaagggcttaagactgattagtcttagcatttactgtagttggaggatggagatgctatgatggaagcatacccagggtggcctttagcacagtatcagtaccatttatttgtctgccgcttttaaaaaatacccattggctatgccacttgaaaacaatttgagaagtttttttgaagtttttctcactaaaatatggggcaattgttagccttacatgttgtgtagacttactttaagtttgcacccttgaaatgtgtcatatcaatttctggattcataatagcaagattagcaaaggataaatgccgaaggtcacttcattctggacacagttggatcaatactgattaagtagaaaatccaagctttgcttgagaacttttgtaacgtggagagtaaaaagtatcggttttattctttgctgatgtcctttctgcttgaaataacagtcaccatacagctaaaggagaggagtttctttccttctaagtaggcagaaatggtatcattatgttgccgctctccaatctcccagagctcgctctctagagaatcaccttctttcgcttttttttttttttttgaggtagagtctcactatgttgcccagactagccttgaactcttgggctcaagtgattctccctcctcagcctcccgagtagctggaacgaactatagttgcaccactgcagctggcaagaatcaccttctttataaagcgtcagtcatgcttccagcaagaggcagcatcagtcatggctttataacagcttcatggtgcctcaaagactgttgaggttaatgagagcctagattagacagtttggctgtccttccctaaaacttgttttctcctattcactactccccaccgcacttaaaatctatgagtttttactttttactgggaatggaaagtgtggtgaagatcattcaacacttatgttgtcatttctcccattttctgaatttttttttaaatttccccccttttaaaattgttcgaaagcccacagttatggaaagaattactgtctagatggtctgcagaacgtgtttggggtgagtgggagtgaggggcaatgttactttttctccctgtagtttggagtccattatgagctgctgctttttcttctcatcttgtcatcttctggggatgtttgaaggctgagttccaacagaattcacaaagggaataaaacaggattgagattttgaggtgtgcacaaggtggtaagataaagggcatatgagcttcaaaactaatgctgttgcatacatgaagccttttgttttttgaggagctatttttgttattcttgtaacgctccaccttacatgccacgtctgtgtgagtcaacagggatcaggtttggtcaccacacatgtctgaagctgggcagcgtctgctctgtgttctgtgtggaatggagaaaaaaacgcctgccctgctgccttccatgttcataggcccagcccaagagagtgacacacagtgctggccctgagacatttccacaaagtggtcaactctgccttgcatcctaaaactttttgggcatctattttgaaaactataggagcctttggaaggcctcttatgtttggaggggaagggtgttgagattgtcaccatccttcaagctgagactcctggtgagcctttgccaccatgaaaaccacatagctgaccagggctgtgcttgaggtacagaggacacacatcgtagacaggcctgtgtcatgtttccttacagtcgttttttacagagaaaaggggcattgttttttcactgctttctcaacagttcctgtgaataaatgaaacatttcggagctccctgagagcaagagccttcacttcttcttgcggtgccgggaccatgtgttggtgaagctggtgctgtgggggccactcactcgaatgacacctggaggcctgttcctcccttaccactcccttccccagcccgacttcttggcctcctgcccaaccagacacctcaaactctgtcagtgccctggcattctggcagagaatcctcaccagttctcaccaaccttccccccaggcaagggcagctgccagcatggtgctctgccaggacaggtttccctgaaggaagctgctcacactgagatgagcctctcagggcaggacctcttcccaagccctgcacacccacccctgcagcccttttggctccccttttccctgtgcctcagcactcctttcctggttgcagataacgaactaaggttgcctaaagggcagatctgccctctccatgtcttcgtcctggcaaacagggtcgtcttaaaattatgcgctaattctgtatgggagcactcaaaaggcattacttagagattgaaatttcaaactatctctagtttttcaatggaaatatatcagctagggaaaaaccatcaagctcattattattttttgatcttcagttgtatttttgtgaatattttaatacatctttttcaatttctgaa

SEQ ID NO: 436596 - DNA, 3587 bp, Homo sapiens
gcttcggtgcagagctggagagccgcggctgggaccggagtggggagcgcggcgtggaggtgccacccggcgcgggtggcggagagatcagaagcctcttccccaagccgagccaacctcagcggggacccgggctcagggacgcggcggcggcggcggcgactgcagtggctggacgatggcagcgtccgccggagccggggcggtgattgcagccccagacagccggcgctggctgtggtcggtgctggcggcggcgcttgggctcttgacagctggagtatcagccttggaagtatatacgccaaaagaaatcttcgtggcaaatggtacacaagggaagctgacctgcaagttcaagtctactagtacgactggcgggttgacctcagtctcctggagcttccagccagagggggccgacactactgtgtcgtttttccactactcccaagggcaagtgtaccttgggaattatccaccatttaaagacagaatcagctgggctggagaccttgacaagaaagatgcatcaatcaacatagaaaatatgcagtttatacacaatggcacctatatctgtgatgtcaaaaaccctcctgacatcgttgtccagcctggacacattaggctctatgtcgtagaaaaagagaatttgcctgtgtttccagtttgggtagtggtgggcatagttactgctgtggtcctaggtctcactctgctcatcagcatgattctggctgtcctctatagaaggaaaaactctaaacgggattacactggctgcagtacatcagagagtttgtcaccagttaagcaggctcctcggaagtccccctccgacactgagggtcttgtaaagagtctgccttctggatctcaccagggcccagtcatatatgcacagttagaccactccggcggacatcacagtgacaagattaacaagtcagagtctgtggtgtatgcggatatccgaaagaattaagagaatacctagaacatatcctcagcaagaaacaaaaccaaactggactctcgtgcagaaaatgtagcccattaccacatgtagccttggagacccaggcaaggacaagtacacgtgtactcacagagggagagaaagatgtgtacaaaggatatgtataaatattctatttagtcatcctgatatgaggagccagtgttgcatgatgaaaagatggtatgattctacatatgtacccattgtcttgctgtttttgtactttcttttcaggtcatttacaattgggagatttcagaaacattcctttcaccatcatttagaaatggtttgccttaatggagacaatagcagatcctgtagtatttccagtagacatggccttttaatctaagggcttaagactgattagtcttagcatttactgtagttggaggatggagatgctatgatggaagcatacccagggtggcctttagcacagtatcagtaccatttatttgtctgccgcttttaaaaaatacccattggctatgccacttgaaaacaatttgagaagtttttttgaagtttttctcactaaaatatggggcaattgttagccttacatgttgtgtagacttactttaagtttgcacccttgaaatgtgtcatatcaatttctggattcataatagcaagattagcaaaggataaatgccgaaggtcacttcattctggacacagttggatcaatactgattaagtagaaaatccaagctttgcttgagaacttttgtaacgtggagagtaaaaagtatcggttttattctttgctgatgtcctttctgcttgaaataacagtcaccatacagctaaaggagaggagtttctttccttctaagtaggcagaaatggtatcattatgttgccgctctccaatctcccagagctcgctctctagagaatcaccttctttcgcttttttttttttttttgaggtagagtctcactatgttgcccagactagccttgaactcttgggctcaagtgattctccctcctcagcctcccgagtagctggaacgaactatagttgcaccactgcagctggcaagaatcaccttctttataaagcgtcagtcatgcttccagcaagaggcagcatcagtcatggctttataacagcttcatggtgcctcaaagactgttgaggttaatgagagcctagattagacagtttggctgtccttccctaaaacttgttttctcctattcactactccccaccgcacttaaaatctatgagtttttactttttactgggaatggaaagtgtggtgaagatcattcaacacttatgttgtcatttctcccattttctgaatttttttttaaatttccccccttttaaaattgttcgaaagcccacagttatggaaagaattactgtctagatggtctgcagaacgtgtttggggtgagtgggagtgaggggcaatgttactttttctccctgtagtttggagtccattatgagctgctgctttttcttctcatcttgtcatcttctggggatgtttgaaggctgagttccaacagaattcacaaagggaataaaacaggattgagattttgaggtgtgcacaaggtggtaagataaagggcatatgagcttcaaaactaatgctgttgcatacatgaagccttttgttttttgaggagctatttttgttattcttgtaacgctccaccttacatgccacgtctgtgtgagtcaacagggatcaggtttggtcaccacacatgtctgaagctgggcagcgtctgctctgtgttctgtgtggaatggagaaaaaaacgcctgccctgctgccttccatgttcataggcccagcccaagagagtgacacacagtgctggccctgagacatttccacaaagtggtcaactctgccttgcatcctaaaactttttgggcatctattttgaaaactataggagcctttggaaggcctcttatgtttggaggggaagggtgttgagattgtcaccatccttcaagctgagactcctggtgagcctttgccaccatgaaaaccacatagctgaccagggctgtgcttgaggtacagaggacacacatcgtagacaggcctgtgtcatgtttccttacagtcgttttttacagagaaaaggggcattgttttttcactgctttctcaacagttcctgtgaataaatgaaacatttcggagctccctgagagcaagagccttcacttcttcttgcggtgccgggaccatgtgttggtgaagctggtgctgtgggggccactcactcgaatgacacctggaggcctgttcctcccttaccactcccttccccagcccgacttcttggcctcctgcccaaccagacacctcaaactctgtcagtgccctggcattctggcagagaatcctcaccagttctcaccaaccgcaagggtctttccaggccagaaccgtgtaggtcgccagtgcttttcccagcagtacatagctatgactaagataacgaagatcgagcctcgatacgcctcgatcctgacgagctccgacgcacacacataaattccctg

SEQ ID NO: 436597 - DNA, 3619 bp, Homo sapiens
gcttcggtgcagagctggagagccgcggctgggaccggagtggggagcgcggcgtggaggtgccacccggcgcgggtggcggagagatcagaagcctcttccccaagccgagccaacctcagcggggacccgggctcagggacgcggcggcggcggcggcgactgcagtggctggacgatggcagcgtccgccggagccggggcggtgattgcagccccagacagccggcgctggctgtggtcggtgctggcggcggcgcttgggctcttgacagctggagtatcagccttggaagtatatacgccaaaagaaatcttcgtggcaaatggtacacaagggaagctgacctgcaagttcaagtctactagtacgactggcgggttgacctcagtctcctggagcttccagccagagggggccgacactactgtgtcgtttttccactactcccaagggcaagtgtaccttgggaattatccaccatttaaagacagaatcagctgggctggagaccttgacaagaaagatgcatcaatcaacatagaaaatatgcagtttatacacaatggcacctatatctgtgatgtcaaaaaccctcctgacatcgttgtccagcctggacacattaggctctatgtcgtagaaaaagagaatttgcctgtgtttccagtttgggtagtggtgggcatagttactgctgtggtcctaggtctcactctgctcatcagcatgattctggctgtcctctatagaaggaaaaactctaaacgggattacactggctgcagtacatcagagagtttgtcaccagttaagcaggctcctcggaagtccccctccgacactgagggtcttgtaaagagtctgccttctggatctcaccagggcccagtcatatatgcacagttagaccactccggcggacatcacagtgacaagattaacaagtcagagtctgtggtgtatgcggatatccgaaagaattaagagaatacctagaacatatcctcagcaagaaacaaaaccaaactggactctcgtgcagaaaatgtagcccattaccacatgtagccttggagacccaggcaaggacaagtacacgtgtactcacagagggagagaaagatgtgtacaaaggatatgtataaatattctatttagtcatcctgatatgaggagccagtgttgcatgatgaaaagatggtatgattctacatatgtacccattgtcttgctgtttttgtactttcttttcaggtcatttacaattgggagatttcagaaacattcctttcaccatcatttagaaatggtttgccttaatggagacaatagcagatcctgtagtatttccagtagacatggccttttaatctaagggcttaagactgattagtcttagcatttactgtagttggaggatggagatgctatgatggaagcatacccagggtggcctttagcacagtatcagtaccatttatttgtctgccgcttttaaaaaatacccattggctatgccacttgaaaacaatttgagaagtttttttgaagtttttctcactaaaatatggggcaattgttagccttacatgttgtgtagacttactttaagtttgcacccttgaaatgtgtcatatcaatttctggattcataatagcaagattagcaaaggataaatgccgaaggtcacttcattctggacacagttggatcaatactgattaagtagaaaatccaagctttgcttgagaacttttgtaacgtggagagtaaaaagtatcggttttattctttgctgatgtcctttctgcttgaaataacagtcaccatacagctaaaggagaggagtttctttccttctaagtaggcagaaatggtatcattatgttgccgctctccaatctcccagagctcgctctctagagaatcaccttctttcgcttttttttttttttttgaggtagagtctcactatgttgcccagactagccttgaactcttgggctcaagtgattctccctcctcagcctcccgagtagctggaacgaactatagttgcaccactgcagctggcaagaatcaccttctttataaagcgtcagtcatgcttccagcaagaggcagcatcagtcatggctttataacagcttcatggtgcctcaaagactgttgaggttaatgagagcctagattagacagtttggctgtccttccctaaaacttgttttctcctattcactactccccaccgcacttaaaatctatgagtttttactttttactgggaatggaaagtgtggtgaagatcattcaacacttatgttgtcatttctcccattttctgaatttttttttaaatttccccccttttaaaattgttcgaaagcccacagttatggaaagaattactgtctagatggtctgcagaacgtgtttggggtgagtgggagtgaggggcaatgttactttttctccctgtagtttggagtccattatgagctgctgctttttcttctcatcttgtcatcttctggggatgtttgaaggctgagttccaacagaattcacaaagggaataaaacaggattgagattttgaggtgtgcacaaggtggtaagataaagggcatatgagcttcaaaactaatgctgttgcatacatgaagccttttgttttttgaggagctatttttgttattcttgtaacgctccaccttacatgccacgtctgtgtgagtcaacagggatcaggtttggtcaccacacatgtctgaagctgggcagcgtctgctctgtgttctgtgtggaatggagaaaaaaacgcctgccctgctgccttccatgttcataggcccagcccaagagagtgacacacagtgctggccctgagacatttccacaaagtggtcaactctgccttgcatcctaaaactttttgggcatctattttgaaaactataggagcctttggaaggcctcttatgtttggaggggaagggtgttgagattgtcaccatccttcaagctgagactcctggtgagcctttgccaccatgaaaaccacatagctgaccagggctgtgcttgaggtacagaggacacacatcgtagacaggcctgtgtcatgtttccttacagtcgttttttacagagaaaaggggcattgttttttcactgctttctcaacagttcctgtgaataaatgaaacatttcggagctccctgagagcaagagccttcacttcttcttgcggtgccgggaccatgtgttggtgaagctggtgctgtgggggccactcactcgaatgacacctggaggcctgttcctcccttacgcactcctttcctggttgcagataacgaactaaggttgcctaaagggcagatctgccctctccatgtcttcgtcctggcaaacagggtcgtcttaaaattatgcgctaattctgtatgggagcactcaaaaggcattacttagagattgaaatttcaaactatctctagtttttcaatggaaatatatcagctagggaaaaaccatcaagctcattattattttttgatcttcagttgtatttttgtgaatattttaatacatctttttcaatttctgaa

SEQ ID NO: 436598 - DNA, 1368 bp, Homo sapiens
gcttcggtgcagagctggagagccgcggctgggaccggagtggggagcgcggcgtggaggtgccacccggcgcgggtggcggagagatcagaagcctcttccccaagccgagccaacctcagcggggacccgggctcagggacgcggcggcggcggcggcgactgcagtggctggacgatggcagcgtccgccggagccggggcggtgattgcagccccagacagccggcgctggctgtggtcggtgctggcggcggcgcttgggctcttgacagctggagtatcagccttggaagtatatacgccaaaagaaatcttcgtggcaaatggtacacaagggaagctgacctgcaagttcaagtctactagtacgactggcgggttgacctcagtctcctggagcttccagccagagggggccgacactactgtgtcgtttttccactactcccaagggcaagtgtaccttgggaattatccaccatttaaagacagaatcagctgggctggagaccttgacaagaaagatgcatcaatcaacatagaaaatatgcagtttatacacaatggcacctatatctgtgatgtcaaaaaccctcctgacatcgttgtccagcctggacacattaggctctatgtcgtagaaaaagagaatttgcctgtgtttccagtttgggtagtggtgggcatagttactgctgtggtcctaggtctcactctgctcatcagcatgattctggctgtcctctatagaaggaaaaactctaaacgggattacactggctgcagtacatcagagagtttgtcaccagttaagcaggctcctcggaagtccccctccgacactgagggtcttgtaaagagtctgccttctggatctcaccagggcccagtcatatatgcacagttagaccactccggcggacatcacagtgacaagattaacaagtcagagtctgtggtgtatgcggatatccgaaagaattaagagaatacctagaacatatcctcagcaagaaacaaaaccaaactggactctcgtgcagaaaatgtagcccattaccacatgtagccttggagacccaggcaaggacaagtacacgtgtactcacagagggagagaaagatgtgtacaaaggatatgtataaatattctatttagtcatcctgatatgaggagccagtgttgcatgatgaaaagatggtatgattctacatatgtacccattgtcttgctgtttttgtactttcttttcaggtcatttacaattgggagatttcagaaacattcctttcaccatcatttagaaatgtcgccaatccgtcttgaaatgtcgccaatccgggatcctctagaacaccgcgcat

SEQ ID NO: 436599 - DNA, 637 bp, Homo sapiens
gcttcggtgcagagctggagagccgcggctgggaccggagtggggagcgcggcgtggaggtgccacccggcgcgggtggcggagagatcagaagcctcttccccaagccgagccaacctcagcggggacccgggctcagggacgcggcggcggcggcggcgactgcagtggctggacgatggcagcgtccgccggagccggggcggtgattgcagccccagacagccggcgctggctgtggtcggtgctggcggcggcgcttgggctcttgacagctggagtatcagccttggaagtatatacgccaaaagaaatcttcgtggcaaatggtacacaagggaagctgacctgcaagttcaagtctactagtacgactggcgggttgacctcagtctcctggagcttccagccagagggggccgacactactgtgtcgtttttccactactcccaagggcaagtgtaccttgggaattatccaccatttaaagacagaatcagctgggctggagaccttgacaagaaagatgcatcaatcaacactggctcctcatatcaggatgactaaatagaatatttatacatatcctttgtacacatctttctctccctctgtgagtacacgtgtacttgtctc

SEQ ID NO: 436600 - DNA, 1792 bp, Homo sapiens
gcttcggtgcagagctggagagccgcggctgggaccggagtggggagcgcggcgtggaggtgccacccggcgcgggtggcggagagatcagaagcctcttccccaagccgagccaacctcagcggggacccgggctcagggacgcggcggcggcggcggcgactgcagtggctggacgatggcagcgtccgccggagccggggcggtgattgcagccccagacagccggcgctggctgtggtcggtgctggcggcggcgcttgggctcttgacagctggagtatcagccttggaagtatatacgccaaaagaaatcttcgtggcaaatggtacacaagggaagctgacctgcaagttcaagtctactagtacgactggcgggttgacctcagtctcctggagcttccagccagagggggccgacactactgtgtcgtttttccactactcccaagggcaagtgtaccttgggaattatccaccatttaaagacagaatcagctgggctggagaccttgacaagaaagatgcatcaatcaacatagaaaatatgcagtttatacacaatggcacctatatctgtgatgtcaaaaaccctcctgacatcgttgtccagcctggacacattaggctctatgtcgtagaaaaagagaatttgcctgtgtttccagtttgggtagtggtgggcatagttactgctgtggtcctaggtctcactctgctcatcagcatgattctggctgtcctctatagaaggaaaaactctaaacgggattacactggctgcagtacatcagagagtttgtcaccagttaagcaggctcctcggaagtccccctccgacactgagggtcttgtaaagagtctgccttctggatctcaccagggcccagtcatatatgcacagttagaccactccggcggacatcacagtgacaagattaacaagtcagagtctgtggtgtatgcggatatccgaaagaattaagagaatacctagaacatatcctcagcaagaaacaaaaccaaactggactctcgtgcagaaaatgtagcccattaccacatgtagccttggagacccaggcaaggacaagtacacgtgtactcacagagggagagaaagatgtgtacaaaggatatgtataaatattctatttagtcatcctgatatgaggagccagtgttgcatgatgaaaagatggtatgattctacatatgtacccattgtcttgctgtttttgtactttcttttcaggtcatttacaattgggagatttcagaaacattcctttcaccatcatttagaaatggtttgccttaatggagacaatagcagatcctgtagtatttccagtagacatggccttttaatctaagggcttaagactgattagtcttagcatttactgtagttggaggatggagatgctatgatggaagcatacccagggtggcctttagcacagtatcagtaccatttatttgtctgccgcttttaaaaaatacccattggctatgccacttgaaaacaatttgagaagtttttttgaagtttttctcactaaaatatggggcaattgttagccttacatgttgtgtagacttactttaagtttgcacccttgaaatgtgtcatatcaatttctggattcataatagcaagattagcaaaggataaatgccgaaggtcacttcattctggacacagttggatcaatactgattaagtagaaaatccaagctttgcttgagaacttttgtaacgtggagagtaaaaagtatcggtttt

SEQ ID NO: 436601 - DNA, 3890 bp, Homo sapiens
gcttcggtgcagagctggagagccgcggctgggaccggagtggggagcgcggcgtggaggtgccacccggcgcgggtggcggagagatcagaagcctcttccccaagccgagccaacctcagcggggacccgggctcagggacgcggcggcggcggcggcgactgcagtggctggacgatggcagcgtccgccggagccggggcggtgattgcagccccagacagccggcgctggctgtggtcggtgctggcggcggcgcttgggctcttgacagctggagtatcagccttggaagtatatacgccaaaagaaatcttcgtggcaaatggtacacaagggaagctgacctgcaagttcaagtctactagtacgactggcgggttgacctcagtctcctggagcttccagccagagggggccgacactactgtgtcgtttttccactactcccaagggcaagtgtaccttgggaattatccaccatttaaagacagaatcagctgggctggagaccttgacaagaaagatgcatcaatcaacatagaaaatatgcagtttatacacaatggcacctatatctgtgatgtcaaaaaccctcctgacatcgttgtccagcctggacacattaggctctatgtcgtagaaaaagagaatttgcctgtgtttccagtttgggtagtggtgggcatagttactgctgtggtcctaggtctcactctgctcatcagcatgattctggctgtcctctatagaaggaaaaactctaaacgggattacactggctgcagtacatcagagagtttgtcaccagttaagcaggctcctcggaagtccccctccgacactgagggtcttgtaaagagtctgccttctggatctcaccagggcccagtcatatatgcacagttagaccactccggcggacatcacagtgacaagattaacaagtcagagtctgtggtgtatgcggatatccgaaagaattaagagaatacctagaacatatcctcagcaagaaacaaaaccaaactggactctcgtgcagaaaatgtagcccattaccacatgtagccttggagacccaggcaaggacaagtacacgtgtactcacagagggagagaaagatgtgtacaaaggatatgtataaatattctatttagtcatcctgatatgaggagccagtgttgcatgatgaaaagatggtatgattctacatatgtacccattgtcttgctgtttttgtactttcttttcaggtcatttacaattgggagatttcagaaacattcctttcaccatcatttagaaatggtttgccttaatggagacaatagcagatcctgtagtatttccagtagacatggccttttaatctaagggcttaagactgattagtcttagcatttactgtagttggaggatggagatgctatgatggaagcatacccagggtggcctttagcacagtatcagtaccatttatttgtctgccgcttttaaaaaatacccattggctatgccacttgaaaacaatttgagaagtttttttgaagtttttctcactaaaatatggggcaattgttagccttacatgttgtgtagacttactttaagtttgcacccttgaaatgtgtcatatcaatttctggattcataatagcaagattagcaaaggataaatgccgaaggtcacttcattctggacacagttggatcaatactgattaagtagaaaatccaagctttgcttgagaacttttgtaacgtggagagtaaaaagtatcggttttattctttgctgatgtcctttctgcttgaaataacagtcaccatacagctaaaggagaggagtttctttccttctaagtaggcagaaatggtatcattatgttgccgctctccaatctcccagagctcgctctctagagaatcaccttctttcgcttttttttttttttttgaggtagagtctcactatgttgcccagactagccttgaactcttgggctcaagtgattctccctcctcagcctcccgagtagctggaacgaactatagttgcaccactgcagctggcaagaatcaccttctttataaagcgtcagtcatgcttccagcaagaggcagcatcagtcatggctttataacagcttcatggtgcctcaaagactgttgaggttaatgagagcctagattagacagtttggctgtccttccctaaaacttgttttctcctattcactactccccaccgcacttaaaatctatgagtttttactttttactgggaatggaaagtgtggtgaagatcattcaacacttatgttgtcatttctcccattttctgaatttttttttaaatttccccccttttaaaattgttcgaaagcccacagttatggaaagaattactgtctagatggtctgcagaacgtgtttggggtgagtgggagtgaggggcaatgttactttttctccctgtagtttggagtccattatgagctgctgctttttcttctcatcttgtcatcttctggggatgtttgaaggctgagttccaacagaattcacaaagggaataaaacaggattgagattttgaggtgtgcacaaggtggtaagataaagggcatatgagcttcaaaactaatgctgttgcatacatgaagccttttgttttttgaggagctatttttgttattcttgtaacgctccaccttacatgccacgtctgtgtgagtcaacagggatcaggtttggtcaccacacatgtctgaagctgggcagcgtctgctctgtgttctgtgtggaatggagaaaaaaacgcctgccctgctgccttccatgttcataggcccagcccaagagagtgacacacagtgctggccctgagacatttccacaaagtggtcaactctgccttgcatcctaaaactttttgggcatctattttgaaaactataggagcctttggaaggcctcttatgtttggaggggaagggtgttgagattgtcaccatccttcaagctgagactcctggtgagcctttgccaccatgaaaaccacatagctgaccagggctgtgcttgaggtacagaggacacacatcgtagacaggcctgtgtcatgtttccttacagtcgttttttacagagaaaaggggcattgttttttcactgctttctcaacagttcctgtgaataaatgaaacatttcggagctccctgagagcaagagccttcacttcttcttgcggtgccgggaccatgtgttggtgaagctggtgctgtgggggccactcactcgaatgacacctggaggcctgttcctcccttaccactcccttccccagcccgacttcttggcctcctgcccaaccagacacctcaaactctgtcagtgccctggcattctggcagagaatcctcaccagttctcaccaaccttccccccaggcaagggcagctgccagcatggtgctctgccaggacaggtttccctgaaggaagctgctcacactgagatgagcctctcagggcaggacctcttcccaagccctgcacacccacccctgcagcccttttggctccccttttccctgtgcctcagcactcctttcctggttgcagataacgaactaaggttgcctaaagggcagatctgccctctccatgtcttcgtcctggcaaacagggtcgtcttaaaattatgcgctaattctgtatgggagcactcaaaaggcattacttagagattgaaatttcaaactatctctagtttttcaatggaaatatatcagctagggaaaaaccatcaagctcattattattttttgatcttcagttgtatttttgtgaatattttaatacatctttttcaatttctgaa

SEQ ID NO: 436602 - DNA, 3835 bp, Homo sapiens
gcttcggtgcagagctggagagccgcggctgggaccggagtggggagcgcggcgtggaggtgccacccggcgcgggtggcggagagatcagaagcctcttccccaagccgagccaacctcagcggggacccgggctcagggacgcggcggcggcggcggcgactgcagtggctggacgatggcagcgtccgccggagccggggcggtgattgcagccccagacagccggcgctggctgtggtcggtgctggcggcggcgcttgggctcttgacagctggagtatcagccttggaagtatatacgccaaaagaaatcttcgtggcaaatggtacacaagggaagctgacctgcaagttcaagtctactagtacgactggcgggttgacctcagtctcctggagcttccagccagagggggccgacactactgtgtcgtttttccactactcccaagggcaagtgtaccttgggaattatccaccatttaaagacagaatcagctgggctggagaccttgacaagaaagatgcatcaatcaacatagaaaatatgcagtttatacacaatggcacctatatctgtgatgtcaaaaaccctcctgacatcgttgtccagcctggacacattaggctctatgtcgtagaaaaagagaatttgcctgtgtttccagtttgggtagtggtgggcatagttactgctgtggtcctaggtctcactctgctcatcagcatgattctggctgtcctctatagaaggaaaaactctaaacgggattacactggctgcagtacatcagagagtttgtcaccagttaagcaggctcctcggaagtccccctccgacactgagggtcttgtaaagagtctgccttctggatctcaccagggcccagtcatatatgcacagttagaccactccggcggacatcacagtgacaagattaacaagtcagagtctgtggtgtatgcggatatccgaaagaattaagagaatacctagaacatatcctcagcaagaaacaaaaccaaactggactctcgtgcagaaaatgtagcccattaccacatgtagccttggagacccaggcaaggacaagtacacgtgtactcacagagggagagaaagatgtgtacaaaggatatgtataaatattctatttagtcatcctgatatgaggagccagtgttgcatgatgaaaagatggtatgattctacatatgtacccattgtcttgctgtttttgtactttcttttcaggtcatttacaattgggagatttcagaaacattcctttcaccatcatttagaaatggtttgccttaatggagacaatagcagatcctgtagtatttccagtagacatggccttttaatctaagggcttaagactgattagtcttagcatttactgtagttggaggatggagatgctatgatggaagcatacccagggtggcctttagcacagtatcagtaccatttatttgtctgccgcttttaaaaaatacccattggctatgccacttgaaaacaatttgagaagtttttttgaagtttttctcactaaaatatggggcaattgttagccttacatgttgtgtagacttactttaagtttgcacccttgaaatgtgtcatatcaatttctggattcataatagcaagattagcaaaggataaatgccgaaggtcacttcattctggacacagttggatcaatactgattaagtagaaaatccaagctttgcttgagaacttttgtaacgtggagagtaaaaagtatcggttttattctttgctgatgtcctttctgcttgaaataacagtcaccatacagctaaaggagaggagtttctttccttctaagtaggcagaaatggtatcattatgttgccgctctccaatctcccagagctcgctctctagagaatcaccttctttcgcttttttttttttttttgaggtagagtctcactatgttgcccagactagccttgaactcttgggctcaagtgattctccctcctcagcctcccgagtagctggaacgaactatagttgcaccactgcagctggcaagaatcaccttctttataaagcgtcagtcatgcttccagcaagaggcagcatcagtcatggctttataacagcttcatggtgcctcaaagactgttgaggttaatgagagcctagattagacagtttggctgtccttccctaaaacttgttttctcctattcactactccccaccgcacttaaaatctatgagtttttactttttactgggaatggaaagtgtggtgaagatcattcaacacttatgttgtcatttctcccattttctgaatttttttttaaatttccccccttttaaaattgttcgaaagcccacagttatggaaagaattactgtctagatggtctgcagaacgtgtttggggtgagtgggagtgaggggcaatgttactttttctccctgtagtttggagtccattatgagctgctgctttttcttctcatcttgtcatcttctggggatgtttgaaggctgagttccaacagaattcacaaagggaataaaacaggattgagattttgaggtgtgcacaaggtggtaagataaagggcatatgagcttcaaaactaatgctgttgcatacatgaagccttttgttttttgaggagctatttttgttattcttgtaacgctccaccttacatgccacgtctgtgtgagtcaacagggatcaggtttggtcaccacacatgtctgaagctgggcagcgtctgctctgtgttctgtgtggaatggagaaaaaaacgcctgccctgctgccttccatgttcataggcccagcccaagagagtgacacacagtgctggccctgagacatttccacaaagtggtcaactctgccttgcatcctaaaactttttgggcatctattttgaaaactataggagcctttggaaggcctcttatgtttggaggggaagggtgttgagattgtcaccatccttcaagctgagactcctggtgagcctttgccaccatgaaaaccacatagctgaccagggctgtgcttgaggtacagaggacacacatcgtagacaggcctgtgtcatgtttccttacagtcgttttttacagagaaattcggagctccctgagagcaagagccttcacttcttcttgcggtgccgggaccatgtgttggtgaagctggtgctgtgggggccactcactcgaatgacacctggaggcctgttcctcccttaccactcccttccccagcccgacttcttggcctcctgcccaaccagacacctcaaactctgtcagtgccctggcattctggcagagaatcctcaccagttctcaccaaccttccccccaggcaagggcagctgccagcatggtgctctgccaggacaggtttccctgaaggaagctgctcacactgagatgagcctctcagggcaggacctcttcccaagccctgcacacccacccctgcagcccttttggctccccttttccctgtgcctcagcactcctttcctggttgcagataacgaactaaggttgcctaaagggcagatctgccctctccatgtcttcgtcctggcaaacagggtcgtcttaaaattatgcgctaattctgtatgggagcactcaaaaggcattacttagagattgaaatttcaaactatctctagtttttcaatggaaatatatcagctagggaaaaaccatcaagctcattattattttttgatcttcagttgtatttttgtgaatattttaatacatctttttcaatttctgaa

SEQ ID NO: 436603 - DNA, 3841 bp, Homo sapiens
gcttcggtgcagagctggagagccgcggctgggaccggagtggggagcgcggcgtggaggtgccacccggcgcgggtggcggagagatcagaagcctcttccccaagccgagccaacctcagcggggacccgggctcagggacgcggcggcggcggcggcgactgcagtggctggacgatggcagcgtccgccggagccggggcggtgattgcagccccagacagccggcgctggctgtggtcggtgctggcggcggcgcttgggctcttgacagctggagtatcagccttggaagtatatacgccaaaagaaatcttcgtggcaaatggtacacaagggaagctgacctgcaagttcaagtctactagtacgactggcgggttgacctcagtctcctggagcttccagccagagggggccgacactactgtgtcgtttttccactactcccaagggcaagtgtaccttgggaattatccaccatttaaagacagaatcagctgggctggagaccttgacaagaaagatgcatcaatcaacatagaaaatatgcagtttatacacaatggcacctatatctgtgatgtcaaaaaccctcctgacatcgttgtccagcctggacacattaggctctatgtcgtagaaaaagagaatttgcctgtgtttccagtttgggtagtggtgggcatagttactgctgtggtcctaggtctcactctgctcatcagcatgattctggctgtcctctatagaaggaaaaactctaaacgggattacactggctgcagtacatcagagagtttgtcaccagttaagcaggctcctcggaagtccccctccgacactgagggtcttgtaaagagtctgccttctggatctcaccagggcccagtcatatatgcacagttagaccactccggcggacatcacagtgacaagattaacaagtcagagtctgtggtgtatgcggatatccgaaagaattaagagaatacctagaacatatcctcagcaagaaacaaaaccaaactggactctcgtgcagaaaatgtagcccattaccacatgtagccttggagacccaggcaaggacaagtacacgtgtactcacagagggagagaaagatgtgtacaaaggatatgtataaatattctatttagtcatcctgatatgaggagccagtgttgcatgatgaaaagatggtatgattctacatatgtacccattgtcttgctgtttttgtactttcttttcaggtcatttacaattgggagatttcagaaacattcctttcaccatcatttagaaatggtttgccttaatggagacaatagcagatcctgtagtatttccagtagacatggccttttaatctaagggcttaagactgattagtcttagcatttactgtagttggaggatggagatgctatgatggaagcatacccagggtggcctttagcacagtatcagtaccatttatttgtctgccgcttttaaaaaatacccattggctatgccacttgaaaacaatttgagaagtttttttgaagtttttctcactaaaatatggggcaattgttagccttacatgttgtgtagacttactttaagtttgcacccttgaaatgtgtcatatcaatttctggattcataatagcaagattagcaaaggataaatgccgaaggtcacttcattctggacacagttggatcaatactgattaagtagaaaatccaagctttgcttgagaacttttgtaacgtggagagtaaaaagtatcggttttattctttgctgatgtcctttctgcttgaaataacagtcaccatacagctaaaggagaggagtttctttccttctaagtaggcagaaatggtatcattatgttgccgctctccaatctcccagagctcgctctctagagaatcaccttctttcgcttttttttttttttttgaggtagagtctcactatgttgcccagactagccttgaactcttgggctcaagtgattctccctcctcagcctcccgagtagctggaacgaactatagttgcaccactgcagctggcaagaatcaccttctttataaagcgtcagtcatgcttccagcaagaggcagcatcagtcatggctttataacagcttcatggtgcctcaaagactgttgaggttaatgagagcctagattagacagtttggctgtccttccctaaaacttgttttctcctattcactactccccaccgcacttaaaatctatgagtttttactttttactgggaatggaaagtgtggtgaagatcattcaacacttatgttgtcatttctcccattttctgaatttttttttaaatttccccccttttaaaattgttcgaaagcccacagttatggaaagaattactgtctagatggtctgcagaacgtgtttggggtgagtgggagtgaggggcaatgttactttttctccctgtagtttggagtccattatgagctgctgctttttcttctcatcttgtcatcttctggggatgtttgaaggctgagttccaacagaattcacaaagggaataaaacaggattgagattttgaggtgtgcacaaggtggtaagataaagggcatatgagcttcaaaactaatgctgttgcatacatgaagccttttgttttttgaggagctatttttgttattcttgtaacgctccaccttacatgccacgtctgtgtgagtcaacagggatcaggtttggtcaccacacatgtctgaagctgggcagcgtctgctctgtgttctgtgtggaatggagaaaaaaacgcctgccctgctgccttccatgttcataggcccagcccaagagagtgacacacagtgctggccctgagacatttccacaaagtggtcaactctgccttgcatcctaaaactttttgggcatctattttgaaaactataggagcctttggaaggcctcttatgtttggaggggaagggtgttgagattgtcaccatccttcaagctgagactcctggtgagcctttgccaccatgaaaaccacatagctgaccagggctgtgcttgaggtacagaggacacacatcgtagacaggcctgtgtcatgtttccttacagtcgttttttacagagaaaaggggcattgttttttcactgctttctcaacagttcctgtgaataaatgaaacatttcggagctccctgagagcaagagccttcacttcttcttgcggtgccgggaccatgtgttggtgaagctggtgctgtgggggccactcactcgaatgacacctggaggcctgttcctcccttaccactcccttccccagcccgacttcttggcctcctgcccaaccagacacctcaaactctgtcagtgccctggcattctggcagagaatcctcaccagttctcaccaaccttccccccaggcaagggcagctgccagcatggtgctctgccaggacaggtttccctgaaggaagctgctcacactgagatgagcctctcagggcaggacctcttcccaagccctgcacacccacccctgcagcccttttggctccccttttccctgtgcctcagcactcctttcctggttgcagataacgaactaaggttgcctaaagggcagatctgccctctccatgtcttcgtcctggcaaacagggtccttagagattgaaatttcaaactatctctagtttttcaatggaaatatatcagctagggaaaaaccatcaagctcattattattttttgatcttcagttgtatttttgtgaatattttaatacatctttttcaatttctgaa

SEQ ID NO: 436604 - DNA, 3758 bp, Homo sapiens
gcttcggtgcagagctggagagccgcggctgggaccggagtggggagcgcggcgtggaggtgccacccggcgcgggtggcggagagatcagaagcctcttccccaagccgagccaacctcagcggggacccgggctcagggacgcggcggcggcggcggcgactgcagtggctggacgatggcagcgtccgccggagccggggcggtgattgcagccccagacagccggcgctggctgtggtcggtgctggcggcggcgcttgggctcttgacagctggagtatcagccttggaagtatatacgccaaaagaaatcttcgtggcaaatggtacacaagggaagctgacctgcaagttcaagtctactagtacgactggcgggttgacctcagtctcctggagcttccagccagagggggccgacactactgtgtcgtttttccactactcccaagggcaagtgtaccttgggaattatccaccatttaaagacagaatcagctgggctggagaccttgacaagaaagatgcatcaatcaacatagaaaatatgcagtttatacacaatggcacctatatctgtgatgtcaaaaaccctcctgacatcgttgtccagcctggacacattaggctctatgtcgtagaaaaagagaatttgcctgtgtttccagtttgggtagtggtgggcatagttactgctgtggtcctaggtctcactctgctcatcagcatgattctggctgtcctctatagaaggaaaaactctaaacgggattacactggctgcagtacatcagagagtttgtcaccagttaagcaggctcctcggaagtccccctccgacactgagggtcttgtaaagagtctgccttctggatctcaccagggcccagtcatatatgcacagttagaccactccggcggacatcacagtgacaagattaacaagtcagagtctgtggtgtatgcggatatccgaaagaattaagagaatacctagaacatatcctcagcaagaaacaaaaccaaactggactctcgtgcagaaaatgtagcccattaccacatgtagccttggagacccaggcaaggacaagtacacgtgtactcacagagggagagaaagatgtgtacaaaggatatgtataaatattctatttagtcatcctgatatgaggagccagtgttgcatgatgaaaagatggtatgattctacatatgtacccattgtcttgctgtttttgtactttcttttcaggtcatttacaattgggagatttcagaaacattcctttcaccatcatttagaaatggtttgccttaatggagacaatagcagatcctgtagtatttccagtagacatggccttttaatctaagggcttaagactgattagtcttagcatttactgtagttggaggatggagatgctatgatggaagcatacccagggtggcctttagcacagtatcagtaccatttatttgtctgccgcttttaaaaaatacccattggctatgccacttgaaaacaatttgagaagtttttttgaagtttttctcactaaaatatggggcaattgttagccttacatgttgtgtagacttactttaagtttgcacccttgaaatgtgtcatatcaatttctggattcataatagcaagattagcaaaggataaatgccgaaggtcacttcattctggacacagttggatcaatactgattaagtagaaaatccaagctttgcttgagaacttttgtaacgtggagagtaaaaagtatcggttttattctttgctgatgtcctttctgcttgaaataacagtcaccatacagctaaaggagaggagtttctttccttctaagtaggcagaaatggtatcattatgttgccgctctccaatctcccagagctcgctctctagagaatcaccttctttcgcttttttttttttttttgaggtagagtctcactatgttgcccagactagccttgaactcttgggctcaagtgattctccctcctcagcctcccgagtagctggaacgaactatagttgcaccactgcagctggcaagaatcaccttctttataaagcgtcagtcatgcttccagcaagaggcagcatcagtcatggctttataacagcttcatggtgcctcaaagactgttgaggttaatgagagcctagattagacagtttggctgtccttccctaaaacttgttttctcctattcactactccccaccgcacttaaaatctatgagtttttactttttactgggaatggaaagtgtggtgaagatcattcaacacttatgttgtcatttctcccattttctgaatttttttttaaatttccccccttttaaaattgttcgaaagcccacagttatggaaagaattactgtctagatggtctgcagaacgtgtttggggtgagtgggagtgaggggcaatgttactttttctccctgtagtttggagtccattatgagctgctgctttttcttctcatcttgtcatcttctggggatgtttgaaggctgagttccaacagaattcacaaagggaataaaacaggattgagattttgaggtgtgcacaaggtggtaagataaagggcatatgagcttcaaaactaatgctgttgcatacatgaagccttttgttttttgaggagctatttttgttattcttgtaacgctccaccttacatgccacgtctgtgtgagtcaacagggatcaggtttggtcaccacacatgtctgaagctgggcagcgtctgctctgtgttctgtgtggaatggagaaaaaaacgcctgccctgctgccttccatgttcataggcccagcccaagagagtgacacacagtgctggccctgagacatttccacaaagtggtcaactctgccttgcatcctaaaactttttgggcatctattttgaaaactataggagcctttggaaggcctcttatgtttggaggggaagggtgttgagattgtcaccatccttcaagctgagactcctggtgagcctttgccaccatgaaaaccacatagctgaccagggctgtgcttgaggtacagaggacacacatcgtagacaggcctgtgtcatgtttccttacagtcgttttttacagagaaaaggggcattgttttttcactgctttctcaacagttcctgtgaataaatgaaacatttcggagctccctgagagcaagagccttcacttcttcttgcggtgccgggaccatgtgttggtgaagctggtgctgtgggggccactcactcgaatgacacctggaggcctgttcctcccttaccactcccttccccagcccgacttcttggcctcctgcccaaccagacacctcaaactctgtcagtgccctggcattctggcagagaatcctcaccagttctcaccaaccttccccccaggcaagggcagctgccagcatggcactcctttcctggttgcagataacgaactaaggttgcctaaagggcagatctgccctctccatgtcttcgtcctggcaaacagggtcgtcttaaaattatgcgctaattctgtatgggagcactcaaaaggcattacttagagattgaaatttcaaactatctctagtttttcaatggaaatatatcagctagggaaaaaccatcaagctcattattattttttgatcttcagttgtatttttgtgaatattttaatacatctttttcaatttctgaa

SEQ ID NO: 436605 - DNA, 3667 bp, Homo sapiens
gcttcggtgcagagctggagagccgcggctgggaccggagtggggagcgcggcgtggaggtgccacccggcgcgggtggcggagagatcagaagcctcttccccaagccgagccaacctcagcggggacccgggctcagggacgcggcggcggcggcggcgactgcagtggctggacgatggcagcgtccgccggagccggggcggtgattgcagccccagacagccggcgctggctgtggtcggtgctggcggcggcgcttgggctcttgacagctggagtatcagccttggaagtatatacgccaaaagaaatcttcgtggcaaatggtacacaagggaagctgacctgcaagttcaagtctactagtacgactggcgggttgacctcagtctcctggagcttccagccagagggggccgacactactgtgtcgtttttccactactcccaagggcaagtgtaccttgggaattatccaccatttaaagacagaatcagctgggctggagaccttgacaagaaagatgcatcaatcaacatagaaaatatgcagtttatacacaatggcacctatatctgtgatgtcaaaaaccctcctgacatcgttgtccagcctggacacattaggctctatgtcgtagaaaaagagaatttgcctgtgtttccagtttgggtagtggtgggcatagttactgctgtggtcctaggtctcactctgctcatcagcatgattctggctgtcctctatagaaggaaaaactctaaacgggattacactggctgcagtacatcagagagtttgtcaccagttaagcaggctcctcggaagtccccctccgacactgagggtcttgtaaagagtctgccttctggatctcaccagggcccagtcatatatgcacagttagaccactccggcggacatcacagtgacaagattaacaagtcagagtctgtggtgtatgcggatatccgaaagaattaagagaatacctagaacatatcctcagcaagaaacaaaaccaaactggactctcgtgcagaaaatgtagcccattaccacatgtagccttggagacccaggcaaggacaagtacacgtgtactcacagagggagagaaagatgtgtacaaaggatatgtataaatattctatttagtcatcctgatatgaggagccagtgttgcatgatgaaaagatggtatgattctacatatgtacccattgtcttgctgtttttgtactttcttttcaggtcatttacaattgggagatttcagaaacattcctttcaccatcatttagaaatggtttgccttaatggagacaatagcagatcctgtagtatttccagtagacatggccttttaatctaagggcttaagactgattagtcttagcatttactgtagttggaggatggagatgctatgatggaagcatacccagggtggcctttagcacagtatcagtaccatttatttgtctgccgcttttaaaaaatacccattggctatgccacttgaaaacaatttgagaagtttttttgaagtttttctcactaaaatatggggcaattgttagccttacatgttgtgtagacttactttaagtttgcacccttgaaatgtgtcatatcaatttctggattcataatagcaagattagcaaaggataaatgccgaaggtcacttcattctggacacagttggatcaatactgattaagtagaaaatccaagctttgcttgagaacttttgtaacgtggagagtaaaaagtatcggttttattctttgctgatgtcctttctgcttgaaataacagtcaccatacagctaaaggagaggagtttctttccttctaagtaggcagaaatggtatcattatgttgccgctctccaatctcccagagctcgctctctagagaatcaccttctttcgcttttttttttttttttgaggtagagtctcactatgttgcccagactagccttgaactcttgggctcaagtgattctccctcctcagcctcccgagtagctggaacgaactatagttgcaccactgcagctggcaagaatcaccttctttataaagcgtcagtcatgcttccagcaagaggcagcatcagtcatggctttataacagcttcatggtgcctcaaagactgttgaggttaatgagagcctagattagacagtttggctgtccttccctaaaacttgttttctcctattcactactccccaccgcacttaaaatctatgagtttttactttttactgggaatggaaagtgtggtgaagatcattcaacacttatgttgtcatttctcccattttctgaatttttttttaaatttccccccttttaaaattgttcgaaagcccacagttatggaaagaattactgtctagatggtctgcagaacgtgtttggggtgagtgggagtgaggggcaatgttactttttctccctgtagtttggagtccattatgagctgctgctttttcttctcatcttgtcatcttctggggatgtttgaaggctgagttccaacagaattcacaaagggaataaaacaggattgagattttgaggtgtgcacaaggtggtaagataaagggcatatgagcttcaaaactaatgctgttgcatacatgaagccttttgttttttgaggagctatttttgttattcttgtaacgctccaccttacatgccacgtctgtgtgagtcaacagggatcaggtttggtcaccacacatgtctgaagctgggcagcgtctgctctgtgttctgtgtggaatggagaaaaaaacgcctgccctgctgccttccatgttcataggcccagcccaagagagtgacacacagtgctggccctgagacatttccacaaagtggtcaactctgccttgcatcctaaaactttttgggcatctattttgaaaactataggagcctttggaaggcctcttatgtttggaggggaagggtgttgagattgtcaccatccttcaagctgagactcctggtgagcctttgccaccatgaaaaccacatagctgaccagggctgtgcttgaggtacagaggacacacatcgtagacaggcctgtgtcatgtttccttacagtcgttttttacagagaaaaggggcattgttttttcactgctttctcaacagttcctgtgaataaatgaaacatttcggagctccctgagagcaagagccttcacttcttcttgcggtgccgggaccatgtgttggtgaagctggtgctgtgggggccactcactcgaatgacacctggaggcctgttcctcccttaccactcccttccccagcccgacttcttggcctcctgcccaaccagacacgcactcctttcctggttgcagataacgaactaaggttgcctaaagggcagatctgccctctccatgtcttcgtcctggcaaacagggtcgtcttaaaattatgcgctaattctgtatgggagcactcaaaaggcattacttagagattgaaatttcaaactatctctagtttttcaatggaaatatatcagctagggaaaaaccatcaagctcattattattttttgatcttcagttgtatttttgtgaatattttaatacatctttttcaatttctgaa

SEQ ID NO: 436606 - DNA, 3353 bp, Homo sapiens
  misc_feature (3242)..(3242): n is a, c, g, or t
  misc_feature (3247)..(3247): n is a, c, g, or t
  misc_feature (3251)..(3251): n is a, c, g, or t
  misc_feature (3255)..(3255): n is a, c, g, or t
gcttcggtgcagagctggagagccgcggctgggaccggagtggggagcgcggcgtggaggtgccacccggcgcgggtggcggagagatcagaagcctcttccccaagccgagccaacctcagcggggacccgggctcagggacgcggcggcggcggcggcgactgcagtggctggacgatggcagcgtccgccggagccggggcggtgattgcagccccagacagccggcgctggctgtggtcggtgctggcggcggcgcttgggctcttgacagctggagtatcagccttggaagtatatacgccaaaagaaatcttcgtggcaaatggtacacaagggaagctgacctgcaagttcaagtctactagtacgactggcgggttgacctcagtctcctggagcttccagccagagggggccgacactactgtgtcgtttttccactactcccaagggcaagtgtaccttgggaattatccaccatttaaagacagaatcagctgggctggagaccttgacaagaaagatgcatcaatcaacatagaaaatatgcagtttatacacaatggcacctatatctgtgatgtcaaaaaccctcctgacatcgttgtccagcctggacacattaggctctatgtcgtagaaaaagagaatttgcctgtgtttccagtttgggtagtggtgggcatagttactgctgtggtcctaggtctcactctgctcatcagcatgattctggctgtcctctatagaaggaaaaactctaaacgggattacactggctgcagtacatcagagagtttgtcaccagttaagcaggctcctcggaagtccccctccgacactgagggtcttgtaaagagtctgccttctggatctcaccagggcccagtcatatatgcacagttagaccactccggcggacatcacagtgacaagattaacaagtcagagtctgtggtgtatgcggatatccgaaagaattaagagaatacctagaacatatcctcagcaagaaacaaaaccaaactggactctcgtgcagaaaatgtagcccattaccacatgtagccttggagacccaggcaaggacaagtacacgtgtactcacagagggagagaaagatgtgtacaaaggatatgtataaatattctatttagtcatcctgatatgaggagccagtgttgcatgatgaaaagatggtatgattctacatatgtacccattgtcttgctgtttttgtactttcttttcaggtcatttacaattgggagatttcagaaacattcctttcaccatcatttagaaatggtttgccttaatggagacaatagcagatcctgtagtatttccagtagacatggccttttaatctaagggcttaagactgattagtcttagcatttactgtagttggaggatggagatgctatgatggaagcatacccagggtggcctttagcacagtatcagtaccatttatttgtctgccgcttttaaaaaatacccattggctatgccacttgaaaacaatttgagaagtttttttgaagtttttctcactaaaatatggggcaattgttagccttacatgttgtgtagacttactttaagtttgcacccttgaaatgtgtcatatcaatttctggattcataatagcaagattagcaaaggataaatgccgaaggtcacttcattctggacacagttggatcaatactgattaagtagaaaatccaagctttgcttgagaacttttgtaacgtggagagtaaaaagtatcggttttattctttgctgatgtcctttctgcttgaaataacagtcaccatacagctaaaggagaggagtttctttccttctaagtaggcagaaatggtatcattatgttgccgctctccaatctcccagagctcgctctctagagaatcaccttctttcgcttttttttttttttttgaggtagagtctcactatgttgcccagactagccttgaactcttgggctcaagtgattctccctcctcagcctcccgagtagctggaacgaactatagttgcaccactgcagctggcaagaatcaccttctttataaagcgtcagtcatgcttccagcaagaggcagcatcagtcatggctttataacagcttcatggtgcctcaaagactgttgaggttaatgagagcctagattagacagtttggctgtccttccctaaaacttgttttctcctattcactactccccaccgcacttaaaatctatgagtttttactttttactgggaatggaaagtgtggtgaagatcattcaacacttatgttgtcatttctcccattttctgaatttttttttaaatttccccccttttaaaattgttcgaaagcccacagttatggaaagaattactgtctagatggtctgcagaacgtgtttggggtgagtgggagtgaggggcaatgttactttttctccctgtagtttggagtccattatgagctgctgctttttcttctcatcttgtcatcttctggggatgtttgaaggctgagttccaacagaattcacaaagggaataaaacaggattgagattttgaggtgtgcacaaggtggtaagataaagggcatatgagcttcaaaactaatgctgttgcatacatgaagccttttgttttttgaggagctatttttgttattcttgtaacgctccaccttacatgccacgtctgtgtgagtcaacagggatcaggtttggtcaccacacatgtctgaagctgggcagcgtctgctctgtgttctgtgtggaatggagaaaaaaacgcctgccctgctgccttccatgttcataggcccagcccaagagagtgacacacagtgctggccctgagacatttccacaaagtggtcaactctgccttgcatcctaaaactttttgggcatctattttgaaaactataggagcctttggaaggcctcttatgtttggaggggaagggtgttgagattgtcaccatccttcaagctgagactcctggtgagcctttgccaccatgaaaaccacatagctgaccagggctgtgcttgaggtacagaggacacacatcgtagacaggcctgtgtcatgtttccttacagtcgttttttacagagaaaaggggcattgttttttcactgctttctcaacagttcctgtgaataaatgaaacatttcggagctccctgtaaaaaaaaaaanaaaanaaanaaanaaagaagaagaaaaagcagtggttttaataaactacctcccccagcccagtgtgatgatggtgcagggcttttcctttttgtagttcctactaccagc

SEQ ID NO: 436607 - DNA, 4146 bp, Homo sapiens
atggtggagacgtcactattcacctttgtcaaaatccataagatctacaacactaacacaaatcctaatgtaaactatggactgtggttaacaatgatgtaaccatattggctcatcaattaaaacaaacgtataacactaatgccagatgttaataataggagaaacaggttggccatgggagagtgagggaatatgagaattctaccttctattcaatgtttctgtaaacctgaaactgctctttaaaaagtctattagtttaaaaaaaaaattcaatataaccagactaataaaaatatcttaactaaaaagcaatacaaacctaaactgtcagcaattattctgtttatagtgctattctgattgaacttagctgtagaatattctgccagaaatatgtaatggcagtgaattactgtatatatctagtaactttgctgtatcttttcttgtctggcaaaaatgcacagtggtattcatgttaagtcctactttcaactacccttattcctttctcttcagtgacagctggagtatcagccttggaagtatatacgccaaaagaaatcttcgtggcaaatggtacacaagggaagctgacctgcaagttcaagtctactagtacgactggcgggttgacctcagtctcctggagcttccagccagagggggccgacactactgtgtcgtttttccactactcccaagggcaagtgtaccttgggaattatccaccatttaaagacagaatcagctgggctggagaccttgacaagaaagatgcatcaatcaacatagaaaatatgcagtttatacacaatggcacctatatctgtgatgtcaaaaaccctcctgacatcgttgtccagcctggacacattaggctctatgtcgtagaaaaagagaatttgcctgtgtttccagtttgggtagtggtgggcatagttactgctgtggtcctaggtctcactctgctcatcagcatgattctggctgtcctctatagaaggaaaaactctaaacgggattacactggctgcagtacatcagagagtttgtcaccagttaagcaggctcctcggaagtccccctccgacactgagggtcttgtaaagagtctgccttctggatctcaccagggcccagtcatatatgcacagttagaccactccggcggacatcacagtgacaagattaacaagtcagagtctgtggtgtatgcggatatccgaaagaattaagagaatacctagaacatatcctcagcaagaaacaaaaccaaactggactctcgtgcagaaaatgtagcccattaccacatgtagccttggagacccaggcaaggacaagtacacgtgtactcacagagggagagaaagatgtgtacaaaggatatgtataaatattctatttagtcatcctgatatgaggagccagtgttgcatgatgaaaagatggtatgattctacatatgtacccattgtcttgctgtttttgtactttcttttcaggtcatttacaattgggagatttcagaaacattcctttcaccatcatttagaaatggtttgccttaatggagacaatagcagatcctgtagtatttccagtagacatggccttttaatctaagggcttaagactgattagtcttagcatttactgtagttggaggatggagatgctatgatggaagcatacccagggtggcctttagcacagtatcagtaccatttatttgtctgccgcttttaaaaaatacccattggctatgccacttgaaaacaatttgagaagtttttttgaagtttttctcactaaaatatggggcaattgttagccttacatgttgtgtagacttactttaagtttgcacccttgaaatgtgtcatatcaatttctggattcataatagcaagattagcaaaggataaatgccgaaggtcacttcattctggacacagttggatcaatactgattaagtagaaaatccaagctttgcttgagaacttttgtaacgtggagagtaaaaagtatcggttttattctttgctgatgtcctttctgcttgaaataacagtcaccatacagctaaaggagaggagtttctttccttctaagtaggcagaaatggtatcattatgttgccgctctccaatctcccagagctcgctctctagagaatcaccttctttcgcttttttttttttttttgaggtagagtctcactatgttgcccagactagccttgaactcttgggctcaagtgattctccctcctcagcctcccgagtagctggaacgaactatagttgcaccactgcagctggcaagaatcaccttctttataaagcgtcagtcatgcttccagcaagaggcagcatcagtcatggctttataacagcttcatggtgcctcaaagactgttgaggttaatgagagcctagattagacagtttggctgtccttccctaaaacttgttttctcctattcactactccccaccgcacttaaaatctatgagtttttactttttactgggaatggaaagtgtggtgaagatcattcaacacttatgttgtcatttctcccattttctgaatttttttttaaatttccccccttttaaaattgttcgaaagcccacagttatggaaagaattactgtctagatggtctgcagaacgtgtttggggtgagtgggagtgaggggcaatgttactttttctccctgtagtttggagtccattatgagctgctgctttttcttctcatcttgtcatcttctggggatgtttgaaggctgagttccaacagaattcacaaagggaataaaacaggattgagattttgaggtgtgcacaaggtggtaagataaagggcatatgagcttcaaaactaatgctgttgcatacatgaagccttttgttttttgaggagctatttttgttattcttgtaacgctccaccttacatgccacgtctgtgtgagtcaacagggatcaggtttggtcaccacacatgtctgaagctgggcagcgtctgctctgtgttctgtgtggaatggagaaaaaaacgcctgccctgctgccttccatgttcataggcccagcccaagagagtgacacacagtgctggccctgagacatttccacaaagtggtcaactctgccttgcatcctaaaactttttgggcatctattttgaaaactataggagcctttggaaggcctcttatgtttggaggggaagggtgttgagattgtcaccatccttcaagctgagactcctggtgagcctttgccaccatgaaaaccacatagctgaccagggctgtgcttgaggtacagaggacacacatcgtagacaggcctgtgtcatgtttccttacagtcgttttttacagagaaaaggggcattgttttttcactgctttctcaacagttcctgtgaataaatgaaacatttcggagctccctgagagcaagagccttcacttcttcttgcggtgccgggaccatgtgttggtgaagctggtgctgtgggggccactcactcgaatgacacctggaggcctgttcctcccttaccactcccttccccagcccgacttcttggcctcctgcccaaccagacacctcaaactctgtcagtgccctggcattctggcagagaatcctcaccagttctcaccaaccttccccccaggcaagggcagctgccagcatggtgctctgccaggacaggtttccctgaaggaagctgctcacactgagatgagcctctcagggcaggacctcttcccaagccctgcacacccacccctgcagcccttttggctccccttttccctgtgcctcagcactcctttcctggttgcagataacgaactaaggttgcctaaagggcagatctgccctctccatgtcttcgtcctggcaaacagggtcgtcttaaaattatgcgctaattctgtatgggagcactcaaaaggcattacttagagattgaaatttcaaactatctctagtttttcaatggaaatatatcagctagggaaaaaccatcaagctcattattattttttgatcttcagttgtatttttgtgaatattttaatacatctttttcaatttctgaa

SEQ ID NO: 436608 - DNA, 3780 bp, Homo sapiens
cagtcccagcccaagggtagctggaggcgcgcaggccggctccgctccggccccggacgatgcggcgcgcccaggatgctgccgtgcctcgtagtgctgctggcggcgctcctcagcctccgtcttggctcagacgctcatggctcacctgttgtggaagtggaagaggctgaaattgacaggaactgacggattgggaaggatagagaagtatgcgcaaggccaaacccccaacccgcaaacctcatcatccacccacttctagatgagccggacagagctgcccagccctccgtctgtgtggtttgaagcagaatttttccaccacatcctccactggacacccatcccaaatcagtctgaaagtacctgctatgaagtggcgctcctgaggtatggaatagagtcctggaactccatctccaactgtagccagaccctgtcctatgaccttaccgcagtgaccttggacctgtaccacagcaatggctaccgggccagagtgcgggctgtggacggcagccggcactccaactggaccgtcaccaacacccgcttctctgtggatgaagtgactctgacagttggcagtgtgaacctagagatccacaatggcttcatcctcgggaagattcagctacccaggcccaagatggcccccgcgaatgacacatatgaaagcatcttcagtcacttccgagagtatgagattgccattcgcaaggtgccgggaaacttcacgttcacacacaagaaagtaaaacatgaaaacttcagcctcctaacctctggagaagtgggagagttctgtgtccaggtgaaaccatctgtcgcttcccgaagtaacaaggggatgtggtctaaagaggagtgcatctccctcaccaggcagtatttcaccgtgaccaacgtcatcatcttctttgcctttgtcctgctgctctccggagccctcgcctactgcctggccctccagctgtatgtgcggcgccgaaagaagctacccagtgtcctgctcttcaagaagcccagccccttcatcttcatcagccagcgtccctccccagagacccaagacaccatccacccgcttgatgaggaggcctttttgaaggtgtccccagagctgaagaacttggacctgcacggcagcacagacagtggctttggcagcaccaagccatccctgcagactgaagagccccagttcctcctccctgaccctcacccccaggctgacagaacgctgggaaacggggagccccctgtgctgggggacagctgcagtagtggcagcagcaatagcacagacagcgggatctgcctgcaggagcccagcctgagccccagcacagggcccacctgggagcaacaggtggggagcaacagcaggggccaggatgacagtggcattgacttagttcaaaactctgagggccgggctggggacacacagggtggctcggccttgggccaccacagtcccccggagcctgaggtgcctggggaagaagacccagctgctgtggcattccagggttacctgaggcagaccagatgtgctgaagagaaggcaaccaagacaggctgcctggaggaagaatcgcccttgacagatggccttggccccaaattcgggagatgcctggttgatgaggcaggcttgcatccaccagccctggccaagggctatttgaaacaggatcctctagaaatgactctggcttcctcaggggccccaacgggacagtggaaccagcccactgaggaatggtcactcctggccttgagcagctgcagtgacctgggaatatctgactggagctttgcccatgaccttgcccctctaggctgtgtggcagccccaggtggtctcctgggcagctttaactcagacctggtcaccctgcccctcatctctagcctgcagtcaagtgagtgactcgggctgagaggctgcttttgattttagccatgcctgctcctctgcctggaccaggaggagggcccctggggcagaagttaggcacgaggcagtctgggcacttttctgcaagtccactggggctggccccagccaggccctgcagggctggtcagggtgtctggggcaggaggaggccaactcactgaactagtgcagggtatgtgggtggcactgacctgttctgttgactggggccctgcagactctggcagagctgagaagggcagggaccttctccctcctaggaactctttcctgtatcataaaggattatttgctcaggggaaccatggggctttctggagttgtggtgaggccaccaggctgaagtcagctcagacccagacctccctgcttaggccactcgagcatcagagcttccagcaggaggaagggctgtaggaatggaagcttcagggccttgctgctggggtcatttttaggggaaaaaggaggatatgatggtcacatggggaacctcccctcatcgggcctctggggcaggaagcttgtcactggaagatcttaaggtatatattttctggacactcaaacacatcataatggattcactgaggggagacaaagggagccgagaccctggatggggcttccagctcagaacccatccctctggtgggtacctctggcacccatctgcaaatatctccctctctccaacaaatggagtagcatccccctggggcacttgctgaggccaagccactcacatcctcactttgctgccccaccatcttgctgacaacttccagagaagccatggttttttgtattggtcataactcagccctttgggcggcctctgggcttgggcaccagctcatgccagccccagagggtcagggttggaggcctgtgcttgtgtttgctgctaatgtccagctacagacccagaggataagccactgggcactgggctggggtccctgccttgttggtgttcagctgtgtgattttggactagccacttgtcagagggcctcaatctcccatctgtgaaataaggactccacctttaggggaccctccatgtttgctgggtattagccaagctggtcctgggagaatgcagatactgtccgtggactaccaagctggcttgtttcttatgccagaggctaacagatccaatgggagtccatggtgtcatgccaagacagtatcagacacagccccagaagggggcattatgggccctgcctccccataggccatttggactctgccttcaaacaaaggcagttcagtccacaggcatggaagctgtgaggggacaggcctgtgcgtgccatccagagtcatctcagccctgcctttctctggagcattctgaaaacagatattctggcccagggaatccagccatgacccccacccctctgccaaagtactcttaggtgccagtctggtaactgaactccctctggaggcaggcttgagggaggattcctcagggttcccttgaaagctttatttatttattttgttcatttatttattggagaggcagcattgcacagtgaaagaattctggatatctcaggagccccgaaattctagctctgactttgctgtttccagtggtatgaccttggagaagtcacttatcctcttggagcctcagtttcctcatctgcagaataatgactgacttgtctaattcgtagggatgtgaggttctgctgaggaaatgggtatgaatgtgccttgaacacaaagctctgtcaataagtgatacatgttttttattccaataaattgtcaagaccaca

SEQ ID NO: 436609 - DNA, 3033 bp, Homo sapiens
tagagttgtggcctgtagtttgccttgggccactcactgaatggttcctgacagtgggcaatggatttcatgggaccagagtcctatgtccagaatcaccgtgccccatggtgacaggccacaaacacatctctctgggcctgcagatttcaccgtgaccaacgtcatcatcttctttgcctttgtcctgctgctctccggagccctcgcctactgcctggccctccagctgtatgtgcggcgccgaaagaagctacccagtgtcctgctcttcaagaagcccagccccttcatcttcatcagccagcgtccctccccagagacccaagacaccatccacccgcttgatgaggaggcctttttgaaggtgtccccagagctgaagaacttggacctgcacggcagcacagacagtggctttggcagcaccaagccatccctgcagactgaagagccccagttcctcctccctgaccctcacccccaggctgacagaacgctgggaaacggggagccccctgtgctgggggacagctgcagtagtggcagcagcaatagcacagacagcgggatctgcctgcaggagcccagcctgagccccagcacagggcccacctgggagcaacaggtggggagcaacagcaggggccaggatgacagtggcattgacttagttcaaaactctgagggccgggctggggacacacagggtggctcggccttgggccaccacagtcccccggagcctgaggtgcctggggaagaagacccagctgctgtggcattccagggttacctgaggcagaccagatgtgctgaagagaaggcaaccaagacaggctgcctggaggaagaatcgcccttgacagatggccttggccccaaattcgggagatgcctggttgatgaggcaggcttgcatccaccagccctggccaagggctatttgaaacaggatcctctagaaatgactctggcttcctcaggggccccaacgggacagtggaaccagcccactgaggaatggtcactcctggccttgagcagctgcagtgacctgggaatatctgactggagctttgcccatgaccttgcccctctaggctgtgtggcagccccaggtggtctcctgggcagctttaactcagacctggtcaccctgcccctcatctctagcctgcagtcaagtgagtgactcgggctgagaggctgcttttgattttagccatgcctgctcctctgcctggaccaggaggagggcccctggggcagaagttaggcacgaggcagtctgggcacttttctgcaagtccactggggctggccccagccaggccctgcagggctggtcagggtgtctggggcaggaggaggccaactcactgaactagtgcagggtatgtgggtggcactgacctgttctgttgactggggccctgcagactctggcagagctgagaagggcagggaccttctccctcctaggaactctttcctgtatcataaaggattatttgctcaggggaaccatggggctttctggagttgtggtgaggccaccaggctgaagtcagctcagacccagacctccctgcttaggccactcgagcatcagagcttccagcaggaggaagggctgtaggaatggaagcttcagggccttgctgctggggtcatttttaggggaaaaaggaggatatgatggtcacatggggaacctcccctcatcgggcctctggggcaggaagcttgtcactggaagatcttaaggtatatattttctggacactcaaacacatcataatggattcactgaggggagacaaagggagccgagaccctggatggggcttccagctcagaacccatccctctggtgggtacctctggcacccatctgcaaatatctccctctctccaacaaatggagtagcatccccctggggcacttgctgaggccaagccactcacatcctcactttgctgccccaccatcttgctgacaacttccagagaagccatggttttttgtattggtcataactcagccctttgggcggcctctgggcttgggcaccagctcatgccagccccagagggtcagggttggaggcctgtgcttgtgtttgctgctaatgtccagctacagacccagaggataagccactgggcactgggctggggtccctgccttgttggtgttcagctgtgtgattttggactagccacttgtcagagggcctcaatctcccatctgtgaaataaggactccacctttaggggaccctccatgtttgctgggtattagccaagctggtcctgggagaatgcagatactgtccgtggactaccaagctggcttgtttcttatgccagaggctaacagatccaatgggagtccatggtgtcatgccaagacagtatcagacacagccccagaagggggcattatgggccctgcctccccataggccatttggactctgccttcaaacaaaggcagttcagtccacaggcatggaagctgtgaggggacaggcctgtgcgtgccatccagagtcatctcagccctgcctttctctggagcattctgaaaacagatattctggcccagggaatccagccatgacccccacccctctgccaaagtactcttaggtgccagtctggtaactgaactccctctggaggcaggcttgagggaggattcctcagggttcccttgaaagctttatttatttattttgttcatttatttattggagaggcagcattgcacagtgaaagaattctggatatctcaggagccccgaaattctagctctgactttgctgtttccagtggtatgaccttggagaagtcacttatcctcttggagcctcagtttcctcatctgcagaataatgactgacttgtctaattcgtagggatgtgaggttctgctgaggaaatgggtatgaatgtgccttgaacacaaagctctgtcaataagtgatacatgttttttattccaataaattgtcaagaccaca

SEQ ID NO: 436610 - DNA, 501 bp, Homo sapiens
atccacaatggcttcatcctcgggaagattcagctacccaggcccaagatggcccccgcgaatgacacatatgaaagcatcttcagtcacttccgagagtatgagattgccattcgcaaggtgccgggaaacttcacggtatggggttccccaaggccccagggccagaactcccttggcttccctgtcccctgggctggaagcacccttgtgtgccattgggaactttgcttatggactaaagggagggtctgggatggtgggtgggcagaggagggagtagaaaccacctcagccctcagagctatgctcttgtgagatgctcctcaaaggaattgcctactagggcaattgggcaccccagagcccttgtagatgaagcaataaggctctgagaggctgtgtaacctaccagagggcgcccctgttatgggagagctggcatctgcaaaatccaccctctctcctctccaccactgttgattccagccccttctggga

SEQ ID NO: 436611 - DNA, 3650 bp, Homo sapiens
cagtcccagcccaagggtagctggaggcgcgcaggccggctccgctccggccccggacgatgcggcgcgcccaggatgctgccgtgcctcgtagtgctgctggcggcgctcctcagcctccgtcttggctcagacgctcatgggacagagctgcccagccctccgtctgtgtggtttgaagcagaatttttccaccacatcctccactggacacccatcccaaatcagtctgaaagtacctgctatgaagtggcgctcctgaggtatggaatagagtcctggaactccatctccaactgtagccagaccctgtcctatgaccttaccgcagtgaccttggacctgtaccacagcaatggctaccgggccagagtgcgggctgtggacggcagccggcactccaactggaccgtcaccaacacccgcttctctgtggatgaagtgactctgacagttggcagtgtgaacctagagatccacaatggcttcatcctcgggaagattcagctacccaggcccaagatggcccccgcgaatgacacatatgaaagcatcttcagtcacttccgagagtatgagattgccattcgcaaggtgccgggaaacttcacgttcacacacaagaaagtaaaacatgaaaacttcagcctcctaacctctggagaagtgggagagttctgtgtccaggtgaaaccatctgtcgcttcccgaagtaacaaggggatgtggtctaaagaggagtgcatctccctcaccaggcagtatttcaccgtgaccaacgtcatcatcttctttgcctttgtcctgctgctctccggagccctcgcctactgcctggccctccagctgtatgtgcggcgccgaaagaagctacccagtgtcctgctcttcaagaagcccagccccttcatcttcatcagccagcgtccctccccagagacccaagacaccatccacccgcttgatgaggaggcctttttgaaggtgtccccagagctgaagaacttggacctgcacggcagcacagacagtggctttggcagcaccaagccatccctgcagactgaagagccccagttcctcctccctgaccctcacccccaggctgacagaacgctgggaaacggggagccccctgtgctgggggacagctgcagtagtggcagcagcaatagcacagacagcgggatctgcctgcaggagcccagcctgagccccagcacagggcccacctgggagcaacaggtggggagcaacagcaggggccaggatgacagtggcattgacttagttcaaaactctgagggccgggctggggacacacagggtggctcggccttgggccaccacagtcccccggagcctgaggtgcctggggaagaagacccagctgctgtggcattccagggttacctgaggcagaccagatgtgctgaagagaaggcaaccaagacaggctgcctggaggaagaatcgcccttgacagatggccttggccccaaattcgggagatgcctggttgatgaggcaggcttgcatccaccagccctggccaagggctatttgaaacaggatcctctagaaatgactctggcttcctcaggggccccaacgggacagtggaaccagcccactgaggaatggtcactcctggccttgagcagctgcagtgacctgggaatatctgactggagctttgcccatgaccttgcccctctaggctgtgtggcagccccaggtggtctcctgggcagctttaactcagacctggtcaccctgcccctcatctctagcctgcagtcaagtgagtgactcgggctgagaggctgcttttgattttagccatgcctgctcctctgcctggaccaggaggagggcccctggggcagaagttaggcacgaggcagtctgggcacttttctgcaagtccactggggctggccccagccaggccctgcagggctggtcagggtgtctggggcaggaggaggccaactcactgaactagtgcagggtatgtgggtggcactgacctgttctgttgactggggccctgcagactctggcagagctgagaagggcagggaccttctccctcctaggaactctttcctgtatcataaaggattatttgctcaggggaaccatggggctttctggagttgtggtgaggccaccaggctgaagtcagctcagacccagacctccctgcttaggccactcgagcatcagagcttccagcaggaggaagggctgtaggaatggaagcttcagggccttgctgctggggtcatttttaggggaaaaaggaggatatgatggtcacatggggaacctcccctcatcgggcctctggggcaggaagcttgtcactggaagatcttaaggtatatattttctggacactcaaacacatcataatggattcactgaggggagacaaagggagccgagaccctggatggggcttccagctcagaacccatccctctggtgggtacctctggcacccatctgcaaatatctccctctctccaacaaatggagtagcatccccctggggcacttgctgaggccaagccactcacatcctcactttgctgccccaccatcttgctgacaacttccagagaagccatggttttttgtattggtcataactcagccctttgggcggcctctgggcttgggcaccagctcatgccagccccagagggtcagggttggaggcctgtgcttgtgtttgctgctaatgtccagctacagacccagaggataagccactgggcactgggctggggtccctgccttgttggtgttcagctgtgtgattttggactagccacttgtcagagggcctcaatctcccatctgtgaaataaggactccacctttaggggaccctccatgtttgctgggtattagccaagctggtcctgggagaatgcagatactgtccgtggactaccaagctggcttgtttcttatgccagaggctaacagatccaatgggagtccatggtgtcatgccaagacagtatcagacacagccccagaagggggcattatgggccctgcctccccataggccatttggactctgccttcaaacaaaggcagttcagtccacaggcatggaagctgtgaggggacaggcctgtgcgtgccatccagagtcatctcagccctgcctttctctggagcattctgaaaacagatattctggcccagggaatccagccatgacccccacccctctgccaaagtactcttaggtgccagtctggtaactgaactccctctggaggcaggcttgagggaggattcctcagggttcccttgaaagctttatttatttattttgttcatttatttattggagaggcagcattgcacagtgaaagaattctggatatctcaggagccccgaaattctagctctgactttgctgtttccagtggtatgaccttggagaagtcacttatcctcttggagcctcagtttcctcatctgcagaataatgactgacttgtctaattcgtagggatgtgaggttctgctgaggaaatgggtatgaatgtgccttgaacacaaagctctgtcaataagtgatacatgttttttattccaataaattgtcaagaccaca

SEQ ID NO: 436612 - DNA, 2265 bp, Homo sapiens
cagtcccagcccaagggtagctggaggcgcgcaggccggctccgctccggccccggacgatgcggcgcgcccaggatgctgccgtgcctcgtagtgctgctggcggcgctcctcagcctccgtcttggctcagacgctcatgggacagagctgcccagccctccgtctgtgtggtttgaagcagaatttttccaccacatcctccactggacacccatcccaaatcagtctgaaagtacctgctatgaagtggcgctcctgaggtatggaatagagtcctggaactccatctccaactgtagccagaccctgtcctatgaccttaccgcagtgaccttggacctgtaccacagcaatggctaccgggccagagtgcgggctgtggacggcagccggcactccaactggaccgtcaccaacacccgcttctctgtggatgaagtgactctgacagttggcagtgtgaacctagagatccacaatggcttcatcctcgggaagattcagctacccaggcccaagatggcccccgcgaatgacacatatgaaagcatcttcagtcacttccgagagtatgagattgccattcgcaaggtgccgggaaacttcacgttcacacacaagaaagtaaaacatgaaaacttcagcctcctaacctctggagaagtgggagagttctgtgtccaggtgaaaccatctgtcgcttcccgaagtaacaaggggatgtggtctaaagaggagtgcatctccctcaccaggcagtatttcaccgtgaccaacgtcatcatcttctttgcctttgtcctgctgctctccggagccctcgcctactgcctggccctccagctgtatgtgcggcgccgaaagaagctacccagtgtcctgctcttcaagaagcccagccccttcatcttcatcagccagcgtccctccccagagacccaagacacctcccctcatcgggcctctggggcaggaagcttgtcactggaagatcttaaggtatatattttctggacactcaaacacatcataatggattcactgaggggagacaaagggagccgagaccctggatggggcttccagctcagaacccatccctctggtgggtacctctggcacccatctgcaaatatctccctctctccaacaaatggagtagcatccccctggggcacttgctgaggccaagccactcacatcctcactttgctgccccaccatcttgctgacaacttccagagaagccatggttttttgtattggtcataactcagccctttgggcggcctctgggcttgggcaccagctcatgccagccccagagggtcagggttggaggcctgtgcttgtgtttgctgctaatgtccagctacagacccagaggataagccactgggcactgggctggggtccctgccttgttggtgttcagctgtgtgattttggactagccacttgtcagagggcctcaatctcccatctgtgaaataaggactccacctttaggggaccctccatgtttgctgggtattagccaagctggtcctgggagaatgcagatactgtccgtggactaccaagctggcttgtttcttatgccagaggctaacagatccaatgggagtccatggtgtcatgccaagacagtatcagacacagccccagaagggggcattatgggccctgcctccccataggccatttggactctgccttcaaacaaaggcagttcagtccacaggcatggaagctgtgaggggacaggcctgtgcgtgccatccagagtcatctcagccctgcctttctctggagcattctgaaaacagatattctggcccagggaatccagccatgacccccacccctctgccaaagtactcttaggtgccagtctggtaactgaactccctctggaggcaggcttgagggaggattcctcagggttcccttgaaagctttatttatttattttgttcatttatttattggagaggcagcattgcacagtgaaagaattctggatatctcaggagccccgaaattctagctctgactttgctgtttccagtggtatgaccttggagaagtcacttatcctcttggagcctcagtttcctcatctgcagaataatgactgacttgtctaattcgtagggatgtgaggttctgctgaggaaatgggtatgaatgtgccttgaacacaaagctctgtcaataagtgatacatgttttttattccaataaattgtcaagaccaca

SEQ ID NO: 436613 - DNA, 798 bp, Homo sapiens
tctaaatctatcatcaagttactgtcagtgctatttccataagatgataacttctttcatctgtactgccactaccctctttacctcttacctggaacatgatgatggccgcctcatttctgctggtgtctgcctctattccacttcacccagagcggccaagagtcgtatgtgtctgcttaaaatcttttaatggttttccatagcacttagattccaaactcccccacatggttcacaagggccagaataatctggcttctgcctgcctctctgaccctcctgctgcttttgttcacggccctccagtcacattcacttttttttaggccccagaaggtagcaagctctttcccacctctggaacttttttcgagatggagtcttgctctgtcacccaggctggagtgcagtgactcaatctttgctcactgcaacctccgcctcccaggttcaagtgattctcctgcctcagcctcccgactagctgggattacaggcgcccgccaccaggcccagctaatttttgtatttttagtagagacaggttccaccatgttggccagtctggtcttgaactcctgacctcgtgatctgcccacctcggcctcccaaagtgctgggattacaggtgtgagccaccatctggaacttttttatatactgtttcctgtatccatagcactctggcaagcctagcctttttctcatccttcaggatatttgttgaatgaataagaggcagcaaaggggatggggcaaggaggaatgtatcctgagtgcatccacaaaggtctc

SEQ ID NO: 436614 - DNA, 1577 bp, Homo sapiens
aaggaagccctgcgggaggccgtgtttgtcacttctgaagccagcctgaaaaatctctgccagatgtcccaggccgtactggatgaggatctcttcaacttcctgcaggcccactggttcacctgtgaactgctgtggtacatgcatgttaggaagggcctgcttgcgtgtaacacctacatggacagcctagacattgtcaccagcaaggtgtcaagcctctttcgggaacagcagtcgctgctggactgcatcctctgctttgtggattacatagacttctttaataccaaaggcttgaagaacttgcccacacctcctcccaaattaaagagagctcggccggcaagcatgccactgaagtccaagaaggcttttggaatctgtggagagagccttaccagcctccctgcagaagagaccaagccagacgcacagcaggtacaggtacagcagcagtcacaagtgccgccctcgcaggttggcatgctggacaccttgcaccagagtggctctgaactagcctacaagctgtgccacaatgagtgggaggtggtacagaactccacccacctggtggacatggctggctcttcagtggacgttcagctgctagaggactctcaccaggttagcaaagatggctgtagctgcagctgttcctttcaacaatggtaccacctgccatgccgacacattttggctctgctgcacaccagccagcagccggttggtgaagccatggtgtgccgccggtggcagaagaagtaccagtacctccttgggcccaatggggagctccaggatcgtggtatggtcccaaacacaggccagcctgagaagcaaggacggaacgacatgattcaggacctaagcagggagttagcaaacctgctcatgcagaccgaggggccagagctggaggaacgctactccaccctgcgcaagattgtggatatctgggctggcccctcccagccatctgagctctttcagcagccaggagactttaaggacgtgggccgcctccctttcctctggggaaagcaagaagaaggggagggattccctcctgctacagctgtgatgcattattgaagcactttagctgaagcattggaccacaaacacttctccttggaagtgtgagagtttaaagtgggcaggacatactagggtttagcattttagccaatgtcttcctaggtggggctaggaatattgttacagtagagaggaagggaactccactgtgtgacagtcctttcaatctgccccttttcagccctacttttggcattccttgggagcctcagttgttgttcaaggccaaagttatctccgtgctgcaaggtcaccctcttcctcccccagcccctgagatcagatcttatttgctctgcaaagatgaatccctgcctcaggttagggtgagacaaaatcggtctggtaaaagggcctgttttcagggacaaagggaatgaggatgatctttggctgttgctgctctttatgaagaatcttatttgtaactttttattcatattaaagttgtttttaataaaattaaaaaaaaa

SEQ ID NO: 436615 - DNA, 516 bp, Homo sapiens
  misc_feature (15)..(16): n is a, c, g, or t
  misc_feature (39)..(39): n is a, c, g, or t
agaggagaaggagannaaggaaagggaagggaagatganaaaaagggcagaaatagagccaacgtaggtaggagaagtaatcacaggtggtcagcgagcattcaaatctatgaaaactacctcggacaggagcagagaacaaacaaatacaagaagcaagcacatggagaaactagaagtagaccctagcaagcactcattccctgatgtgactaacatagttcaagagaaaaaacacacacccagaagacgacctgaacccaaaattataccaagtgaggaagacccaacctttgaagacaaccctgaagtgcctccgctgatttgaaacatctggctgcgttgccattggctgagacccaccaggtccagttttggttggtgtagagaccatatgcatattattcctgggataaacacagagttatttgtcaatatcgctgctccagtgttttaactcttactttgcatagtaatatccttaagatagcttaaaattaaaatgtatgtcttaaa

SEQ ID NO: 436616 - DNA, 3020 bp, Homo sapiens
gaattccgggcccccctcaaaagaagtgaagacattagaatgatgagaacagtccattgtaggatagacccaaatttaatagcttaaagaattgaggaagttggatccttttcaaagcgtacaacaagaatccaaactatatcagaagacagagagaagagagcaataaaatgccagatcggttactctaaattaacccaaactgtgaacagcacacagagaaaaatcaagccctttccctaagaactatgaagatacagcacaaatttacaggtatgagatcaagaaagctaaggcaggatgggagattgcagcttcaagagacatcaaaggtaacattctttaattatacaagaaaaaggaggagggccgaggataatgttgcctctattaagaaagcgggagggaaagctgttagcagatggctatgaaatggcaagagttgctgtttctcatgctttactctaggagggaaggaaggaaggaaacagggagggaaaggacggagggaaagaaatcacaagcaactactaaaaaagtgccatttgggtgggtgccaaattagtaaagataaataattacatggaatctttaagcaactggattcatgatcctgaactgagttgcagatggggcctcccatcaacatggatcagacgcatacttggatgctaagttgggaagatgttaccaaaatatgaattgcctagaggctgttgaagacaagatacatcactgaaatttggaaaaaggcaaacaaacccgggagcaggggtgaagggtgaaaagcgtcattcgaggtccgggtccggcttgcggggtcagcgaactggagaggcgccatgggctggatcacagaagatcttattagacggaatgctgaacacaacgactgtgtcattttttccctggaggaactctcgttgcatcagcaagaaatagaaagactagaacacattgataaatggtgccgggatttaaaaattctctatcttcaaaataatcttattgggaaaattgaaaatgttagcaaactcaagaaacttgaatatttgaatttagctttaaacaacattgaaaaaatagaaaacttggaaggatgtgaagagctggcaaaacttgacctgactgtgaatttcattggagagctgagcagcattaaaaacttgcagcacaatatccatctgaaggagctctttctcatggggaacccatgtgcttcctttgaccactatagggagttcgtggtagcaactcttccacaattaaagtggttggatggtaaagaaatagagccttcagaaaggattaaggcattgcaggactattcagtaattgaaccacaaatcagagagcaggaaaaagatcactgtcttaaacgagccaaactcaaggaagaggctcagaggaaacaccaagaagaggataaaaatgaagacaagagaagtaacgcaggctttgatggacgttggtacacagacatcaatgctactctttcctctttagagagcaaagaccacctacaggcaccagacacagaggaacacaacacaaagaaattagacaacagtgaagatgacttggaattctggaataagccctgtttgtttactcctgaatcaagattggaaactcttagacacatggaaaaacaacggaagaaacaggaaaaattaagtgaaaaaaagaagaaagtgaaaccacccaggactttgatcactgaagatgggaaagccctaaatgtgaatgagcccaaaattgacttctctttgaaagataacgaaaagcagatcatcctggaccttgctgtctataggtatatggatacctctttaatcgatgttgatgtgcaaccaacttacgtgcgagtaatgatcaaaggaaagccatttcagcttgtccttcctgcagaagtgaaacccgatagtagttctgctaaaagatctcagacaacgggtcatttggtcatctgcatgcccaaggtaggagaagtaatcacaggtggtcagcgagcattcaaatctatgaaaactacctcggacaggagcagagaacaaacaaatacaagaagcaagcacatggagaaactagaagtagaccctagcaagcactcattccctgatgtgactaacatagttcaagagaaaaaacacacacccagaagacgacctgaacccaaaattataccaagtgaggaagacccaacctttgaagacaaccctgaagtgcctccgctgatttgaaacatctggctgcgttgccattggctgagacccaccaggtccagttttggttggtgtagagaccatatgcatattattcctgggataaacacagagttatttgtcaatatcgctgctccagtgttttaactcttactttgcatagtaatatccttaagatagcttaaaattaaaatgtatgtcttaaatgctataactcatcatttacctataataaagggttggtattgaaaatgtttagtaagatcatagaactattgcataaaacactgattataaatactgtctacttatgcaaagtattaattcatagataaaaggactgagtattaaattggtacttcagcaaagtggtcaagcttagaagttaaaactgtaatttcagacccaattggaatactttaatatgattttaaacagcatttccattttccttcccatgatgtgtctgctttctctggtggcatggtataatggcaagaatatgagttttgaaaccagacactctatatttggattccagctcaatcactttgtaaagaccttcagcaagtcctttaattctctgagccttagtggcttcatgtataatctgggaataataacacttgcctcacaggtttgtctcaagataaactgcagaaagcacttagtacagtgtcagccatacatttagagcctcttctctctctccttcttccctttctcctctctcttctcctccctttctcctgtctctcctcctccctgctccttcttcccctccctccccaatta

SEQ ID NO: 436617 - DNA, 2238 bp, Homo sapiens
agcgggttgccatggctcctgaattccgacggggacgcgctgaggagcaggggtgaagggtgaaaagcgtcattcgaggtccgggtccggcttgcggggtcagcgaactggagaggcgccatgggctggatcacagaagatcttattagacggaatgctgaacacaacgactgtgtcattttttccctggaggaactctcgttgcatcagcaagaaatagaaagactagaacacattgataaatggtgccgggatttaaaaattctctatcttcaaaataatcttattgggaaaattgaaaatgttagcaaactcaagaaacttgaatatttgaatttagctttaaacaacattgaaaaaatagaaaacttggaaggatgtgaagagctggcaaaacttgacctgactgtgaatttcattggagagctgagcagcattaaaaacttgcagcacaatatccatctgaaggagctctttctcatggggaacccatgtgcttcctttgaccactatagggagttcgtggtagcaactcttccacaattaaagtggttggatggtaaagaaatagagccttcagaaaggattaaggcattgcaggactattcagtaattgaaccacaaatcagagagcaggaaaaagatcactgtcttaaacgagccaaactcaaggaagaggctcagaggaaacaccaagaagaggataaaaatgaagacaagagaagtaacgcaggctttgatggacgttggtacacagacatcaatgctactctttcctctttagagagcaaagaccacctacaggcaccagacacagaggaacacaacacaaagaaattagacaacagtgaagatgacttggaattctggaataagccctgtttgtttactcctgaatcaagattggaaactcttagacacatggaaaaacaacggaagaaacaggaaaaattaagtgaaaaaaagaagaaagtgaaaccacccaggactttgatcactgaagatgggaaagccctaaatgtgaatgagcccaagtatatggatacctctttaatcgatgttgatgtgcaaccaacttacgtgcgagtaatgatcaaaggaaagccatttcagcttgtccttcctgcagaagtgaaacccgatagtagttctgctaaaagatctcagacaacgggtcatttggtcatctgcatgcccaaggtaggagaagtaatcacaggtggtcagcgagcattcaaatctatgaaaactacctcggacaggagcagagaacaaacaaatacaagaagcaagcacatggagaaactagaagtagaccctagcaagcactcattccctgatgtgactaacatagttcaagagaaaaaacacacacccagaagacgacctgaacccaaaattataccaagtgaggaagacccaacctttgaagacaaccctgaagtgcctccgctgatttgaaacatctggctgcgttgccattggctgagacccaccaggtccagttttggttggtgtagagaccatatgcatattattcctgggataaacacagagttatttgtcaatatcgctgctccagtgttttaactcttactttgcatagtaatatccttaagatagcttaaaattaaaatgtatgtcttaaatgctataactcatcatttacctataataaagggttggtattgaaaatgtttagtaagatcatagaactattgcataaaacactgattataaatactgtctacttatgcaaagtattaattcatagataaaaggactgagtattaaattggtacttcagcaaagtggtcaagcttagaagttaaaactgtaatttcagacccaattggaatactttaatatgattttaaacagcatttccattttccttcccatgatgtgtctgctttctctggtggcatggtataatggcaagaatatgagttttgaaaccagacactctatatttggattccagctcaatcactttgtaaagaccttcagcaagtcctttaattctctgagccttagtggcttcatgtataatctgggaataataacacttgcctcacaggtttgtctcaagataaactgcagaaagcacttagtacagtgtcagccatacatttagagcctcttctctctctccttcttccctttctcctctctcttctcctccctttctcctgtctctcctcctccctgctccttcttcccctccctccccaatta

SEQ ID NO: 436618 - DNA, 1415 bp, Homo sapiens
agcgggttgccatggctcctgaattccgacggggacgcgctgaggagcaggggtgaagggtgaaaagcgtcattcgaggtccgggtccggcttgcggggtcagcgaactggagaggcgccatgggctggatcacagaagatcttattagacggaatgctgaacacaacgactgtgtcattttttccctggaggaactctcgttgcatcagcaagaaatagaaagactagaacacattgataaatggtgccgggatttaaaaattctctatcttcaaaataatcttattgggaaaattgaaaatgttagcaaactcaagaaacttgaatatttgaatttagctttaaacaacattgaaaaaatagaaaacttggaaggatgtgaagagctggcaaaacttgacctgactgtgaatttcattggagagctgagcagcattaaaaacttgcagcacaatatccatctgaaggagctctttctcatggggaacccatgtgcttcctttgaccactatagggagttcgtggtagcaactcttccacaattaaagtggttggatggtaaagaaatagagccttcagaaaggattaaggcattgcaggactattcagtaattgaaccacaaatcagagagcaggaaaaagatcactgtcttaaacgagccaaactcaaggaagaggctcagaggaaacaccaagaagaggataaaaatgaagacaagagaagtaacgcaggctttgatggacgttggtacacagacatcaatgctactctttcctctttagagagcaaagaccacctacaggcaccagacacagaggaacacaacacaaagaaattagacaacagtgaagatgacttggaattctggaataagccctgtttgtttactcctgaatcaagattggaaactcttagacacatggaaaaacaacggaagaaacaggaaaaattaagtgaaaaaaagaagaaagtgaaaccacccaggactttgatcactgaagatgggaaagccctaaatgtgaatgagcccaaaattgacttctctttgaaagataacgaaaagcagatcatcctggaccttgctgtctataggtatatggatacctctttaatcgatgttgatgtgcaaccaacttacgtgcgagtaatgatcaaaggaaagccatttcagcttgtccttcctgcagaagtgaaacccgatagtagttctgctaaaagatctcagacaacgggtcatttggtcatctgcatgcccaagggtgccaaccaattgatgagaaaagctctactgtcactgtttatgagtcttaaacaactgcagcattcttttccccttttcctttatgtttttaatctgtctaaatttttcacatgaaaataataataaatggcttatgaggaaaaagcatttta

SEQ ID NO: 436619 - DNA, 1753 bp, Homo sapiens
agcgggttgccatggctcctgaattccgacggggacgcgctgaggagcaggggtgaagggtgaaaagcgtcattcgaggtccgggtccggcttgcggggtcagcgaactggagaggcgccatgggctggatcacagaagatcttattagacggaatgctgaacacaacgactgtgtcattttttccctggaggaactctcgttgcatcagcaagaaatagaaagactagaacacattgataaatggtgccgggatttaaaaattctctatcttcaaaataatcttattgggaaaattgaaaatgttagcaaactcaagaaacttgaatatttgaatttagctttaaacaacattgaaaaaatagaaaacttggaaggatgtgaagagctggcaaaacttgacctgactgtgaatttcattggagagctgagcagcattaaaaacttgcagcacaatatccatctgaaggagctctttctcatggggaacccatgtgcttcctttgaccactatagggagttcgtggtagcaactcttccacaattaaagtggttggatggtaaagaaatagagccttcagaaaggattaaggcattgcaggactattcagtaattgaaccacaaatcagagagcaggaaaaagatcactgtcttaaacgagccaaactcaaggaagaggctcagaggaaacaccaagaagaggataaaaatgaagacaagagaagtaacgcaggctttgatggacgttggtacacagacatcaatgctactctttcctctttagagagcaaagaccacctacaggcaccagacacagaggaacacaacacaaagaaattagacaacagtgaagatgacttggaattctggaataagccctgtttgtttactcctgaatcaagattggaaactcttagacacatggaaaaacaacggaagaaacaggaaaaattaagtgaaaaaaagaagaaagtgaaaccacccaggactttgatcactgaagatgggaaagccctaaatgtgaatgagcccaaaattgacttctctttgaaagataacgaaaagcagatcatcctggaccttgctgtctataggtatatggatacctctttaatcgatgttgatgtgcaaccaacttacgtgcgagtaatgatcaaaggaaagccatttcagcttgtccttcctgcagaagtgaaacccgatagtagttctgctaaaagatctcagacaacgggtcatttggtcatctgcatgcccaaggtaggagaagtaatcacaggtggtcagcgagcattcaaatctatgaaaactacctcggacaggagcagagaacaaacaaatacaagaagcaagcacatggagaaactagaagtagaccctagcaagcactcattccctgatgtgactaacatagttcaagagaaaaaacacacacccagaagacgacctgaacccaaaattataccaagtgaggaagacccaacctttgaagacaaccctgaagtgcctccgctgatttgaaacatctggctgcgttgccattggctgagacccaccaggtcctgtcctggctcgtgcaacctcttcaagcataactccctccctataagtatctatcaactcagtaagtttggggctacatttcaaaacccccgtaatgagaaaagtcagttccctaagcctgattttgttgttttttgttttatatcaattaacgttaacaactgcatccactatttaattcatgaggatc

SEQ ID NO: 436620 - DNA, 1105 bp, Homo sapiens
  misc_feature (15)..(16): n is a, c, g, or t
  misc_feature (39)..(39): n is a, c, g, or t
agaggagaaggagannaaggaaagggaagggaagatganaaaaagggcagaaatagagccaacgtaggtaggagaagtaatcacaggtggtcagcgagcattcaaatctatgaaaactacctcggacaggagcagagaacaaacaaatacaagaagcaagcacatggagaaactagaagtagaccctagcaagcactcattccctgatgtgactaacatagttcaagagaaaaaacacacacccagaagacgacctgaacccaaaattataccaagtgaggaagacccaacctttgaagacaaccctgaagtgcctccgctgatttgaaacatctggctgcgttgccattggctgagacccaccaggtccagttttggttggtgtagagaccatatgcatattattcctgggataaacacagagttatttgtcaatatcgctgctccagtgttttaactcttactttgcatagtaatatccttaagatagcttaaaattaaaatgtatgtcttaaatgctataactcatcatttacctataataaagggttggtattgaaaatgtttagtaagatcatagaactattgcataaaacactgattataaatactgtctacttatgcaaagtattaattcatagataaaaggactgagtattaaattggtacttcagcaaagtggtcaagcttagaagttaaaactgtaatttcagacccaattggaatactttaatatgattttaaacagcatttccattttccttcccatgatgtgtctgctttctctggtggcatggtataatggcaagaatatgagttttgaaaccagacactctatatttggattccagctcaatcactttgtaaagaccttcagcaagtcctttaattctctgagccttagtggcttcatgtataatctgggaataataacacttgcctcacaggtttgtctcaagataaactgcagaaagcacttagtacagtgtcagccatacatttagagcctcttctctctctccttcttccctttctcctctctcttctcctccctttctcctgtctctcctcctccctgctccttcttcccctccctccccaatta

SEQ ID NO: 436621 - DNA, 1071 bp, Homo sapiens
tgtcttccagctattctactggattctagaggtgatgtttctgacagtcaggtcgtgggtaagaccagtgatgggcgtccgtcctagaggcctctgacattaaggcggggaaagcaaagaagcaagcacatggagaaactagaagtagaccctagcaagcactcattccctgatgtgactaacatagttcaagagaaaaaacacacacccagaagacgacctgaacccaaaattataccaagtgaggaagacccaacctttgaagacaaccctgaagtgcctccgctgatttgaaacatctggctgcgttgccattggctgagacccaccaggtccagttttggttggtgtagagaccatatgcatattattcctgggataaacacagagttatttgtcaatatcgctgctccagtgttttaactcttactttgcatagtaatatccttaagatagcttaaaattaaaatgtatgtcttaaatgctataactcatcatttacctataataaagggttggtattgaaaatgtttagtaagatcatagaactattgcataaaacactgattataaatactgtctacttatgcaaagtattaattcatagataaaaggactgagtattaaattggtacttcagcaaagtggtcaagcttagaagttaaaactgtaatttcagacccaattggaatactttaatatgattttaaacagcatttccattttccttcccatgatgtgtctgctttctctggtggcatggtataatggcaagaatatgagttttgaaaccagacactctatatttggattccagctcaatcactttgtaaagaccttcagcaagtcctttaattctctgagccttagtggcttcatgtataatctgggaataataacacttgcctcacaggtttgtctcaagataaactgcagaaagcacttagtacagtgtcagccatacatttagagcctcttctctctctccttcttccctttctcctctctcttctcctccctttctcctgtctctcctcctccctgctccttcttcccctccctccccaatta

SEQ ID NO: 436622 - DNA, 661 bp, Homo sapiens
aatgagtgatatgaaatctaaatctttaatttgctcatgagtggaggagaataattgccacctgatcttggggtcactgccataaacagaagggtttgcttattcagcaggatgtgactttgaggggagaagcaatctagtcttccaggagagatagtattagggcagctgcagaacagctgcaggggatccagagccgccaaggaagcaggagctggtggttgcaggcctcaagcagagtagaatcagcattcctggctattcaagtcttaggggcttaaaataaaatattcatgaaagagcatggcaagctgttttttgcaaacctctggtgtttcagacctcagatatttttgggttaggggcaatcaatgccaagtatacttgtgggtctaaaaatgaaattgctgatatattgaatttcctttggtctgggaattaatttaaaactaattttttaaagacccattttgcatggatattttaaacgcccttcatttaaaatggtcctgtaagtgtgaatttatatttgcacttattcaaacttgatattttttaaaattataagattttctgtgtttaattttgaaggtatatggatacctctttaatcgatgttgatgtgcaaccaacttacgtgcgagtaatgatcaaaggaaag

SEQ ID NO: 436623 - DNA, 736 bp, Homo sapiens
ttaactacattatcttgtatttcagaaaatgttagcaaactcaagaaacttgaatatttgaatttagctttaaacaacattgaaaaaatagaaaacttggaaggatgtgaagagctggcaaaacttgacctgactgtgaatttcattggagagctgagcagcattaaaaacttgcagcacaatatccatctgaaggagctctttctcatggggaacccatgtgcttcctttgaccactatagggagttcgtggtagcaactcttccacaattaaagtggttggatggtaaagaaatagagccttcagaaaggattaaggcattgcaggactattcagtaattgaaccacaaatcagagagcaggaaaaagatcactgtcttaaacgagccaaactcaaggaagaggctcagaggaaacaccaagaagaggataaaaatgaagacaagagaagtaacgcaggctttgatggacgttggtacacagacatcaatgctactctttcctctttagagagcaaagaccacctacaggcaccagacacagaggaacacaacacaaagaaattagacaacagtgaagatgacttggaattctggaataagccctgtttgtttactcctgaatcaagattggaaactcttagacacatggaaaaacaacggaagaaacaggaaaaattaagggattatcatacctgtcttacctaccccactgtactgttaagaaaatcagatg

SEQ ID NO: 436624 - DNA, 2298 bp, Homo sapiens
agcgggttgccatggctcctgaattccgacggggacgcgctgaggagcaggggtgaagggtgaaaagcgtcattcgaggtccgggtccggcttgcggggtcagcgaactggagaggcgccatgggctggatcacagaagatcttattagacggaatgctgaacacaacgactgtgtcattttttccctggaggaactctcgttgcatcagcaagaaatagaaagactagaacacattgataaatggtgccgggatttaaaaattctctatcttcaaaataatcttattgggaaaattgaaaatgttagcaaactcaagaaacttgaatatttgaatttagctttaaacaacattgaaaaaatagaaaacttggaaggatgtgaagagctggcaaaacttgacctgactgtgaatttcattggagagctgagcagcattaaaaacttgcagcacaatatccatctgaaggagctctttctcatggggaacccatgtgcttcctttgaccactatagggagttcgtggtagcaactcttccacaattaaagtggttggatggtaaagaaatagagccttcagaaaggattaaggcattgcaggactattcagtaattgaaccacaaatcagagagcaggaaaaagatcactgtcttaaacgagccaaactcaaggaagaggctcagaggaaacaccaagaagaggataaaaatgaagacaagagaagtaacgcaggctttgatggacgttggtacacagacatcaatgctactctttcctctttagagagcaaagaccacctacaggcaccagacacagaggaacacaacacaaagaaattagacaacagtgaagatgacttggaattctggaataagccctgtttgtttactcctgaatcaagattggaaactcttagacacatggaaaaacaacggaagaaacaggaaaaattaagtgaaaaaaagaagaaagtgaaaccacccaggactttgatcactgaagatgggaaagccctaaatgtgaatgagcccaaaattgacttctctttgaaagataacgaaaagcagatcatcctggaccttgctgtctataggtatatggatacctctttaatcgatgttgatgtgcaaccaacttacgtgcgagtaatgatcaaaggaaagccatttcagcttgtccttcctgcagaagtgaaacccgatagtagttctgctaaaagatctcagacaacgggtcatttggtcatctgcatgcccaaggtaggagaagtaatcacaggtggtcagcgagcattcaaatctatgaaaactacctcggacaggagcagagaacaaacaaatacaagaagcaagcacatggagaaactagaagtagaccctagcaagcactcattccctgatgtgactaacatagttcaagagaaaaaacacacacccagaagacgacctgaacccaaaattataccaagtgaggaagacccaacctttgaagacaaccctgaagtgcctccgctgatttgaaacatctggctgcgttgccattggctgagacccaccaggtccagttttggttggtgtagagaccatatgcatattattcctgggataaacacagagttatttgtcaatatcgctgctccagtgttttaactcttactttgcatagtaatatccttaagatagcttaaaattaaaatgtatgtcttaaatgctataactcatcatttacctataataaagggttggtattgaaaatgtttagtaagatcatagaactattgcataaaacactgattataaatactgtctacttatgcaaagtattaattcatagataaaaggactgagtattaaattggtacttcagcaaagtggtcaagcttagaagttaaaactgtaatttcagacccaattggaatactttaatatgattttaaacagcatttccattttccttcccatgatgtgtctgctttctctggtggcatggtataatggcaagaatatgagttttgaaaccagacactctatatttggattccagctcaatcactttgtaaagaccttcagcaagtcctttaattctctgagccttagtggcttcatgtataatctgggaataataacacttgcctcacaggtttgtctcaagataaactgcagaaagcacttagtacagtgtcagccatacatttagagcctcttctctctctccttcttccctttctcctctctcttctcctccctttctcctgtctctcctcctccctgctccttcttcccctccctccccaatta

SEQ ID NO: 436625 - DNA, 1709 bp, Homo sapiens
agcgggttgccatggctcctgaattccgacggggacgcgctgaggagcaggggtgaagggtgaaaagcgtcattcgaggtccgggtccggcttgcggggtcagcgaactggagaggcgccatgggctggatcacagaagatcttattagacggaatgctgaacacaacgactgtgtcattttttccctggaggaactctcgttgcatcagcaagaaatagaaagactagaacacattgataaatggtgccgggatttaaaaattctctatcttcaaaataatcttattgggaaaattgaaaatgttagcaaactcaagaaacttgaatatttgaatttagctttaaacaacattgaaaaaatagaaaacttggaaggatgtgaagagctggcaaaacttgacctgactgtgaatttcattggagagctgagcagcattaaaaacttgcagcacaatatccatctgaaggagctctttctcatggggaacccatgtgcttcctttgaccactatagggagttcgtggtagcaactcttccacaattaaagtggttggatggtaaagaaatagagccttcagaaaggattaaggcattgcaggactattcagtaattgaaccacaaatcagagagcaggaaaaagatcactgtcttaaacgagccaaactcaaggaagaggctcagaggaaacaccaagaagaggataaaaatgaagacaagagaagtaacgcaggctttgatggacgttggtacacagacatcaatgctactctttcctctttagagagcaaagaccacctacaggcaccagacacagaggaacacaacacaaagaaattagacaacagtgaagatgacttggaattctggaataagccctgtttgtttactcctgaatcaagattggaaactcttagacacatggaaaaacaacggaagaaacaggaaaaattaagtgaaaaaaagaagaaagtgaaaccacccaggactttgatcactgaagatgggaaagccctaaatgtgaatgagcccaaaattgacttctctttgaaagataacgaaaagcagatcatcctggaccttgctgtctataggtatatggatacctctttaatcgatgttgatgtgcaaccaacttacgtgcgagtaatgatcaaaggaaagccatttcagcttgtccttcctgcagaagtgaaacccgatagtagttctgctaaaagatctcagacaacgggtcatttggtcatctgcatgcccaaggtaggagaagtaatcacaggtggtcagcgagcattcaaatctatgaaaactacctcggacaggagcagagaacaaacaaatacaagaagcaagcacatggagaaactagaagtagaccctagcaagcactcattccctgatgtgactaacatagttcaagagaaaaaacacacacccagaagacgacctgaacccaaaattataccaagtgaggaagacccaacctttgaagacaaccctgaagtgcctccgctgatttgaaacatctggctgcgttgccattggctgagacccaccaggtccagttttggttggtgtagagaccatatgcatattattcctgggataaacacagagttatttgtcaatatcgctgctccagtgttttaactcttactttgcatagtaatatccttaagatagcttaaaattaaaatgtatgtcttaaa

SEQ ID NO: 436626 - DNA, 562 bp, Homo sapiens
  misc_feature (549)..(549): n is a, c, g, or t
gctggtcctagaggatcccctctatgaaagtgtcacgggtaaaaactctaaaaggttaatttctgtcaaatgcagtagatgatgaaagaaaggttggtattatcaggaaatgttttcttaagcttttcctttctcttacacctgccatgcctccccaaattgggcatttaattcatctttaaactggttgttctgttagtcgctaacttagtaagtgcttttcttatagaaccccttctgactgagcaatatgcctccttgtattataaaatctttctgataatgcattagaaggtttttttgtcgattagtaaaagtgctttccatgttactttattcagagctaataagtgctttccttagttttctagtaactaggtgtaaaaatcatgtgttgcagctttatagtttttaaaatattttagataattcttaaactatgaaccttcttaacatcactgtcttgccagattaccgacactgtcacttgaccaatactgaccctctttacctcgcccacgcggacacacgccttgcatccagaggggncctctagaacgcc

SEQ ID NO: 436627 - DNA, 510 bp, Homo sapiens
  misc_feature (46)..(46): n is a, c, g, or t
gtctctctctctctctctctctctctctctctctctctctctctcnccgagaaactgaaggagaagaagctgactcccatcacctatccgcagggtctagccatggctaaggagattggtgctgtaaaatacctggagtgctcggcgctcacacagcgaggcctcaagacagtgtttgacgaagcgatccgagcagtcctctgcccgcctcccgtgaagaagaggaagagaaaatgcctgctgttgtaaatgtctcagcccctcgttcttggtcctgtcccttggaacctttgtacgctttgctcaaaaaaaaacaaaaaaaaaaaacaaaaaaaaaaaacaacggtggagccttcgcactcaatgccaactttttggacccttcagccactacaacagaattttttaaattgacagttgcagaattgtggagtgtttttacattgatcttttgctaatgcaattagcattatgttttgcatgtatgacttaataaatccttgaatcata

SEQ ID NO: 436628 - DNA, 1105 bp, Homo sapiens
actccagtctgggcaacagagcaagactccgtctcaaaaacgcttgtcttaaggggtggcttcccccagacctacaaagtagcccagaattggaggtcttagtgtcagcaacagtgctgattttgataatgcaagtctgtacattcaaaccagtctcccagaactaggtggaagataggaacatttctgcataggagacttggaatgttctggcagcattaaaaccctgaggcccggctatgttctgggagagccctttggcaggcatcatttacagacgggtccttttcctgtatgctgtggcttcaactaggctgtgtctgagaactcggatggagcacttgaaagtgcccgtggctcccgcctgcctttgcggtaagggacagtgcagaacatctccggctgtgccagctgttgtagattctggtgggtgctgccatgggaggaggagcacgttgttgccccccctcaggatctccctgacctctgtcttcaccatcgttgaacttaacgcctgcttttgaccaggtagcgtggagtgtttcagtggcatttgtcatcgaagatatgttagaatctattgtatgcttttggatctctccggagggttaagacaaaattctaataaagaatcgataagaggttatattgatttattgttgtcctcagtctgtactaaactcaaaccaagttctcatgcattactaggttggagaaacgtacggtaaggatataacctcccggggcaaagacaagccgattgccgtatgtaaaactttcagtccacttcagtttcaagctttctctgttctctcatttcacttcgttttcctaggattttttattaagcctcaagctccttgagtgttttatatttaattcactcaaggttggggttttgcttgatgaaataaacttcattagagtgtgatagtttacccaccggcttgaattaaagcagtttgtgaactgtgatcttctcctcccaagtgaaaggaggggacagtgagagggcccctctcctggctggttggagatgcagatatggagactcctcccggaagcccacctggctgtgagccgagccggagcaggactaaccttg

SEQ ID NO: 436629 - DNA, 171 bp, Homo sapiens
  misc_feature (7)..(8): n is a, c, g, or t
  misc_feature (29)..(29): n is a, c, g, or t
gcggtcnnctactactactaaattcgcgnccgcgtcgggacccttcagccactacaacagaattttttaaattgacagttgcagaattgtggagtgtttttacattgatcttttgctaatgcaattagcattatgttttgcatgtatgacttaataaatccttgaatcata

SEQ ID NO: 436630 - DNA, 2667 bp, Homo sapiens
actccgggagcggcgcgggcgggagcggcgcgggcgggagcggccccgcccggaacctgggagcggcggcgccggcgcgggggaggggaggccggatgtgagtggagcggccatttcctgtttctctgcagttttcctcagctttgggtggtggccgctgccgggcatcggcttccagtccgcggagggcgaggcggcgtggacagcggccccggcacccagcgccccgccgcccgcaagccgcgcgcccgtccgccgcgccccgagcccgccgcttcctatctcagcgccctgccgccgccgccgcggcccagcgagcggccctgatgcaggccatcaagtgtgtggtggtgggagacggagctgtaggtaaaacttgcctactgatcagttacacaaccaatgcatttcctggagaatatatccctactgtctttgacaattattctgccaatgttatggtagatggaaaaccggtgaatctgggcttatgggatacagctggacaagaagattatgacagattacgccccctatcctatccgcaaacagatgtgttcttaatttgcttttcccttgtgagtcctgcatcatttgaaaatgtccgtgcaaagtggtatcctgaggtgcggcaccactgtcccaacactcccatcatcctagtgggaactaaacttgatcttagggatgataaagacacgatcgagaaactgaaggagaagaagctgactcccatcacctatccgcagggtctagccatggctaaggagattggtgctgtaaaatacctggagtgctcggcgctcacacagcgaggcctcaagacagtgtttgacgaagcgatccgagcagtcctctgcccgcctcccgtgaagaagaggaagagaaaatgcctgctgttgtaaatgtctcagcccctcgttcttggtcctgtcccttggaacctttgtacgctttgctcaaaaaaaaacaaaaaaaaaaaacaaaaaaaaaaaacaacggtggagccttcgcactcaatgccaactttttgttacagattaatttttccataaaaccattttttgaaccaatcagtaattttaaggttttgtttgttctaaatgtaagagttcagactcacattctattaaaatttagccctaaaatgacaagccttcttaaagccttatttttcaaaagcgccccccccattcttgttcagattaagagttgccaaaataccttctgaactacactgcattgttgtgccgagaacaccgagcactgaactttgcaaagaccttcgtctttgagaagacggtagcttctgcagttaggaggtgcagacacttgctctcctatgtagttctcagatgcgtaaagcagaacagcctcccgaatgaagcgttgccattgaactcaccagtgagttagcagcacgtgttcccgacataacattgtactgtaatggagtgagcgtagcagctcagctctttggatcagtctttgtgatttcatagcgagttttctgaccagcttttgcggagattttgaacagaactgctatttcctctaatgaagaattctgtttagctgtgggtgtgccgggtggggtgtgtgtgatcaaaggacaaagacagtattttgacaaaatacgaagtggagatttacactacattgtacaaggaatgaaagtgtcacgggtaaaaactctaaaaggttaatttctgtcaaatgcagtagatgatgaaagaaaggttggtattatcaggaaatgttttcttaagcttttcctttctcttacacctgccatgcctccccaaattgggcatttaattcatctttaaactggttgttctgttagtcgctaacttagtaagtgcttttcttatagaaccccttctgactgagcaatatgcctccttgtattataaaatctttctgataatgcattagaaggtttttttgtcgattagtaaaagtgctttccatgttactttattcagagctaataagtgctttccttagttttctagtaactaggtgtaaaaatcatgtgttgcagctttatagtttttaaaatattttagataattcttaaactatgaaccttcttaacatcactgtcttgccagattaccgacactgtcacttgaccaatactgaccctctttacctcgcccacgcggacacacgcctcctgtagtcgctttgcctattgatgttcctttgggtctgtgaggttctgtaaactgtgctagtgctgacgatgttctgtacaacttaactcactggcgagaatacagcgtgggacccttcagccactacaacagaattttttaaattgacagttgcagaattgtggagtgtttttacattgatcttttgctaatgcaattagcattatgttttgcatgtatgacttaataaatccttgaatcataaaaaaaaaaaacacacacaacaaaaaaaaaaaaaaaaaaaaaaaaaaaaaaaaaaaaaaaaaaaaaaccatgtgggccgcttgggccaagtcgactctagactcgaccaagctaatgcatgcggccgaatttcgagctaactgggccaattggccctaaggggggccgtattacaattaacgtgcccgtcgtttacaacgttgggactggaccctggcgtaacccacctactcgccttgcg

SEQ ID NO: 436631 - DNA, 2372 bp, Homo sapiens
actccgggagcggcgcgggcgggagcggcgcgggcgggagcggccccgcccggaacctgggagcggcggcgccggcgcgggggaggggaggccggatgtgagtggagcggccatttcctgtttctctgcagttttcctcagctttgggtggtggccgctgccgggcatcggcttccagtccgcggagggcgaggcggcgtggacagcggccccggcacccagcgccccgccgcccgcaagccgcgcgcccgtccgccgcgccccgagcccgccgcttcctatctcagcgccctgccgccgccgccgcggcccagcgagcggccctgatgcaggccatcaagtgtgtggtggtgggagacggagctgtaggtaaaacttgcctactgatcagttacacaaccaatgcatttcctggagaatatatccctactgtctttgacaattattctgccaatgttatggtagatggaaaaccggtgaatctgggcttatgggatacagctggacaagaagattatgacagattacgccccctatcctatccgcaaacagatgtgttcttaatttgcttttcccttgtgagtcctgcatcatttgaaaatgtccgtgcaaagtggtatcctgaggtgcggcaccactgtcccaacactcccatcatcctagtgggaactaaacttgatcttagggatgataaagacacgatcgagaaactgaaggagaagaagctgactcccatcacctatccgcagggtctagccatggctaaggagattggtgctgtaaaatacctggagtgctcggcgctcacacagcgaggcctcaagacagtgtttgacgaagcgatccgagcagtcctctgcccgcctcccgtgaagaagaggaagagaaaatgcctgctgttgtaaatgtctcagcccctcgttcttggtcctgtcccttggaacctttgtacgctttgctcaaaaaaaaacaaaaaaaaaaaacaaaaaaaaaaaacaacggtggagccttcgcactcaatgccaactttttgttacagattaatttttccataaaaccattttttgaaccaatcagtaattttaaggttttgtttgttctaaatgtaagagttcagactcacattctattaaaatttagccctaaaatgacaagccttcttaaagccttatttttcaaaagcgccccccccattcttgttcagattaagagttgccatttgcaaagaccttcgtctttgagaagacggtagcttctgcagttaggaggtgcagacacttgctctcctatgtagttctcagatgcgtaaagcagaacagcctcccgaatgaagcgttgccattgaactcaccagtgagttagcagcacgtgttcccgacataacattgtactgtaatggagtgagcgtagcagctcagctctttggatcagtctttgtgatttcatagcgagttttctgaccagcttttgcggagattttgaacagaactgctatttcctctaatgaagaattctgtttagctgtgggtgtgccgggtggggtgtgtgtgatcaaaggacaaagacagtattttgacaaaatacgaagtggagatttacactacattgtacaaggaatgaaagtgtcacgggtaaaaactctaaaaggttaatttctgtcaaatgcagtagatgatgaaagaaaggttggtattatcaggaaatgttttcttaagcttttcctttctcttacacctgccatgcctccccaaattgggcatttaattcatctttaaactggttgttctgttagtcgctaacttagtaagtgcttttcttatagaaccccttctgactgagcaatatgcctccttgtattataaaatctttctgataatgcattagaaggtttttttgtcgattagtaaaagtgctttccatgttactttattcagagctaataagtgctttccttagttttctagtaactaggtgtaaaaatcatgtgttgcagctttatagtttttaaaatattttagataattcttaaactatgaaccttcttaacatcactgtcttgccagattaccgacactgtcacttgaccaatactgaccctctttacctcgcccacgcggacacacgcctcctgtagtcgctttgcctattgatgttcctttgggtctgtgaggttctgtaaactgtgctagtgctgacgatgttctgtacaacttaactcactggcgagaatacagcgtgggacccttcagccactacaacagaattttttaaattgacagttgcagaattgtggagtgtttttacattgatcttttgctaatgcaattagcattatgttttgcatgtatgacttaataaatccttgaatcata

SEQ ID NO: 436632 - DNA, 2762 bp, Homo sapiens
actccgggagcggcgcgggcgggagcggcgcgggcgggagcggccccgcccggaacctgggagcggcggcgccggcgcgggggaggggaggccggatgtgagtggagcggccatttcctgtttctctgcagttttcctcagctttgggtggtggccgctgccgggcatcggcttccagtccgcggagggcgaggcggcgtggacagcggccccggcacccagcgccccgccgcccgcaagccgcgcgcccgtccgccgcgccccgagcccgccgcttcctatctcagcgccctgccgccgccgccgcggcccagcgagcggccctgatgcaggccatcaagtgtgtggtggtgggagacggagctgtaggtaaaacttgcctactgatcagttacacaaccaatgcatttcctggagaatatatccctactgtctttgacaattattctgccaatgttatggtagatggaaaaccggtgaatctgggcttatgggatacagctggacaagaagattatgacagattacgccccctatcctatccgcaaacagatgtgttcttaatttgcttttcccttgtgagtcctgcatcatttgaaaatgtccgtgcaaagtggtatcctgaggtgcggcaccactgtcccaacactcccatcatcctagtgggaactaaacttgatcttagggatgataaagacacgatcgagaaactgaaggagaagaagctgactcccatcacctatccgcagggtctagccatggctaaggagattggtgctgtaaaatacctggagtgctcggcgctcacacagcgaggcctcaagacagtgtttgacgaagcgatccgagcagtcctctgcccgcctcccgtgaagaagaggaagagaaaatgcctgctgttgtaaatgtctcagcccctcgttcttggtcctgtcccttggaacctttgtacgctttgctcaaaaaaaaacaaaaaaaaaaaacaaaaaaaaaaaacaacggtggagccttcgcactcaatgccaactttttgttacagattaatttttccataaaaccattttttgaaccaatcagtaattttaaggttttgtttgttctaaatgtaagagttcagactcacattctattaaaatttagccctaaaatgacaagccttcttaaagccttatttttcaaaagcgccccccccattcttgttcagattaagagttgccaaaataccttctgaactacactgcattgttgtgccgagaacaccgagcactgaactttgcaaagaccttcgtctttgagaagacggtagcttctgcagttaggaggtgcagacacttgctctcctatgtagttctcagatgcgtaaagcagaacagcctcccgaatgaagcgttgccattgaactcaccagtgagttagcagcacgtgttcccgacataacattgtactgtaatggagtgagcgtagcagctcagctctttggatcagtctttgtgatttcatagcgagttttctgaccagcttttgcggagattttgaacagaactgctatttcctctaatgaagaattctgtttagctgtgggtgtgccgggtggggtgtgtgtgatcaaaggacaaagacagtattttgacaaaatacgaagtggagatttacactacattgtacaaggaatgaaagtgtcacgggtaaaaactctaaaaggttaatttctgtcaaatgcagtagatgatgaaagaaaggttggtattatcaggaaatgttttcttaagcttttcctttctcttacacctgccatgcctccccaaattgggcatttaattcatctttaaactggttgttctgttagtcgctaacttagtaagtgcttttcttatagaaccccttctgactgagcaatatgcctccttgtattataaaatctttctgataatgcattagaaggtttttttgtcgattagtaaaagtgctttccatgttactttattcagagctaataagtgctttccttagttttctagtaactaggtgtaaaaatcatgtgttgcagctttatagtttttaaaatattttagataattcttaaactatgaaccttcttaacatcactgtcttgccagattaccgacactgtcacttgaccaatactgaccctctttacctcgcccacgcggacacacgcctcctgtagtcgctttgcctattgatgttcctttgggtctgtgaggttctgtaaactgtgctagtgctgacgatgttctgtacaacttaactcactggcgagaatacagcgtgggacccttcagccactacaacagaattttttaaattgacagttgcagaattgtggagtgtttttacattgatcttttgctaatgcaattagcattatgttttgcatgtatgacttaataaatccttgaatcataaaaaaaaaaaaaaaaaaaaaaaaaaaaaaaaaaaaaaaaaaaaaaaaaaagagggggggcggcgcgcgccaaaaatgtcccccgcgggggggcgccccatggcgccgaccacccacacttttgctgtgtttatcacaaggggggggggcccccagatgagggagggcggcttattataacaagcaccaggcggacgagaggggcgcgcgcctgttaaacaagacgctgcggtgagtggggggaaaacgagcggccaccgacgggggaaagctgggcgggagaaggaaccccatctgcgcgggcgggcgcacacatggggccccaaccccccgcaga

SEQ ID NO: 436633 - DNA, 2598 bp, Homo sapiens
  misc_feature (2425)..(2425): n is a, c, g, or t
actccgggagcggcgcgggcgggagcggcgcgggcgggagcggccccgcccggaacctgggagcggcggcgccggcgcgggggaggggaggccggatgtgagtggagcggccatttcctgtttctctgcagttttcctcagctttgggtggtggccgctgccgggcatcggcttccagtccgcggagggcgaggcggcgtggacagcggccccggcacccagcgccccgccgcccgcaagccgcgcgcccgtccgccgcgccccgagcccgccgcttcctatctcagcgccctgccgccgccgccgcggcccagcgagcggccctgatgcaggccatcaagtgtgtggtggtgggagacggagctgtaggtaaaacttgcctactgatcagttacacaaccaatgcatttcctggagaatatatccctactgtctttgacaattattctgccaatgttatggtagatggaaaaccggtgaatctgggcttatgggatacagctggacaagaagattatgacagattacgccccctatcctatccgcaaacagatgtgttcttaatttgcttttcccttgtgagtcctgcatcatttgaaaatgtccgtgcaaagtggtatcctgaggtgcggcaccactgtcccaacactcccatcatcctagtgggaactaaacttgatcttagggatgataaagacacgatcgagaaactgaaggagaagaagctgactcccatcacctatccgcagggtctagccatggctaaggagattggtgctgtaaaatacctggagtgctcggcgctcacacagcgaggcctcaagacagtgtttgacgaagcgatccgagcagtcctctgcccgcctcccgtgaagaagaggaagagaaaatgcctgctgttgtaaatgtctcagcccctcgttcttggtcctgtcccttggaacctttgtacgctttgctcaaaaaaaaacaaaaaaaaaaaacaaaaaaaaaaaacaacggtggagccttcgcactcaatgccaactttttgttacagattaatttttccataaaaccattttttgaaccaatcagtaattttaaggttttgtttgttctaaatgtaagagttcagactcacattctattaaaatttagccctaaaatgacaagccttcttaaagccttatttttcaaaagcgccccccccattcttgttcagattaagagttgccaaaataccttctgaactacactgcattgttgtgccgagaacaccgagcactgaactttgcaaagaccttcgtctttgagaagacggtagcttctgcagttaggaggtgcagacacttgctctcctatgtagttctcagatgcgtaaagcagaacagcctcccgaatgaagcgttgccattgaactcaccagtgagttagcagcacgtgttcccgacataacattgtactgtaatggagtgagcgtagcagctcagctctttggatcagtctttgtgatttcatagcgagttttctgaccagcttttgcggagattttgaacagaactgctatttcctctaatgaagaattctgtttagctgtgggtgtgccgggtggggtgtgtgtgatcaaaggacaaagacagtattttgacaaaatacgaagtggagatttacactacattgtacaaggaatgaaagtgtcacgggtaaaaactctaaaaggttaatttctgtcaaatgcagtagatgatgaaagaaaggttggtattatcaggaaatgttttcttaagcttttcctttctcttacacctgccatgcctccccaaattgggcatttaattcatctttaaactggttgttctgttagtcgctaacttagtaagtgcttttcttatagaaccccttctgactgagcaatatgcctccttgtattataaaatctttctgataatgcattagaaggtttttttgtcgattagtaaaagtgctttccatgttactttattcagagctaataagtgctttccttagttttctagtaactaggtgtaaaaatcatgtgttgcagctttatagtttttaaaatattttagataattcttaaactatgaaccttcttaacatcactgtcttgccagattaccgacactgtcacttgaccaatactgaccctctttacctcgcccacgcggacacacgcctcctgtagtcgctttgcctattgatgttcctttgggtctgtgaggttctgtaaactgtgctagtgctgacgatgttctgtacaacttaactcactggcgagaatacagcgtgggacccttcagccactacaacagaattttttaaattgacagttgcagaattgtggagtgtttttacattgtgacctctttggcataatgtgcaatttgagcatttagttgtttggcatgtgttatttgacctntacattacaatctcctgttggaatttcattttaaacaaacaagaagcaaagagagcgcgcgcgggcgcgcgccgctctctatagagagtatatctcccctctcgaggaggggggccccccaagaggggctttatagcgcgcggtattacccccgagggcatttcgcccgcgaa

SEQ ID NO: 436634 - DNA, 2209 bp, Homo sapiens
  misc_feature (2196)..(2196): n is a, c, g, or t
actccgggagcggcgcgggcgggagcggcgcgggcgggagcggccccgcccggaacctgggagcggcggcgccggcgcgggggaggggaggccggatgtgagtggagcggccatttcctgtttctctgcagttttcctcagctttgggtggtggccgctgccgggcatcggcttccagtccgcggagggcgaggcggcgtggacagcggccccggcacccagcgccccgccgcccgcaagccgcgcgcccgtccgccgcgccccgagcccgccgcttcctatctcagcgccctgccgccgccgccgcggcccagcgagcggccctgatgcaggccatcaagtgtgtggtggtgggagacggagctgtaggtaaaacttgcctactgatcagttacacaaccaatgcatttcctggagaatatatccctactgtctttgacaattattctgccaatgttatggtagatggaaaaccggtgaatctgggcttatgggatacagctggacaagaagattatgacagattacgccccctatcctatccgcaaacagatgtgttcttaatttgcttttcccttgtgagtcctgcatcatttgaaaatgtccgtgcaaagtggtatcctgaggtgcggcaccactgtcccaacactcccatcatcctagtgggaactaaacttgatcttagggatgataaagacacgatcgagaaactgaaggagaagaagctgactcccatcacctatccgcagggtctagccatggctaaggagattggtgctgtaaaatacctggagtgctcggcgctcacacagcgaggcctcaagacagtgtttgacgaagcgatccgagcagtcctctgcccgcctcccgtgaagaagaggaagagaaaatgcctgctgttgtaaatgtctcagcccctcgttcttggtcctgtcccttggaacctttgtacgctttgctcaaaaaaaaacaaaaaaaaaaaacaaaaaaaaaaaacaacggtggagccttcgcactcaatgccaactttttgttacagattaatttttccataaaaccattttttgaaccaatcagtaattttaaggttttgtttgttctaaatgtaagagttcagactcacattctattaaaatttagccctaaaatgacaagccttcttaaagccttatttttcaaaagcgccccccccattcttgttcagattaagagttgccaaaataccttctgaactacactgcattgttgtgccgagaacaccgagcactgaactttgcaaagaccttcgtctttgagaagacggtagcttctgcagttaggaggtgcagacacttgctctcctatgtagttctcagatgcgtaaagcagaacagcctcccgaatgaagcgttgccattgaactcaccagtgagttagcagcacgtgttcccgacataacattgtactgtaatggagtgagcgtagcagctcagctctttggatcagtctttgtgatttcatagcgagttttctgaccagcttttgcggagattttgaacagaactgctatttcctctaatgaagaattctgtttagctgtgggtgtgccgggtggggtgtgtgtgatcaaaggacaaagacagtattttgacaaaatacgaagtggagatttacactacattgtacaaggaatgaaagtgtcacgggtaaaaactctaaaaggttaatttctgtcaaatgcagtagatgatgaaagaaaggttggtattatcaggaaatgttttcttaagcttttcctttctcttacacctgccatgcctccccaaattgggcatttaattcatctttaaactggttgttctgttagtcgctaacttagtaagtgcttttcttatagaaccccttctgactgagcaatatgcctccttgtattataaaatctttctgataatgcattagaaggtttttttgtcgattagtaaaagtgctttccatgttactttattcagagctaataagtgctttccttagttttctagtaactaggtgtaaaaatcatgtgttgcagctttatagtttttaaaatattttagataattcttaaactatgaaccttcttaacatcactgtcttgccagattaccgacactgtcacttgaccaatactgaccctctttacctcgcccacgcggacacacgccttgcatccagaggggncctctagaacgcc

SEQ ID NO: 436635 - DNA, 2207 bp, Homo sapiens
  misc_feature (2190)..(2190): n is a, c, g, or t
actccgggagcggcgcgggcgggagcggcgcgggcgggagcggccccgcccggaacctgggagcggcggcgccggcgcgggggaggggaggccggatgtgagtggagcggccatttcctgtttctctgcagttttcctcagctttgggtggtggccgctgccgggcatcggcttccagtccgcggagggcgaggcggcgtggacagcggccccggcacccagcgccccgccgcccgcaagccgcgcgcccgtccgccgcgccccgagcccgccgcttcctatctcagcgccctgccgccgccgccgcggcccagcgagcggccctgatgcaggccatcaagtgtgtggtggtgggagacggagctgtaggtaaaacttgcctactgatcagttacacaaccaatgcatttcctggagaatatatccctactgtctttgacaattattctgccaatgttatggtagatggaaaaccggtgaatctgggcttatgggatacagctggacaagaagattatgacagattacgccccctatcctatccgcaaacagatgtgttcttaatttgcttttcccttgtgagtcctgcatcatttgaaaatgtccgtgcaaagtggtatcctgaggtgcggcaccactgtcccaacactcccatcatcctagtgggaactaaacttgatcttagggatgataaagacacgatcgagaaactgaaggagaagaagctgactcccatcacctatccgcagggtctagccatggctaaggagattggtgctgtaaaatacctggagtgctcggcgctcacacagcgaggcctcaagacagtgtttgacgaagcgatccgagcagtcctctgcccgcctcccgtgaagaagaggaagagaaaatgcctgctgttgtaaatgtctcagcccctcgttcttggtcctgtcccttggaacctttgtacgctttgctcaaaaaaaaacaaaaaaaaaaaacaaaaaaaaaaaacaacggtggagccttcgcactcaatgccaactttttgttacagattaatttttccataaaaccattttttgaaccaatcagtaattttaaggttttgtttgttctaaatgtaagagttcagactcacattctattaaaatttagccctaaaatgacaagccttcttaaagccttatttttcaaaagcgccccccccattcttgttcagattaagagttgccaaaataccttctgaactacactgcattgttgtgccgagaacaccgagcactgaactttgcaaagaccttcgtctttgagaagacggtagcttctgcagttaggaggtgcagacacttgctctcctatgtagttctcagatgcgtaaagcagaacagcctcccgaatgaagcgttgccattgaactcaccagtgagttagcagcacgtgttcccgacataacattgtactgtaatggagtgagcgtagcagctcagctctttggatcagtctttgtgatttcatagcgagttttctgaccagcttttgcggagattttgaacagaactgctatttcctctaatgaagaattctgtttagctgtgggtgtgccgggtggggtgtgtgtgatcaaaggacaaagacagtattttgacaaaatacgaagtggagatttacactacattgtacaaggaatgaaagtgtcacgggtaaaaactctaaaaggttaatttctgtcaaatgcagtagatgatgaaagaaaggttggtattatcaggaaatgttttcttaagcttttcctttctcttacacctgccatgcctccccaaattgggcatttaattcatctttaaactggttgttctgttagtcgctaacttagtaagtgcttttcttatagaaccccttctgactgagcaatatgcctccttgtattataaaatctttctgataatgcattagaaggtttttttgtcgattagtaaaagtgctttccatgttactttattcagagctaataagtgctttccttagttttctagtaactaggtgtaaaaatcatgtgttgcagctttatagtttttaaaatattttagataattcttaaactatgaaccttcttaacatcactgtcttgccagattaccgacactgtcacttgaccaatactgaccctctttacctcgcccacgcggacacacgccatttccaccntgccagggtaccgagct

SEQ ID NO: 436636 - DNA, 2370 bp, Homo sapiens
actccgggagcggcgcgggcgggagcggcgcgggcgggagcggccccgcccggaacctgggagcggcggcgccggcgcgggggaggggaggccggatgtgagtggagcggccatttcctgtttctctgcagttttcctcagctttgggtggtggccgctgccgggcatcggcttccagtccgcggagggcgaggcggcgtggacagcggccccggcacccagcgccccgccgcccgcaagccgcgcgcccgtccgccgcgccccgagcccgccgcttcctatctcagcgccctgccgccgccgccgcggcccagcgagcggccctgatgcaggccatcaagtgtgtggtggtgggagacggagctgtaggtaaaacttgcctactgatcagttacacaaccaatgcatttcctggagaatatatccctactgtctttgacaattattctgccaatgttatggtagatggaaaaccggtgaatctgggcttatgggatacagctggacaagaagattatgacagattacgccccctatcctatccgcaaacagatgtgttcttaatttgcttttcccttgtgagtcctgcatcatttgaaaatgtccgtgcaaagtggtatcctgaggtgcggcaccactgtcccaacactcccatcatcctagtgggaactaaacttgatcttagggatgataaagacacgatcgagaaactgaaggagaagaagctgactcccatcacctatccgcagggtctagccatggctaaggagattggtgctgtaaaatacctggagtgctcggcgctcacacagcgaggcctcaagacagtgtttgacgaagcgatccgagcagtcctctgcccgcctcccgtgaagaagaggaagagaaaatgcctgctgttgtaaatgtctcagcccctcgttcttggtcctgtcccttggaacctttgtacgctttgctcaaaaaaaaacaaaaaaaaaaaacaaaaaaaaaaaacaacggtggagccttcgcactcaatgccaactttttgttacagattaatttttccataaaaccattttttgaaccaatcagtaattttaaggttttgtttgttctaaatgtaagagttcagactcacattctattaaaatttagccctaaaatgacaagccttcttaaagccttatttttcaaaagcgccccccccattcttgttcagattaagagttgccaaaataccttctgaactacactgcattgttgtgccgagaacaccgagcactgaactttgcaaagaccttcgtctttgagaagacggtagcttctgcagttaggaggtgcagacacttgctctcctatgtagttctcagatgcgtaaagcagaacagcctcccgaatgaagcgttgccattgaactcaccagtgagttagcagcacgtgttcccgacataacattgtactgtaatggagtgagcgtagcagctcagctctttggatcagtctttgtgatttcatagcgagttttctgaccagcttttgcggagattttgaacagaactgctatttcctctaatgaagaattctgtttagctgtgggtgtgccgggtggggtgtgtgtgatcaaaggacaaagacagtattttgacaaaatacgaagtggagatttacactacattgtacaaggaatgaaagtgtcacgggtaaaaactctaaaaggttaatttctgtcaaatgcagtagatgatgaaagaaaggttggtattatcaggaaatgttttcttaagcttttcctttctcttacacctgccatgcctccccaaattgggcatttaattcatctttaaactggttgttctgttagtcgctaacttagtaagtgcttttcttatagaaccccttctgactgagcaatatgcctccttgtattataaaatctttctgataatgcattagaaggtttttttgtcgattagtaaaagtgctttccatgttactttattcagagctaataagtgctttccttagttttctagtaactaggtgtaaaaatcatgtgttgcagctttatagtttttgattaccgacactgtcacttgaccaatactgaccctctttacctcgcccacgcggacacacgcctcctgtagtcgctttgcctattgatgttcctttgggtctgtgaggttctgtaaactgtgctagtgctgacgatgttctgtacaacttaactcactggcgagaatacagcgtgggacccttcagccactacaacagaattttttaaattgacagttgcagaattgtggagtgtttttacattgatcttttgctaatgcaattagcattatgttttgcatgtatgacttaataaatccttgaatcata

SEQ ID NO: 436637 - DNA, 2525 bp, Homo sapiens
actccgggagcggcgcgggcgggagcggcgcgggcgggagcggccccgcccggaacctgggagcggcggcgccggcgcgggggaggggaggccggatgtgagtggagcggccatttcctgtttctctgcagttttcctcagctttgggtggtggccgctgccgggcatcggcttccagtccgcggagggcgaggcggcgtggacagcggccccggcacccagcgccccgccgcccgcaagccgcgcgcccgtccgccgcgccccgagcccgccgcttcctatctcagcgccctgccgccgccgccgcggcccagcgagcggccctgatgcaggccatcaagtgtgtggtggtgggagacggagctgtaggtaaaacttgcctactgatcagttacacaaccaatgcatttcctggagaatatatccctactgttctctctctcttgcccaggatggagtgctgtgatgcgatctcagctcactgcagcgtctgcctcctgggttcaagtgattctctgcctcagcctcccagctttgacaattattctgccaatgttatggtagatggaaaaccggtgaatctgggcttatgggatacagctggacaagaagattatgacagattacgccccctatcctatccgcaaacagatgtgttcttaatttgcttttcccttgtgagtcctgcatcatttgaaaatgtccgtgcaaagtggtatcctgaggtgcggcaccactgtcccaacactcccatcatcctagtgggaactaaacttgatcttagggatgataaagacacgatcgagaaactgaaggagaagaagctgactcccatcacctatccgcagggtctagccatggctaaggagattggtgctgtaaaatacctggagtgctcggcgctcacacagcgaggcctcaagacagtgtttgacgaagcgatccgagcagtcctctgcccgcctcccgtgaagaagaggaagagaaaatgcctgctgttgtaaatgtctcagcccctcgttcttggtcctgtcccttggaacctttgtacgctttgctcaaaaaaaaacaaaaaaaaaaaacaaaaaaaaaaaacaacggtggagccttcgcactcaatgccaactttttgttacagattaatttttccataaaaccattttttgaaccaatcagtaattttaaggttttgtttgttctaaatgtaagagttcagactcacattctattaaaatttagccctaaaatgacaagccttcttaaagccttatttttcaaaagcgccccccccattcttgttcagattaagagttgccaaaataccttctgaactacactgcattgttgtgccgagaacaccgagcactgaactttgcaaagaccttcgtctttgagaagacggtagcttctgcagttaggaggtgcagacacttgctctcctatgtagttctcagatgcgtaaagcagaacagcctcccgaatgaagcgttgccattgaactcaccagtgagttagcagcacgtgttcccgacataacattgtactgtaatggagtgagcgtagcagctcagctctttggatcagtctttgtgatttcatagcgagttttctgaccagcttttgcggagattttgaacagaactgctatttcctctaatgaagaattctgtttagctgtgggtgtgccgggtggggtgtgtgtgatcaaaggacaaagacagtattttgacaaaatacgaagtggagatttacactacattgtacaaggaatgaaagtgtcacgggtaaaaactctaaaaggttaatttctgtcaaatgcagtagatgatgaaagaaaggttggtattatcaggaaatgttttcttaagcttttcctttctcttacacctgccatgcctccccaaattgggcatttaattcatctttaaactggttgttctgttagtcgctaacttagtaagtgcttttcttatagaaccccttctgactgagcaatatgcctccttgtattataaaatctttctgataatgcattagaaggtttttttgtcgattagtaaaagtgctttccatgttactttattcagagctaataagtgctttccttagttttctagtaactaggtgtaaaaatcatgtgttgcagctttatagtttttaaaatattttagataattcttaaactatgaaccttcttaacatcactgtcttgccagattaccgacactgtcacttgaccaatactgaccctctttacctcgcccacgcggacacacgcctcctgtagtcgctttgcctattgatgttcctttgggtctgtgaggttctgtaaactgtgctagtgctgacgatgttctgtacaacttaactcactggcgagaatacagcgtgggacccttcagccactacaacagaattttttaaattgacagttgcagaattgtggagtgtttttacattgatcttttgctaatgcaattagcattatgttttgcatgtatgacttaataaatccttgaatcata

SEQ ID NO: 436638 - DNA, 1992 bp, Homo sapiens
actccgggagcggcgcgggcgggagcggcgcgggcgggagcggccccgcccggaacctgggagcggcggcgccggcgcgggggaggggaggccggatgtgagtggagcggccatttcctgtttctctgcagttttcctcagctttgggtggtggccgctgccgggcatcggcttccagtccgcggagggcgaggcggcgtggacagcggccccggcacccagcgccccgccgcccgcaagccgcgcgcccgtccgccgcgccccgagcccgccgcttcctatctcagcgccctgccgccgccgccgcggcccagcgagcggccctgatgcaggccatcaagtgtgtggtggtgggagacggagctgtaggtaaaacttgcctactgatcagttacacaaccaatgcatttcctggagaatatatccctactgtctttgacaattattctgccaatgttatggtagatggaaaaccggtgaatctgggcttatgggatacagctggacaagaagattatgacagattacgccccctatcctatccgcaaacagatgtgttcttaatttgcttttcccttgtgagtcctgcatcatttgaaaatgtccgtgcaaagtggtatcctgaggtgcggcaccactgtcccaacactcccatcatcctagtgggaactaaacttgatcttagggatgataaagacacgatcgagaaactgaaggagaagaagctgactcccatcacctatccgcagggtctagccatggctaaggagattggtgctgtaaaatacctggagtgctcggcgctcacacagcgaggcctcaagacagtgtttgacgaagcgatccgagcagtcctctgcccgcctcccgtgaagaagaggaagagaaaatgcctgctgttgtaaatgtctcagcccctcgttcttggtcctgtcccttggaacctttgtacgctttgctcaaaaaaaaacaaaaaaaaaaaacaaaaaaaaaaaacaacggtggagccttcgcactcaatgccaactttttgttacagattaatttttccataaaaccattttttgaaccaatcagtaattttaaggttttgtttgttctaaatgtaagagttcagactcacattctattaaaatttagccctaaaatgacaagccttcttaaagccttatttttcaaaagcgccccccccattcttgttcagattaagagttgccaaaataccttctgaactacactgcattgttgtgccgagaacaccgagcactgaactttgcaaagaccttcgtctttgagaagacggtagcttctgcagttaggaggtgcagacacttgctctcctatgtagttctcagatgcgtaaagcagaacagcctcccgaatgaagcgttgccattgaactcaccagtgagttagcagcacgtgttcccgacataacattgtactgtaatggagtgagcgtagcagctcagctctttggatcagtctttgtgatttcatagcgagttttctgaccagcttttgcggagggacccttcagccactacaacagaattttttaaattgacagttgcagaattgtggagtgtttttacattgatcttttgctaatgcaattagcattatgttttgcatgtatgacttaataaatccttgaatcataaaaaaaaaaaaaaaaaaaaaaaaaaaaaaaaaaaaaaaaaaaaaaaaaaatgtgtgtgggggcgccaaggcccccagaaagaactttataaaaacacacgggggggggggggggcccaagaggaagagggaaagggggacaaaagggggaccaggggaaacgggggaaacacaaggggggggggattccacaccaagaaaaaacacgggggggaaaacaagggcgtgtttggaaaaaaccacagaggaggagaaaagaggaacaaaagggggaactaaacaaggggggacacagggaggcgaaaaaaaaataccgcgggggggggagca

SEQ ID NO: 436639 - DNA, 1663 bp, Homo sapiens
actccgggagcggcgcgggcgggagcggcgcgggcgggagcggccccgcccggaacctgggagcggcggcgccggcgcgggggaggggaggccggatgtgagtggagcggccatttcctgtttctctgcagttttcctcagctttgggtggtggccgctgccgggcatcggcttccagtccgcggagggcgaggcggcgtggacagcggccccggcacccagcgccccgccgcccgcaagccgcgcgcccgtccgccgcgccccgagcccgccgcttcctatctcagcgccctgccgccgccgccgcggcccagcgagcggccctgatgcaggccatcaagtgtgtggtggtgggagacggagctgtaggtaaaacttgcctactgatcagttacacaaccaatgcatttcctggagaatatatccctactgtctttgacaattattctgccaatgttatggtagatggaaaaccggtgaatctgggcttatgggatacagctggacaagaagattatgacagattacgccccctatcctatccgcaaacagatgtgttcttaatttgcttttcccttgtgagtcctgcatcatttgaaaatgtccgtgcaaagtggtatcctgaggtgcggcaccactgtcccaacactcccatcatcctagtgggaactaaacttgatcttagggatgataaagacacgatcgagaaactgaaggagaagaagctgactcccatcacctatccgcagggtctagccatggctaaggagattggtgctgtaaaatacctggagtgctcggcgctcacacagcgaggcctcaagacagtgtttgacgaagcgatccgagcagtcctctgcccgcctcccgtgaagaagaggaagagaaaatgcctgctgttgtaaatgtctcagcccctcgttcttggtcctgtcccttggaacctttgtacgctttgctcaaaaaaaaacaaaaaaaaaaaacaaaaaaaaaaaacaacggtggagccttcgcactcaatgccaactttttgttacagattaatttttccataaaaccattttttgaaccaatcagtaattttaaggttttgtttgttctaaatgtaagagttcagactcacattctattaaaatttagccctaaaatgacaagccttcttaaagccttatttttcaaaagcgccccccccattcttgttcagattaagagttgccaaaataccttctgaactacactgcattgttgtgccgagaacaccgagcactgaactttgcaaagaccttcgtctttgagaagacggtagcttctgcagttaggaggtgcagacacttgctctcctatgtagttctcagatgcgtaaagcagaacagcctcccgaatgaagcgttgccattgaactcaccagtgagttagcagcacgtgttcccgacataacattgtactgtaatggagtgagcgtagcagctcagctctttggatcagtctttgtgatttcatagcgagttttctgaccagcttttgcggagggacccttcagccactacaacagaattttttaaattgacagttgcagaattgtggagtgtttttacattgatcttttgctaatgcaattagcattatgttttgcatgtatgacttaataaatccttgaatcata

SEQ ID NO: 436640 - DNA, 2865 bp, Homo sapiens
ctaaccccaccgtgcttgagatggtgtgctgggtgccgcggtgattcttggacgagcttgtgcatgcgccagcattcttcaaatgccagttataaaaagctgttgtgtgggatgtttctttccctttcaggtacaaggtatcagctggagggttgaaagtgtagcttgggaattgtgtgcatttcataaagtagcataattgcctttttccaggagaatattttagaaatctagcattttagaattcttgggcatttttaaatacaggtgaatatttgaatttggtttgacacaaaatacagaatggatgaagcatgcagatgtttggcgtgtgccccgaagcaccctctactctgtcctctgcacccaccctttgcgcctctgcgtcagccacagctgccccgggagcgagttctcctgaggccctggctgtgctgactctagggcagcgtgagggtggttgtcagctgtgaaggtgccacttacacactaagtcctccttccttgtggagggaagggctcaagtagcaaatattggagcccccgcttggtgctgggagctgtgacaggcagctcctgaagaagcagtttaattggaaccagtgaccatctaaaactgtttgtactctaaaccagattttacagaaatattggaatcatacctttatacttgattttttcattttagatagttaggcgtaaaggaagcctcctgagggtctggtctgatcctcctgatccttgaagagcttccagcatcattctcccttcatgctccccattttcataagtaactggtggcttgacatgctgggtttggtttgggagccctctgacaaactgaaagggtggatcaggaagcgtctgaccacaccactggtagacacgctctgcgtccaacaagtccttcccagcaacatgtagaaagcaaagtgcatgcttcattctaaggttgttgtctaaatgtttccctgtgtttcctttttgtaggatgtgttcttaatttgcttttcccttgtgagtcctgcatcatttgaaaatgtccgtgcaaagtggtatcctgaggtgcggcaccactgtcccaacactcccatcatcctagtgggaactaaacttgatcttagggatgataaagacacgatcgagaaactgaaggagaagaagctgactcccatcacctatccgcagggtctagccatggctaaggagattggtgctgtaaaatacctggagtgctcggcgctcacacagcgaggcctcaagacagtgtttgacgaagcgatccgagcagtcctctgcccgcctcccgtgaagaagaggaagagaaaatgcctgctgttgtaaatgtctcagcccctcgttcttggtcctgtcccttggaacctttgtacgctttgctcaaaaaaaaacaaaaaaaaaaaacaaaaaaaaaaaacaacggtggagccttcgcactcaatgccaactttttgttacagattaatttttccataaaaccattttttgaaccaatcagtaattttaaggttttgtttgttctaaatgtaagagttcagactcacattctattaaaatttagccctaaaatgacaagccttcttaaagccttatttttcaaaagcgccccccccattcttgttcagattaagagttgccaaaataccttctgaactacactgcattgttgtgccgagaacaccgagcactgaactttgcaaagaccttcgtctttgagaagacggtagcttctgcagttaggaggtgcagacacttgctctcctatgtagttctcagatgcgtaaagcagaacagcctcccgaatgaagcgttgccattgaactcaccagtgagttagcagcacgtgttcccgacataacattgtactgtaatggagtgagcgtagcagctcagctctttggatcagtctttgtgatttcatagcgagttttctgaccagcttttgcggagattttgaacagaactgctatttcctctaatgaagaattctgtttagctgtgggtgtgccgggtggggtgtgtgtgatcaaaggacaaagacagtattttgacaaaatacgaagtggagatttacactacattgtacaaggaatgaaagtgtcacgggtaaaaactctaaaaggttaatttctgtcaaatgcagtagatgatgaaagaaaggttggtattatcaggaaatgttttcttaagcttttcctttctcttacacctgccatgcctccccaaattgggcatttaattcatctttaaactggttgttctgttagtcgctaacttagtaagtgcttttcttatagaaccccttctgactgagcaatatgcctccttgtattataaaatctttctgataatgcattagaaggtttttttgtcgattagtaaaagtgctttccatgttactttattcagagctaataagtgctttccttagttttctagtaactaggtgtaaaaatcatgtgttgcagctttatagtttttaaaatattttagataattcttaaactatgaaccttcttaacatcactgtcttgccagattaccgacactgtcacttgaccaatactgaccctctttacctcgcccacgcggacacacgcctcctgtagtcgctttgcctattgatgttcctttgggtctgtgaggttctgtaaactgtgctagtgctgacgatgttctgtacaacttaactcactggcgagaatacagcgtgggacccttcagccactacaacagaattttttaaattgacagttgcagaattgtggagtgtttttacattgatcttttgctaatgcaattagcattatgttttgcatgtatgacttaataaatccttgaatcata

SEQ ID NO: 436641 - DNA, 2055 bp, Homo sapiens
  misc_feature (7)..(8): n is a, c, g, or t
  misc_feature (29)..(29): n is a, c, g, or t
gcggtcnnctactactactaaattcgcgnccgcgtcgatggaaaaccggtgaatctgggcttatgggatacagctggacaagaagattatgacagattacgccccctatcctatccgcaaacagttggagaaacgtacggtaaggatataacctcccggggcaaagacaagccgattgccgatgtgttcttaatttgcttttcccttgtgagtcctgcatcatttgaaaatgtccgtgcaaagtggtatcctgaggtgcggcaccactgtcccaacactcccatcatcctagtgggaactaaacttgatcttagggatgataaagacacgatcgagaaactgaaggagaagaagctgactcccatcacctatccgcagggtctagccatggctaaggagattggtgctgtaaaatacctggagtgctcggcgctcacacagcgaggcctcaagacagtgtttgacgaagcgatccgagcagtcctctgcccgcctcccgtgaagaagaggaagagaaaatgcctgctgttgtaaatgtctcagcccctcgttcttggtcctgtcccttggaacctttgtacgctttgctcaaaaaaaaacaaaaaaaaaaaacaaaaaaaaaaaacaacggtggagccttcgcactcaatgccaactttttgttacagattaatttttccataaaaccattttttgaaccaatcagtaattttaaggttttgtttgttctaaatgtaagagttcagactcacattctattaaaatttagccctaaaatgacaagccttcttaaagccttatttttcaaaagcgccccccccattcttgttcagattaagagttgccaaaataccttctgaactacactgcattgttgtgccgagaacaccgagcactgaactttgcaaagaccttcgtctttgagaagacggtagcttctgcagttaggaggtgcagacacttgctctcctatgtagttctcagatgcgtaaagcagaacagcctcccgaatgaagcgttgccattgaactcaccagtgagttagcagcacgtgttcccgacataacattgtactgtaatggagtgagcgtagcagctcagctctttggatcagtctttgtgatttcatagcgagttttctgaccagcttttgcggagattttgaacagaactgctatttcctctaatgaagaattctgtttagctgtgggtgtgccgggtggggtgtgtgtgatcaaaggacaaagacagtattttgacaaaatacgaagtggagatttacactacattgtacaaggaatgaaagtgtcacgggtaaaaactctaaaaggttaatttctgtcaaatgcagtagatgatgaaagaaaggttggtattatcaggaaatgttttcttaagcttttcctttctcttacacctgccatgcctccccaaattgggcatttaattcatctttaaactggttgttctgttagtcgctaacttagtaagtgcttttcttatagaaccccttctgactgagcaatatgcctccttgtattataaaatctttctgataatgcattagaaggtttttttgtcgattagtaaaagtgctttccatgttactttattcagagctaataagtgctttccttagttttctagtaactaggtgtaaaaatcatgtgttgcagctttatagtttttaaaatattttagataattcttaaactatgaaccttcttaacatcactgtcttgccagattaccgacactgtcacttgaccaatactgaccctctttacctcgcccacgcggacacacgcctcctgtagtcgctttgcctattgatgttcctttgggtctgtgaggttctgtaaactgtgctagtgctgacgatgttctgtacaacttaactcactggcgagaatacagcgtgggacccttcagccactacaacagaattttttaaattgacagttgcagaattgtggagtgtttttacattgatcttttgctaatgcaattagcattatgttttgcatgtatgacttaataaatccttgaatcata

SEQ ID NO: 436642 - DNA, 2640 bp, Homo sapiens
actccagtctgggcaacagagcaagactccgtctcaaaaacgcttgtcttaaggggtggcttcccccagacctacaaagtagcccagaattggaggtcttagtgtcagcaacagtgctgattttgataatgcaagtctgtacattcaaaccagtctcccagaactaggtggaagataggaacatttctgcataggagacttggaatgttctggcagcattaaaaccctgaggcccggctatgttctgggagagccctttggcaggcatcatttacagacgggtccttttcctgtatgctgtggcttcaactaggctgtgtctgagaactcggatggagcacttgaaagtgcccgtggctcccgcctgcctttgcggtaagggacagtgcagaacatctccggctgtgccagctgttgtagattctggtgggtgctgccatgggaggaggagcacgttgttgccccccctcaggatctccctgacctctgtcttcaccatcgttgaacttaacgcctgcttttgaccaggtagcgtggagtgtttcagtggcatttgtcatcgaagatatgttagaatctattgtatgcttttggatctctccggagggttaagacaaaattctaataaagaatcgataagaggttatattgatttattgttgtcctcagtctgtactaaactcaaaccaagttctcatgcattactaggttggagaaacgtacggtaaggatataacctcccggggcaaagacaagccgattgccgatgtgttcttaatttgcttttcccttgtgagtcctgcatcatttgaaaatgtccgtgcaaagtggtatcctgaggtgcggcaccactgtcccaacactcccatcatcctagtgggaactaaacttgatcttagggatgataaagacacgatcgagaaactgaaggagaagaagctgactcccatcacctatccgcagggtctagccatggctaaggagattggtgctgtaaaatacctggagtgctcggcgctcacacagcgaggcctcaagacagtgtttgacgaagcgatccgagcagtcctctgcccgcctcccgtgaagaagaggaagagaaaatgcctgctgttgtaaatgtctcagcccctcgttcttggtcctgtcccttggaacctttgtacgctttgctcaaaaaaaaacaaaaaaaaaaaacaaaaaaaaaaaacaacggtggagccttcgcactcaatgccaactttttgttacagattaatttttccataaaaccattttttgaaccaatcagtaattttaaggttttgtttgttctaaatgtaagagttcagactcacattctattaaaatttagccctaaaatgacaagccttcttaaagccttatttttcaaaagcgccccccccattcttgttcagattaagagttgccaaaataccttctgaactacactgcattgttgtgccgagaacaccgagcactgaactttgcaaagaccttcgtctttgagaagacggtagcttctgcagttaggaggtgcagacacttgctctcctatgtagttctcagatgcgtaaagcagaacagcctcccgaatgaagcgttgccattgaactcaccagtgagttagcagcacgtgttcccgacataacattgtactgtaatggagtgagcgtagcagctcagctctttggatcagtctttgtgatttcatagcgagttttctgaccagcttttgcggagattttgaacagaactgctatttcctctaatgaagaattctgtttagctgtgggtgtgccgggtggggtgtgtgtgatcaaaggacaaagacagtattttgacaaaatacgaagtggagatttacactacattgtacaaggaatgaaagtgtcacgggtaaaaactctaaaaggttaatttctgtcaaatgcagtagatgatgaaagaaaggttggtattatcaggaaatgttttcttaagcttttcctttctcttacacctgccatgcctccccaaattgggcatttaattcatctttaaactggttgttctgttagtcgctaacttagtaagtgcttttcttatagaaccccttctgactgagcaatatgcctccttgtattataaaatctttctgataatgcattagaaggtttttttgtcgattagtaaaagtgctttccatgttactttattcagagctaataagtgctttccttagttttctagtaactaggtgtaaaaatcatgtgttgcagctttatagtttttaaaatattttagataattcttaaactatgaaccttcttaacatcactgtcttgccagattaccgacactgtcacttgaccaatactgaccctctttacctcgcccacgcggacacacgcctcctgtagtcgctttgcctattgatgttcctttgggtctgtgaggttctgtaaactgtgctagtgctgacgatgttctgtacaacttaactcactggcgagaatacagcgtgggacccttcagccactacaacagaattttttaaattgacagttgcagaattgtggagtgtttttacattgatcttttgctaatgcaattagcattatgttttgcatgtatgacttaataaatccttgaatcata

SEQ ID NO: 436643 - DNA, 2042 bp, Homo sapiens
  misc_feature (67)..(67): n is a, c, g, or t
  misc_feature (81)..(81): n is a, c, g, or t
  misc_feature (87)..(87): n is a, c, g, or t
  misc_feature (108)..(109): n is a, c, g, or t
  misc_feature (116)..(117): n is a, c, g, or t
  misc_feature (119)..(119): n is a, c, g, or t
  misc_feature (129)..(129): n is a, c, g, or t
  misc_feature (131)..(131): n is a, c, g, or t
  misc_feature (134)..(134): n is a, c, g, or t
  misc_feature (145)..(145): n is a, c, g, or t
gaaacagcggttgaaagcctgcgcccttccagccacactcacctactatgcccggcgtggctggcancccatgaaacatcngctagnctctggggggggacagcactnngacctgnngngcagagccangnccnactcaaagatngcccctatcctatccgcaaacagatgtgttcttaatttgcttttcccttgtgagtcctgcatcatttgaaaatgtccgtgcaaagtggtatcctgaggtgcggcaccactgtcccaacactcccatcatcctagtgggaactaaacttgatcttagggatgataaagacacgatcgagaaactgaaggagaagaagctgactcccatcacctatccgcagggtctagccatggctaaggagattggtgctgtaaaatacctggagtgctcggcgctcacacagcgaggcctcaagacagtgtttgacgaagcgatccgagcagtcctctgcccgcctcccgtgaagaagaggaagagaaaatgcctgctgttgtaaatgtctcagcccctcgttcttggtcctgtcccttggaacctttgtacgctttgctcaaaaaaaaacaaaaaaaaaaaacaaaaaaaaaaaacaacggtggagccttcgcactcaatgccaactttttgttacagattaatttttccataaaaccattttttgaaccaatcagtaattttaaggttttgtttgttctaaatgtaagagttcagactcacattctattaaaatttagccctaaaatgacaagccttcttaaagccttatttttcaaaagcgccccccccattcttgttcagattaagagttgccaaaataccttctgaactacactgcattgttgtgccgagaacaccgagcactgaactttgcaaagaccttcgtctttgagaagacggtagcttctgcagttaggaggtgcagacacttgctctcctatgtagttctcagatgcgtaaagcagaacagcctcccgaatgaagcgttgccattgaactcaccagtgagttagcagcacgtgttcccgacataacattgtactgtaatggagtgagcgtagcagctcagctctttggatcagtctttgtgatttcatagcgagttttctgaccagcttttgcggagattttgaacagaactgctatttcctctaatgaagaattctgtttagctgtgggtgtgccgggtggggtgtgtgtgatcaaaggacaaagacagtattttgacaaaatacgaagtggagatttacactacattgtacaaggaatgaaagtgtcacgggtaaaaactctaaaaggttaatttctgtcaaatgcagtagatgatgaaagaaaggttggtattatcaggaaatgttttcttaagcttttcctttctcttacacctgccatgcctccccaaattgggcatttaattcatctttaaactggttgttctgttagtcgctaacttagtaagtgcttttcttatagaaccccttctgactgagcaatatgcctccttgtattataaaatctttctgataatgcattagaaggtttttttgtcgattagtaaaagtgctttccatgttactttattcagagctaataagtgctttccttagttttctagtaactaggtgtaaaaatcatgtgttgcagctttatagtttttaaaatattttagataattcttaaactatgaaccttcttaacatcactgtcttgccagattaccgacactgtcacttgaccaatactgaccctctttacctcgcccacgcggacacacgcctcctgtagtcgctttgcctattgatgttcctttgggtctgtgaggttctgtaaactgtgctagtgctgacgatgttctgtacaacttaactcactggcgagaatacagcgtgggacccttcagccactacaacagaattttttaaattgacagttgcagaattgtggagtgtttttacattgatcttttgctaatgcaattagcattatgttttgcatgtatgacttaataaatccttgaatcata

SEQ ID NO: 436644 - DNA, 1892 bp, Homo sapiens
  misc_feature (1783)..(1783): n is a, c, g, or t
actccgggagcggcgcgggcgggagcggcgcgggcgggagcggccccgcccggaacctgggagcggcggcgccggcgcgggggaggggaggccggatgtgagtggagcggccatttcctgtttctctgcagttttcctcagctttgggtggtggccgctgccgggcatcggcttccagtccgcggagggcgaggcggcgtggacagcggccccggcacccagcgccccgccgcccgcaagccgcgcgcccgtccgccgcgccccgagcccgccgcttcctatctcagcgccctgccgccgccgccgcggcccagcgagcggccctgatgcaggccatcaagtgtgtggtggtgggagacggagctgtaggtaaaacttgcctactgatcagttacacaaccaatgcatttcctggagaatatatccctactgtctttgacaattattctgccaatgttatggtagatggaaaaccggtgaatctgggcttatgggatacagctggacaagaagattatgacagattacgccccctatcctatccgcaaacagatgtgttcttaatttgcttttcccttgtgagtcctgcatcatttgaaaatgtccgtgcaaagtggtatcctgaggtgcggcaccactgtcccaacactcccatcatcctagtgggaactaaacttgatcttagggatgataaagacacgatcgagaaactgaaggagaagaagctgactcccatcacctatccgcagggtctagccatggctaaggagattggtgctgtaaaatacctggagtgctcggcgctcacacagcgaggcctcaagacagtgtttgacgaagcgatccgagcagtcctctgcccgcctcccgtgaagaagaggaagagaaaatgcctgctgttgtaaatgtctcagcccctcgttcttggtcctgtcccttggaacctttgtacgctttgctcaaaaaaaaacaaaaaaaaaaaacaaaaaaaaaaaaaacaacaagccgggggagccgctttcgcactcagtggtgccaattttgtgggtcgcggttttaatttttcccattaaaacccatttttgtggcacccaattcagataccattttaaggggtagggtggggtcctaagtgtgtaacgagttcagaacctccaatttcttattataacaatttataggcccttaaaatattggagcaagcgccttctcttataaaagcgccttatattgtttccaaaagcggcggccccccccaatttctttgggtcccaggattctacagagagttttggccagaaaatatagcacttttcgtgagagacttaccaccgtggcagatttggcgtggtgcgccgcgaaagaaaaaaccgcgcgagagacccattgggggaaatctttggggcagcagagaaccctctttggcgctctttttgagcaagaaaaggacacgcgggggaaacgtccttcttggggcgagattaaggggaaggggttggcgaggacacccactcctagggtgtgtacctccccctatttaggtaagagtttatctccgccaaataatggtgttagaaagaggcagagaaaagagcagacttcccccgcggaaaaggtgaaaagagagcgtttggcccacctgttgtgagaaatctcaccacccaagtgtgagagttttgaagcacgagcaacactgtgttgttttccccgcgacatattaaacacatttggggtcacgcgtggtcaagcgtgagcaagtgtgcaagcgcgtatagcacagagncatcagagacacatatcttgggggggcaactcagcaaggtccatgacgggcgggaaatataccaccagtaaaggcgaaagttattttgtcgtcgagcaccacgaaggat

SEQ ID NO: 436645 - DNA, 2025 bp, Homo sapiens
gatatcgcacaacactgatcctgctagatactctgaaagcacctccgcgacccgacaacagatgaagggggaagatgcccagccacaggagatggcgtccacaagcttcccaagggccagtggtcccagtcctgaattcagacagcacggggactctgacgggaagagagggagcccacagaatctgcccatagaacatcattttgcttgtaaagagtgttggggataacatcagatgttaccaacactcccatcatcctagtgggaactaaacttgatcttagggatgataaagacacgatcgagaaactgaaggagaagaagctgactcccatcacctatccgcagggtctagccatggctaaggagattggtgctgtaaaatacctggagtgctcggcgctcacacagcgaggcctcaagacagtgtttgacgaagcgatccgagcagtcctctgcccgcctcccgtgaagaagaggaagagaaaatgcctgctgttgtaaatgtctcagcccctcgttcttggtcctgtcccttggaacctttgtacgctttgctcaaaaaaaaacaaaaaaaaaaaacaaaaaaaaaaaacaacggtggagccttcgcactcaatgccaactttttgttacagattaatttttccataaaaccattttttgaaccaatcagtaattttaaggttttgtttgttctaaatgtaagagttcagactcacattctattaaaatttagccctaaaatgacaagccttcttaaagccttatttttcaaaagcgccccccccattcttgttcagattaagagttgccaaaataccttctgaactacactgcattgttgtgccgagaacaccgagcactgaactttgcaaagaccttcgtctttgagaagacggtagcttctgcagttaggaggtgcagacacttgctctcctatgtagttctcagatgcgtaaagcagaacagcctcccgaatgaagcgttgccattgaactcaccagtgagttagcagcacgtgttcccgacataacattgtactgtaatggagtgagcgtagcagctcagctctttggatcagtctttgtgatttcatagcgagttttctgaccagcttttgcggagattttgaacagaactgctatttcctctaatgaagaattctgtttagctgtgggtgtgccgggtggggtgtgtgtgatcaaaggacaaagacagtattttgacaaaatacgaagtggagatttacactacattgtacaaggaatgaaagtgtcacgggtaaaaactctaaaaggttaatttctgtcaaatgcagtagatgatgaaagaaaggttggtattatcaggaaatgttttcttaagcttttcctttctcttacacctgccatgcctccccaaattgggcatttaattcatctttaaactggttgttctgttagtcgctaacttagtaagtgcttttcttatagaaccccttctgactgagcaatatgcctccttgtattataaaatctttctgataatgcattagaaggtttttttgtcgattagtaaaagtgctttccatgttactttattcagagctaataagtgctttccttagttttctagtaactaggtgtaaaaatcatgtgttgcagctttatagtttttaaaatattttagataattcttaaactatgaaccttcttaacatcactgtcttgccagattaccgacactgtcacttgaccaatactgaccctctttacctcgcccacgcggacacacgcctcctgtagtcgctttgcctattgatgttcctttgggtctgtgaggttctgtaaactgtgctagtgctgacgatgttctgtacaacttaactcactggcgagaatacagcgtgggacccttcagccactacaacagaattttttaaattgacagttgcagaattgtggagtgtttttacattgatcttttgctaatgcaattagcattatgttttgcatgtatgacttaataaatccttgaatcata

SEQ ID NO: 436646 - DNA, 1962 bp, Homo sapiens
  misc_feature (42)..(42): n is a, c, g, or t
tttttaagttttattttttatttcataagtcaagatgttgtnggaggagggagacggagctgtaggtaaaacttgcctactgatcagttacacaaccaatgcatttcctggagaatatatccctactgtctttgacaattattctgccaatgttatggtagatggaaaaccggtgaatctgggcttatgggatacagctggacaagaagattatgacagattacgccccctatcctatccgcaaacagatgtgttcttaatttgcttttcccttgtgagtcctgcatcatttgaaaatgtccgtgcaaaggtgctgtaaaatacctggagtgctcggcgctcacacagcgaggcctcaagacagtgtttgacgaagcgatccgagcagtcctctgcccgcctcccgtgaagaagaggaagagaaaatgcctgctgttgtaaatgtctcagcccctcgttcttggtcctgtcccttggaacctttgtacgctttgctcaaaaaaaaacaaaaaaaaaaaacaaaaaaaaaaaacaacggtggagccttcgcactcaatgccaactttttgttacagattaatttttccataaaaccattttttgaaccaatcagtaattttaaggttttgtttgttctaaatgtaagagttcagactcacattctattaaaatttagccctaaaatgacaagccttcttaaagccttatttttcaaaagcgccccccccattcttgttcagattaagagttgccaaaataccttctgaactacactgcattgttgtgccgagaacaccgagcactgaactttgcaaagaccttcgtctttgagaagacggtagcttctgcagttaggaggtgcagacacttgctctcctatgtagttctcagatgcgtaaagcagaacagcctcccgaatgaagcgttgccattgaactcaccagtgagttagcagcacgtgttcccgacataacattgtactgtaatggagtgagcgtagcagctcagctctttggatcagtctttgtgatttcatagcgagttttctgaccagcttttgcggagattttgaacagaactgctatttcctctaatgaagaattctgtttagctgtgggtgtgccgggtggggtgtgtgtgatcaaaggacaaagacagtattttgacaaaatacgaagtggagatttacactacattgtacaaggaatgaaagtgtcacgggtaaaaactctaaaaggttaatttctgtcaaatgcagtagatgatgaaagaaaggttggtattatcaggaaatgttttcttaagcttttcctttctcttacacctgccatgcctccccaaattgggcatttaattcatctttaaactggttgttctgttagtcgctaacttagtaagtgcttttcttatagaaccccttctgactgagcaatatgcctccttgtattataaaatctttctgataatgcattagaaggtttttttgtcgattagtaaaagtgctttccatgttactttattcagagctaataagtgctttccttagttttctagtaactaggtgtaaaaatcatgtgttgcagctttatagtttttaaaatattttagataattcttaaactatgaaccttcttaacatcactgtcttgccagattaccgacactgtcacttgaccaatactgaccctctttacctcgcccacgcggacacacgcctcctgtagtcgctttgcctattgatgttcctttgggtctgtgaggttctgtaaactgtgctagtgctgacgatgttctgtacaacttaactcactggcgagaatacagcgtgggacccttcagccactacaacagaattttttaaattgacagttgcagaattgtggagtgtttttacattgatcttttgctaatgcaattagcattatgttttgcatgtatgacttaataaatccttgaatcata

SEQ ID NO: 436647 - DNA, 1266 bp, Homo sapiens
  misc_feature (32)..(32): n is a, c, g, or t
  misc_feature (35)..(35): n is a, c, g, or t
ggatggtgttctagaggatcccagcggcgccnttntttgttcagattaagagttgccaaaataccttctgaactacactgcattgttgtgccgagaacaccgagcactgaactttgcaaagaccttcgtctttgagaagacggtagcttctgcagttaggaggtgcagacacttgctctcctatgtagttctcagatgcgtaaagcagaacagcctcccgaatgaagcgttgccattgaactcaccagtgagttagcagcacgtgttcccgacataacattgtactgtaatggagtgagcgtagcagctcagctctttggatcagtctttgtgatttcatagcgagttttctgaccagcttttgcggagattttgaacagaactgctatttcctctaatgaagaattctgtttagctgtgggtgtgccgggtggggtgtgtgtgatcaaaggacaaagacagtattttgacaaaatacgaagtggagatttacactacattgtacaaggaatgaaagtgtcacgggtaaaaactctaaaaggttaatttctgtcaaatgcagtagatgatgaaagaaaggttggtattatcaggaaatgttttcttaagcttttcctttctcttacacctgccatgcctccccaaattgggcatttaattcatctttaaactggttgttctgttagtcgctaacttagtaagtgcttttcttatagaaccccttctgactgagcaatatgcctccttgtattataaaatctttctgataatgcattagaaggtttttttgtcgattagtaaaagtgctttccatgttactttattcagagctaataagtgctttccttagttttctagtaactaggtgtaaaaatcatgtgttgcagctttatagtttttaaaatattttagataattcttaaactatgaaccttcttaacatcactgtcttgccagattaccgacactgtcacttgaccaatactgaccctctttacctcgcccacgcggacacacgcctcctgtagtcgctttgcctattgatgttcctttgggtctgtgaggttctgtaaactgtgctagtgctgacgatgttctgtacaacttaactcactggcgagaatacagcgtgggacccttcagccactacaacagaattttttaaattgacagttgcagaattgtggagtgtttttacattgatcttttgctaatgcaattagcattatgttttgcatgtatgacttaataaatccttgaatcata

SEQ ID NO: 436648 - DNA, 1127 bp, Homo sapiens
ctgcttagagagagagacagagagagtaggaagttctggagatgggtagcgatatgcttgaccgacaacgtgaatgtacttaatgtcactgaattgcacattcaaaaagggctaaagtggtgaattttacattctgtatattgtactgtaatggagtgagcgtagcagctcagctctttggatcagtctttgtgatttcatagcgagttttctgaccagcttttgcggagattttgaacagaactgctatttcctctaatgaagaattctgtttagctgtgggtgtgccgggtggggtgtgtgtgatcaaaggacaaagacagtattttgacaaaatacgaagtggagatttacactacattgtacaaggaatgaaagtgtcacgggtaaaaactctaaaaggttaatttctgtcaaatgcagtagatgatgaaagaaaggttggtattatcaggaaatgttttcttaagcttttcctttctcttacacctgccatgcctccccaaattgggcatttaattcatctttaaactggttgttctgttagtcgctaacttagtaagtgcttttcttatagaaccccttctgactgagcaatatgcctccttgtattataaaatctttctgataatgcattagaaggtttttttgtcgattagtaaaagtgctttccatgttactttattcagagctaataagtgctttccttagttttctagtaactaggtgtaaaaatcatgtgttgcagctttatagtttttaaaatattttagataattcttaaactatgaaccttcttaacatcactgtcttgccagattaccgacactgtcacttgaccaatactgaccctctttacctcgcccacgcggacacacgcctcctgtagtcgctttgcctattgatgttcctttgggtctgtgaggttctgtaaactgtgctagtgctgacgatgttctgtacaacttaactcactggcgagaatacagcgtgggacccttcagccactacaacagaattttttaaattgacagttgcagaattgtggagtgtttttacattgatcttttgctaatgcaattagcattatgttttgcatgtatgacttaataaatccttgaatcata

SEQ ID NO: 436649 - DNA, 779 bp, Homo sapiens
gctggtcctagaggatcccctctatgaaagtgtcacgggtaaaaactctaaaaggttaatttctgtcaaatgcagtagatgatgaaagaaaggttggtattatcaggaaatgttttcttaagcttttcctttctcttacacctgccatgcctccccaaattgggcatttaattcatctttaaactggttgttctgttagtcgctaacttagtaagtgcttttcttatagaaccccttctgactgagcaatatgcctccttgtattataaaatctttctgataatgcattagaaggtttttttgtcgattagtaaaagtgctttccatgttactttattcagagctaataagtgctttccttagttttctagtaactaggtgtaaaaatcatgtgttgcagctttatagtttttaaaatattttagataattcttaaactatgaaccttcttaacatcactgtcttgccagattaccgacactgtcacttgaccaatactgaccctctttacctcgcccacgcggacacacgcctcctgtagtcgctttgcctattgatgttcctttgggtctgtgaggttctgtaaactgtgctagtgctgacgatgttctgtacaacttaactcactggcgagaatacagcgtgggacccttcagccactacaacagaattttttaaattgacagttgcagaattgtggagtgtttttacattgatcttttgctaatgcaattagcattatgttttgcatgtatgacttaataaatccttgaatcata

SEQ ID NO: 436650 - DNA, 524 bp, Homo sapiens
atcgatgccacaaaaataaacatttctcaccacagttgaagttcctgtgattggaaaaatgtactccacactgaaaaagttttgtatatttatgagtgctttccttagttttctagtaactaggtgtaaaaatcatgtgttgcagctttatagtttttaaaatattttagataattcttaaactatgaaccttcttaacatcactgtcttgccagattaccgacactgtcacttgaccaatactgaccctctttacctcgcccacgcggacacacgcctcctgtagtcgctttgcctattgatgttcctttgggtctgtgaggttctgtaaactgtgctagtgctgacgatgttctgtacaacttaactcactggcgagaatacagcgtgggacccttcagccactacaacagaattttttaaattgacagttgcagaattgtggagtgtttttacattgatcttttgctaatgcaattagcattatgttttgcatgtatgacttaataaatccttgaatcata

SEQ ID NO: 436651 - DNA, 910 bp, Homo sapiens
actccgggagcggcgcgggcgggagcggcgcgggcgggagcggccccgcccggaacctgggagcggcggcgccggcgcgggggaggggaggccggatgtgagtggagcggccatttcctgtttctctgcagttttcctcagctttgggtggtggccgctgccgggcatcggcttccagtccgcggagggcgaggcggcgtggacagcggccccggcacccagcgccccgccgcccgcaagccgcgcgcccgtccgccgcgccccgagcccgccgcttcctatctcagcgccctgccgccgccgccgcggcccagcgagcggccctgatgcaggccatcaagtgtgtggtggtgggagacggagctgtaggtaaaacttgcctactgatcagttacacaaccaatgcatttcctggagaatatatccctactgtctttgacaattattctgccaatgttatggtagatggaaaaccggtgaatctgggcttatgggatacagctggacaagaagattatgacagattacgccccctatcctatccgcaaacagatgtgttcttaatttgcttttcccttgtgagtcctgcatcatttgaaaatgtccgtgcaaagtggtatcctgaggtgcggcaccactgtcccaacactcccatcatcctagtgggaactaaacttgatcttagggatgataaagacacgatcgagaaactgaaggagaagaagctgactcccatcacctatccgcagggtctagccatggctaaggagattgttgctgtaaaatacctgtagtgctcgtcgctcacacagcaaagaccttttggggtctttgctcttttgtgtctttgctggtcatagatcattcatgtcagacctcaccaaattatacattttacataaatatttaa

SEQ ID NO: 436652 - DNA, 497 bp, Homo sapiens
  misc_feature (145)..(145): n is a, c, g, or t
aaggatttattaagtcatacatgcaaaacataatgctaattgcattagcaaaagatcaatgtaaaaacactccacaattctgcaactgtcaatttaaaaaattctgttgtagtggctgaagggtcccacgctgtattctcgccangtgagttaaactatgaaccttcttaacatcactgtcttgccagattaccgacactgtcacttgaccaatactgaccctctttacctcgcccacgcggacacacgcctcctgtagtcgctttgcctattgatgttcctttgggtctgtgaggttctgtaaactgtgctagtgctgacgatgttctgtacaacttaactcactggcgagaatacagcgtgggacccttcagccactacaacagaattttttaaattgacagttgcagaattgtggagtgtttttacattgatcttttgctaatgcaattagcattatgttttgcatgtatgacttaataaatccttgaatcata

SEQ ID NO: 436653 - DNA, 381 bp, Homo sapiens
tgtgcaggtggcatccctgaggattcagagcttcagtggacgtgagtgctccagctgcataactcactgaagattaccgacactgtcacttgaccaatactgaccctctttacctcgcccacgcggacacacgcctcctgtagtcgctttgcctattgatgttcctttgggtctgtgaggttctgtaaactgtgctagtgctgacgatgttctgtacaacttaactcactggcgagaatacagcgtgggacccttcagccactacaacagaattttttaaattgacagttgcagaattgtggagtgtttttacattgatcttttgctaatgcaattagcattatgttttgcatgtatgacttaataaatccttgaatcata

SEQ ID NO: 436654 - DNA, 595 bp, Homo sapiens
atttctgacggtgatttgtttcacttaaatagcttgttgtttgtttctttcatttctcttaagttttgggttgggtttggtttgtttcccgcaagttttgcccgtgccgccttcctccttgtgcctgcagggacatttgctggtgtggcagcctccaggcccgtccccagcctttttcttggcacaccttctctaggatggctgggacagtgacttagcttctacacctgtgactaaccattttcattccattctacagctttgacaattattctgccaatgttatggtagatggaaaaccggtgaatctgggcttatgggatacagctggacaagaagattatgacagattacgccccctatcctatccgcaaacagtaaggattgcagctgacttttaatgtgtcttttagagtatataattctcgagcgcttaattagtgcatgttacctatggacttgcttatattgccatcatttgggtattgagtaaatagcaaacagggtgggattggttccatgtaaacatccccctagatgcaagcccaggggttttgtgttttgagcgttaccagctgttccattgtcgagcact

SEQ ID NO: 436655 - DNA, 410 bp, Homo sapiens
ggtctggtctgatcctcctgatccttgaagagcttccagcatcattctcccttcatgctccccattttcataagtaactggtggcttgacatgctgggtttggtttgggagccctctgacaaactgaaagggtggatcaggaagcgtctgaccacaccactggtagacacgctctgcgtccaacaagtccttcccagcaacatgtagaaagcaaagtgcatgcttcattctaaggttgttgtctaaatgtttccctgtgtttcctttttgtaggatgtgttcttaatttgcttttcccttgtgagtcctgcatcatttgaaaatgtccgtgcaaaggtaggtggggatttaaaatgtgtatgtaagttatagaatgatcctctcagaaataaatactttaaaatatcact

SEQ ID NO: 436656 - DNA, 2426 bp, Homo sapiens
actccgggagcggcgcgggcgggagcggcgcgggcgggagcggccccgcccggaacctgggagcggcggcgccggcgcgggggaggggaggccggatgtgagtggagcggccatttcctgtttctctgcagttttcctcagctttgggtggtggccgctgccgggcatcggcttccagtccgcggagggcgaggcggcgtggacagcggccccggcacccagcgccccgccgcccgcaagccgcgcgcccgtccgccgcgccccgagcccgccgcttcctatctcagcgccctgccgccgccgccgcggcccagcgagcggccctgatgcaggccatcaagtgtgtggtggtgggagacggagctgtaggtaaaacttgcctactgatcagttacacaaccaatgcatttcctggagaatatatccctactgtctttgacaattattctgccaatgttatggtagatggaaaaccggtgaatctgggcttatgggatacagctggacaagaagattatgacagattacgccccctatcctatccgcaaacagatgtgttcttaatttgcttttcccttgtgagtcctgcatcatttgaaaatgtccgtgcaaagtggtatcctgaggtgcggcaccactgtcccaacactcccatcatcctagtgggaactaaacttgatcttagggatgataaagacacgatcgagaaactgaaggagaagaagctgactcccatcacctatccgcagggtctagccatggctaaggagattggtgctgtaaaatacctggagtgctcggcgctcacacagcgaggcctcaagacagtgtttgacgaagcgatccgagcagtcctctgcccgcctcccgtgaagaagaggaagagaaaatgcctgctgttgtaaatgtctcagcccctcgttcttggtcctgtcccttggaacctttgtacgctttgctcaaaaaaaaacaaaaaaaaaaaacaaaaaaaaaaaacaacggtggagccttcgcactcaatgccaactttttgttacagattaatttttccataaaaccattttttgaaccaatcagtaattttaaggttttgtttgttctaaatgtaagagttcagactcacattctattaaaatttagccctaaaatgacaagccttcttaaagccttatttttcaaaagcgccccccccattcttgttcagattaagagttgccaaaataccttctgaactacactgcattgttgtgccgagaacaccgagcactgaactttgcaaagaccttcgtctttgagaagacggtagcttctgcagttaggaggtgcagacacttgctctcctatgtagttctcagatgcgtaaagcagaacagcctcccgaatgaagcgttgccattgaactcaccagtgagttagcagcacgtgttcccgacataacattgtactgtaatggagtgagcgtagcagctcagctctttggatcagtctttgtgatttcatagcgagttttctgaccagcttttgcggagattttgaacagaactgctatttcctctaatgaagaattctgtttagctgtgggtgtgccgggtggggtgtgtgtgatcaaaggacaaagacagtattttgacaaaatacgaagtggagatttacactacattgtacaaggaatgaaagtgtcacgggtaaaaactctaaaaggttaatttctgtcaaatgcagtagatgatgaaagaaaggttggtattatcaggaaatgttttcttaagcttttcctttctcttacacctgccatgcctccccaaattgggcatttaattcatctttaaactggttgttctgttagtcgctaacttagtaagtgcttttcttatagaaccccttctgactgagcaatatgcctccttgtattataaaatctttctgataatgcattagaaggtttttttgtcgattagtaaaagtgctttccatgttactttattcagagctaataagtgctttccttagttttctagtaactaggtgtaaaaatcatgtgttgcagctttatagtttttaaaatattttagataattcttaaactatgaaccttcttaacatcactgtcttgccagattaccgacactgtcacttgaccaatactgaccctctttacctcgcccacgcggacacacgcctcctgtagtcgctttgcctattgatgttcctttgggtctgtgaggttctgtaaactgtgctagtgctgacgatgttctgtacaacttaactcactggcgagaatacagcgtgggacccttcagccactacaacagaattttttaaattgacagttgcagaattgtggagtgtttttacattgatcttttgctaatgcaattagcattatgttttgcatgtatgacttaataaatccttgaatcata

SEQ ID NO: 436657 - DNA, 2936 bp, Homo sapiens
actccgggagcggcgcgggcgggagcggcgcgggcgggagcggccccgcccggaacctgggagcggcggcgccggcgcgggggaggggaggccggatgtgagtggagcggccatttcctgtttctctgcagttttcctcagctttgggtggtggccgctgccgggcatcggcttccagtccgcggagggcgaggcggcgtggacagcggccccggcacccagcgccccgccgcccgcaagccgcgcgcccgtccgccgcgccccgagcccgccgcttcctatctcagcgccctgccgccgccgccgcggcccagcgagcggccctgatgcaggccatcaagtgtgtggtggtgggagacggagctgtaggtaaaacttgcctactgatcagttacacaaccaatgcatttcctggagaatatatccctactgtctttgacaattattctgccaatgttatggtagatggaaaaccggtgaatctgggcttatgggatacagctggacaagaagattatgacagattacgccccctatcctatccgcaaacagatgtgttcttaatttgcttttcccttgtgagtcctgcatcatttgaaaatgtccgtgcaaagtggtatcctgaggtgcggcaccactgtcccaacactcccatcatcctagtgggaactaaacttgatcttagggatgataaagacacgatcgagaaactgaaggagaagaagctgactcccatcacctatccgcagggtctagccatggctaaggagattggtgctgtaaaatacctggagtgctcggcgctcacacagcgaggcctcaagacagtgtttgacgaagcgatccgagcagtcctctgcccgcctcccgtgaagaagaggaagagaaaatgcctgctgttgtaaatgtctcagcccctcgttcttggtcctgtcccttggaacctttgtacgctttgctcaaaaaaaaacaaaaaaaaaaaacaaaaaaaaaaaacaacggtggagccttcgcactcaatgccaactttttgttacagattaatttttccataaaaccattttttgaaccaatcagtaattttaaggttttgtttgttctaaatgtaagagttcagactcacattctattaaaatttagccctaaaatgacaagccttcttaaagccttatttttcaaaagcgccccccccattcttgttcagattaagagttgccaaaataccttctgaactacactgcattgttgtgccgagaacaccgagcactgaactttgcaaagaccttcgtctttgagaagacggtagcttctgcagttaggaggtgcagacacttgctctcctatgtagttctcagatgcgtaaagcagaacagcctcccgaatgaagcgttgccattgaactcaccagtgagttagcagcacgtgttcccgacataacattgtactgtaatggagtgagcgtagcagctcagctctttggatcagtctttgtgatttcatagcgagttttctgaccagcttttgcggagattttgaacagaactgctatttcctctaatgaagaattctgtttagctgtgggtgtgccgggtggggtgtgtgtgatcaaaggacaaagacagtattttgacaaaatacgaagtggagatttacactacattgtacaaggaatgaaagtgtcacgggtaaaaactctaaaaggttaatttctgtcaaatgcagtagatgatgaaagaaaggttggtattatcaggaaatgttttcttaagcttttcctttctcttacacctgccatgcctccccaaattgggcatttaattcatctttaaactggttgttctgttagtcgctaacttagtaagtgcttttcttatagaaccccttctgactgagcaatatgcctccttgtattataaaatctttctgataatgcattagaaggtttttttgtcgattagtaaaagtgctttccatgttactttattcagagctaataagtgctttccttagttttctagtaactaggtgtaaaaatcatgtgttgcagctttatagtttttaaaatattttagataattcttaaactatgaaccttcttaacatcactgtcttgccagattaccgacactgtcacttgaccaatactgaccctctttacctcgcccacgcggacacacgcctcctgtagtcgctttgcctattgatgttcctttgggtctgtgaggttctgtaaactgtgctagtgctgacgatgttctgtacaacttaactcactggcgagaatacagcgtgggacccttcagccactacaacagaattttttaaattgacagttgcagaattgtggagtgtttttacattgatcttttgctaatgcaattagcattatgttttgcatgtatgacttaataaatccttgaatcataaaaaaaaaaaaaaaaaaaaaaaaaaaaaaaaaaaaaaaaaaaaaaaaaaaaaaaaaaaaaaaagaaaaaaaaaaaaaaaagaaaaaaaaaaaaaacaaaaagaaaaaagaaaaaaagaaaaaaagaaaaaagaaaagaacgaaaacagagagggggggcggtaaactaataaaccacgaggagggcacgaaactcacgacagcacctagaacgaaaacgatcaccatatcaaggcagagacaaaacacagaagacagacacgggcagaacaaaacacaacaaagacggctcgggaaacaaaacacacaactggagacgaaagtcaggaaagaagaaacacactcaataagtggaggggaaacacgaagaagacagaacccctacaaaagaacagaaacgtacaacgagcacaaaaaaacaacagtgtgaagtgaaagggaagaccacaagaagaaacagggcgcgaagcgaaaacagcaagacggacaagaaggaaaccaaaaagagagg

SEQ ID NO: 436658 - DNA, 2748 bp, Homo sapiens
actccgggagcggcgcgggcgggagcggcgcgggcgggagcggccccgcccggaacctgggagcggcggcgccggcgcgggggaggggaggccggatgtgagtggagcggccatttcctgtttctctgcagttttcctcagctttgggtggtggccgctgccgggcatcggcttccagtccgcggagggcgaggcggcgtggacagcggccccggcacccagcgccccgccgcccgcaagccgcgcgcccgtccgccgcgccccgagcccgccgcttcctatctcagcgccctgccgccgccgccgcggcccagcgagcggccctgatgcaggccatcaagtgtgtggtggtgggagacggagctgtaggtaaaacttgcctactgatcagttacacaaccaatgcatttcctggagaatatatccctactgtctttgacaattattctgccaatgttatggtagatggaaaaccggtgaatctgggcttatgggatacagctggacaagaagattatgacagattacgccccctatcctatccgcaaacagatgtgttcttaatttgcttttcccttgtgagtcctgcatcatttgaaaatgtccgtgcaaagtggtatcctgaggtgcggcaccactgtcccaacactcccatcatcctagtgggaactaaacttgatcttagggatgataaagacacgatcgagaaactgaaggagaagaagctgactcccatcacctatccgcagggtctagccatggctaaggagattggtgctgtaaaatacctggagtgctcggcgctcacacagcgaggcctcaagacagtgtttgacgaagcgatccgagcagtcctctgcccgcctcccgtgaagaagaggaagagaaaatgcctgctgttgtaaatgtctcagcccctcgttcttggtcctgtcccttggaacctttgtacgctttgctcaaaaaaaaacaaaaaaaaaaaacaaaaaaaaaaaacaacggtggagccttcgcactcaatgccaactttttgttacagattaatttttccataaaaccattttttgaaccaatcagtaattttaaggttttgtttgttctaaatgtaagagttcagactcacattctattaaaatttagccctaaaatgacaagccttcttaaagccttatttttcaaaagcgccccccccattcttgttcagattaagagttgccaaaataccttctgaactacactgcattgttgtgccgagaacaccgagcactgaactttgcaaagaccttcgtctttgagaagacggtagcttctgcagttaggaggtgcagacacttgctctcctatgtagttctcagatgcgtaaagcagaacagcctcccgaatgaagcgttgccattgaactcaccagtgagttagcagcacgtgttcccgacataacattgtactgtaatggagtgagcgtagcagctcagctctttggatcagtctttgtgatttcatagcgagttttctgaccagcttttgcggagattttgaacagaactgctatttcctctaatgaagaattctgtttagctgtgggtgtgccgggtggggtgtgtgtgatcaaaggacaaagacagtattttgacaaaatacgaagtggagatttacactacattgtacaaggaatgaaagtgtcacgggtaaaaactctaaaaggttaatttctgtcaaatgcagtagatgatgaaagaaaggttggtattatcaggaaatgttttcttaagcttttcctttctcttacacctgccatgcctccccaaattgggcatttaattcatctttaaactggttgttctgttagtcgctaacttagtaagtgcttttcttatagaaccccttctgactgagcaatatgcctccttgtattataaaatctttctgataatgcattagaaggtttttttgtcgattagtaaaagtgctttccatgttactttattcagagctaataagtgctttccttagttttctagtaactaggtgtaaaaatcatgtgttgcagctttatagtttttaaaatattttagataattcttaaactatgaaccttcttaacatcactgtcttgccagattaccgacactgtcacttgaccaatactgaccctctttacctcgcccacgcggacacacgcctcctgtagtcgctttgcctattgatgttcctttgggtctgtgaggttctgtaaactgtgctagtgctgacgatgttctgtacaacttaactcactggcgagaatacagcgtgggacccttcagccactacaacagaattttttaaattgacagttgcagaattgtggagtgtttttacattgatcttttgctaatgcaattagcattatgttttgcatgtatgacttaataaatccttgaatcatagacccacaagggtcctgagaggatcataagagcttagagactcaggccttacctcgtgcacataacctagagtgtggagtcttgtacattgcccatcgtcaataaaaactgccacaggtttacccctttgaaaaacaaaaaacaacgaaagcactcattaatcagagcaagaaaacaacaagcactagcaaggacacagcgatacacgacgagtatagacaaatcaaagttcgagtcaagatgatccagctcaagaacaagagaggggatacccagacgatcaaatataggcgactcgaaacagagagaagcagagaagaat

SEQ ID NO: 436659 - DNA, 2787 bp, Homo sapiens
  misc_feature (2666)..(2666): n is a, c, g, or t
  misc_feature (2759)..(2759): n is a, c, g, or t
  misc_feature (2780)..(2780): n is a, c, g, or t
actccgggagcggcgcgggcgggagcggcgcgggcgggagcggccccgcccggaacctgggagcggcggcgccggcgcgggggaggggaggccggatgtgagtggagcggccatttcctgtttctctgcagttttcctcagctttgggtggtggccgctgccgggcatcggcttccagtccgcggagggcgaggcggcgtggacagcggccccggcacccagcgccccgccgcccgcaagccgcgcgcccgtccgccgcgccccgagcccgccgcttcctatctcagcgccctgccgccgccgccgcggcccagcgagcggccctgatgcaggccatcaagtgtgtggtggtgggagacggagctgtaggtaaaacttgcctactgatcagttacacaaccaatgcatttcctggagaatatatccctactgtctttgacaattattctgccaatgttatggtagatggaaaaccggtgaatctgggcttatgggatacagctggacaagaagattatgacagattacgccccctatcctatccgcaaacagatgtgttcttaatttgcttttcccttgtgagtcctgcatcatttgaaaatgtccgtgcaaagtggtatcctgaggtgcggcaccactgtcccaacactcccatcatcctagtgggaactaaacttgatcttagggatgataaagacacgatcgagaaactgaaggagaagaagctgactcccatcacctatccgcagggtctagccatggctaaggagattggtgctgtaaaatacctggagtgctcggcgctcacacagcgaggcctcaagacagtgtttgacgaagcgatccgagcagtcctctgcccgcctcccgtgaagaagaggaagagaaaatgcctgctgttgtaaatgtctcagcccctcgttcttggtcctgtcccttggaacctttgtacgctttgctcaaaaaaaaacaaaaaaaaaaaacaaaaaaaaaaaacaacggtggagccttcgcactcaatgccaactttttgttacagattaatttttccataaaaccattttttgaaccaatcagtaattttaaggttttgtttgttctaaatgtaagagttcagactcacattctattaaaatttagccctaaaatgacaagccttcttaaagccttatttttcaaaagcgccccccccattcttgttcagattaagagttgccaaaataccttctgaactacactgcattgttgtgccgagaacaccgagcactgaactttgcaaagaccttcgtctttgagaagacggtagcttctgcagttaggaggtgcagacacttgctctcctatgtagttctcagatgcgtaaagcagaacagcctcccgaatgaagcgttgccattgaactcaccagtgagttagcagcacgtgttcccgacataacattgtactgtaatggagtgagcgtagcagctcagctctttggatcagtctttgtgatttcatagcgagttttctgaccagcttttgcggagattttgaacagaactgctatttcctctaatgaagaattctgtttagctgtgggtgtgccgggtggggtgtgtgtgatcaaaggacaaagacagtattttgacaaaatacgaagtggagatttacactacattgtacaaggaatgaaagtgtcacgggtaaaaactctaaaaggttaatttctgtcaaatgcagtagatgatgaaagaaaggttggtattatcaggaaatgttttcttaagcttttcctttctcttacacctgccatgcctccccaaattgggcatttaattcatctttaaactggttgttctgttagtcgctaacttagtaagtgcttttcttatagaaccccttctgactgagcaatatgcctccttgtattataaaatctttctgataatgcattagaaggtttttttgtcgattagtaaaagtgctttccatgttactttattcagagctaataagtgctttccttagttttctagtaactaggtgtaaaaatcatgtgttgcagctttatagtttttaaaatattttagataattcttaaactatgaaccttcttaacatcactgtcttgccagattaccgacactgtcacttgaccaatactgaccctctttacctcgcccacgcggacacacgcctcctgtagtcgctttgcctattgatgttcctttgggtctgtgaggttctgtaaactgtgctagtgctgacgatgttctgtacaacttaactcactggcgagaatacagcgtgggacccttcagccactacaacagaattttttaaattgcattagcaaaagatcaatgtaaaaacactcccaacattccgggacagggagatcatgtttcacgtttccacaaagctgccatttaccgacggagacgcccagcagctccagagaaagagacacattggaaatgacatcgtggccatcatcttccaagaggaaaacacgccgtttgtcccagacatgatagcctccaatttcttacatgcctacatcgtcgtgcaggtcgagaccccaggcacagagaccccatcctacaaggtaaggagaacgccttgttggagggagtggtgggcctcgacacctcaccctgtgtggatgctgtgatatcagaggncactagtctcagcagtcagagatttccatgagtttgcaggtttctggggttggagctagattctggtagggagaccttcaaggccactgatcncttgctgctcggtcatggatntacttga

SEQ ID NO: 436660 - DNA, 2161 bp, Homo sapiens
actccgggagcggcgcgggcgggagcggcgcgggcgggagcggccccgcccggaacctgggagcggcggcgccggcgcgggggaggggaggccggatgtgagtggagcggccatttcctgtttctctgcagttttcctcagctttgggtggtggccgctgccgggcatcggcttccagtccgcggagggcgaggcggcgtggacagcggccccggcacccagcgccccgccgcccgcaagccgcgcgcccgtccgccgcgccccgagcccgccgcttcctatctcagcgccctgccgccgccgccgcggcccagcgagcggccctgatgcaggccatcaagtgtgtggtggtgggagacggagctgtaggtaaaacttgcctactgatcagttacacaaccaatgcatttcctggagaatatatccctactgtctttgacaattattctgccaatgttatggtagatggaaaaccggtgaatctgggcttatgggatacagctggacaagaagattatgacagattacgccccctatcctatccgcaaacagatgtgttcttaatttgcttttcccttgtgagtcctgcatcatttgaaaatgtccgtgcaaagtggtatcctgaggtgcggcaccactgtcccaacactcccatcatcctagtgggaactaaacttgatcttagggatgataaagacacgatcgagaaactgaaggagaagaagctgactcccatcacctatccgcagggtctagccatggctaaggagattggtgctgtaaaatacctggagtgctcggcgctcacacagcgaggcctcaagacagtgtttgacgaagcgatccgagcagtcctctgcccgcctcccgtgaagaagaggaagagaaaatgcctgctgttgtaaatgtctcagcccctcgttcttggtcctgtcccttggaacctttgtacgctttgctcaaaaaaaaacaaaaaaaaaaaacaaaaaaaaaaaacaacggtggagccttcgcactcaatgccaactttttgttacagattaatttttccataaaaccattttttgaaccaatcagtaattttaaggttttgtttgttctaaatgtaagagttcagactcacattctattaaaatttagccctaaaatgacaagccttcttaaagccttatttttcaaaagcgccccccccattcttgttcagattaagagttgccaaaataccttctgaactacactgcattgttgtgccgagaacaccgagcactgaactttgcaaagaccttcgtctttgagaagacggtagcttctgcagttaggaggtgcagacacttgctctcctatgtagttctcagatgcgtaaagcagaacagcctcccgaatgaagcgttgccattgaactcaccagtgagttagcagcacgtgttcccgacataacattgtactgtaatggagtgagcgtagcagctcagctctttggatcagtctttgtgatttcatagcgagttttctgaccagcttttgcggagattttgaacagaactgctatttcctctaatgaagaattctgtttagctgtgggtgtgccgggtggggtgtgtgtgatcaaaggacaaagacagtattttgacaaaatacgaagtggagatttacactacattgtacaaggaatgaaagtgtcacgggtaaaaactctaaaaggttaatttctgtcaaatgcagtagatgatgaaagaaaggttggtattatcaggaaatgttttcttaagcttttcctttctcttacacctgccatgcctccccaaattgggcatttaattcatctttaaactggttgttctgttagtcgctaacttagtaagtgcttttcttatagaaccccttctgactgagcaatatgcctccttgtattataaaatctttctgataatgcattagaaggtttttttgtcgattagtaaaagtgctttccatgttactttattcagagctaataagtgctttccttagttttctagtaactaggtgtaaaaatcatgtgttgcagctttatagtttttaaaatattttagataattcttaaactatgaaccttcttaacatcactgtcttgccattgcatccagaggacacttgcatccgaggggatcctctgaatcac

SEQ ID NO: 436661 - DNA, 2122 bp, Homo sapiens
  misc_feature (42)..(42): n is a, c, g, or t
tttttaagttttattttttatttcataagtcaagatgttgtnggaggagggagacggagctgtaggtaaaacttgcctactgatcagttacacaaccaatgcatttcctggagaatatatccctactgtctttgacaattattctgccaatgttatggtagatggaaaaccggtgaatctgggcttatgggatacagctggacaagaagattatgacagattacgccccctatcctatccgcaaacagatgtgttcttaatttgcttttcccttgtgagtcctgcatcatttgaaaatgtccgtgcaaagtggtatcctgaggtgcggcaccactgtcccaacactcccatcatcctagtgggaactaaacttgatcttagggatgataaagacacgatcgagaaactgaaggagaagaagctgactcccatcacctatccgcagggtctagccatggctaaggagattggtgctgtaaaatacctggagtgctcggcgctcacacagcgaggcctcaagacagtgtttgacgaagcgatccgagcagtcctctgcccgcctcccgtgaagaagaggaagagaaaatgcctgctgttgtaaatgtctcagcccctcgttcttggtcctgtcccttggaacctttgtacgctttgctcaaaaaaaaacaaaaaaaaaaaacaaaaaaaaaaaacaacggtggagccttcgcactcaatgccaactttttgttacagattaatttttccataaaaccattttttgaaccaatcagtaattttaaggttttgtttgttctaaatgtaagagttcagactcacattctattaaaatttagccctaaaatgacaagccttcttaaagccttatttttcaaaagcgccccccccattcttgttcagattaagagttgccaaaataccttctgaactacactgcattgttgtgccgagaacaccgagcactgaactttgcaaagaccttcgtctttgagaagacggtagcttctgcagttaggaggtgcagacacttgctctcctatgtagttctcagatgcgtaaagcagaacagcctcccgaatgaagcgttgccattgaactcaccagtgagttagcagcacgtgttcccgacataacattgtactgtaatggagtgagcgtagcagctcagctctttggatcagtctttgtgatttcatagcgagttttctgaccagcttttgcggagattttgaacagaactgctatttcctctaatgaagaattctgtttagctgtgggtgtgccgggtggggtgtgtgtgatcaaaggacaaagacagtattttgacaaaatacgaagtggagatttacactacattgtacaaggaatgaaagtgtcacgggtaaaaactctaaaaggttaatttctgtcaaatgcagtagatgatgaaagaaaggttggtattatcaggaaatgttttcttaagcttttcctttctcttacacctgccatgcctccccaaattgggcatttaattcatctttaaactggttgttctgttagtcgctaacttagtaagtgcttttcttatagaaccccttctgactgagcaatatgcctccttgtattataaaatctttctgataatgcattagaaggtttttttgtcgattagtaaaagtgctttccatgttactttattcagagctaataagtgctttccttagttttctagtaactaggtgtaaaaatcatgtgttgcagctttatagtttttaaaatattttagataattcttaaactatgaaccttcttaacatcactgtcttgccagattaccgacactgtcacttgaccaatactgaccctctttacctcgcccacgcggacacacgcctcctgtagtcgctttgcctattgatgttcctttgggtctgtgaggttctgtaaactgtgctagtgctgacgatgttctgtacaacttaactcactggcgagaatacagcgtgggacccttcagccactacaacagaattttttaaattgacagttgcagaattgtggagtgtttttacattgatcttttgctaatgcaattagcattatgttttgcatgtatgacttaataaatccttgaatcata

SEQ ID NO: 436662 - DNA, 2483 bp, Homo sapiens
actccgggagcggcgcgggcgggagcggcgcgggcgggagcggccccgcccggaacctgggagcggcggcgccggcgcgggggaggggaggccggatgtgagtggagcggccatttcctgtttctctgcagttttcctcagctttgggtggtggccgctgccgggcatcggcttccagtccgcggagggcgaggcggcgtggacagcggccccggcacccagcgccccgccgcccgcaagccgcgcgcccgtccgccgcgccccgagcccgccgcttcctatctcagcgccctgccgccgccgccgcggcccagcgagcggccctgatgcaggccatcaagtgtgtggtggtgggagacggagctgtaggtaaaacttgcctactgatcagttacacaaccaatgcatttcctggagaatatatccctactgtctttgacaattattctgccaatgttatggtagatggaaaaccggtgaatctgggcttatgggatacagctggacaagaagattatgacagattacgccccctatcctatccgcaaacagttggagaaacgtacggtaaggatataacctcccggggcaaagacaagccgattgccgatgtgttcttaatttgcttttcccttgtgagtcctgcatcatttgaaaatgtccgtgcaaagtggtatcctgaggtgcggcaccactgtcccaacactcccatcatcctagtgggaactaaacttgatcttagggatgataaagacacgatcgagaaactgaaggagaagaagctgactcccatcacctatccgcagggtctagccatggctaaggagattggtgctgtaaaatacctggagtgctcggcgctcacacagcgaggcctcaagacagtgtttgacgaagcgatccgagcagtcctctgcccgcctcccgtgaagaagaggaagagaaaatgcctgctgttgtaaatgtctcagcccctcgttcttggtcctgtcccttggaacctttgtacgctttgctcaaaaaaaaacaaaaaaaaaaaacaaaaaaaaaaaacaacggtggagccttcgcactcaatgccaactttttgttacagattaatttttccataaaaccattttttgaaccaatcagtaattttaaggttttgtttgttctaaatgtaagagttcagactcacattctattaaaatttagccctaaaatgacaagccttcttaaagccttatttttcaaaagcgccccccccattcttgttcagattaagagttgccaaaataccttctgaactacactgcattgttgtgccgagaacaccgagcactgaactttgcaaagaccttcgtctttgagaagacggtagcttctgcagttaggaggtgcagacacttgctctcctatgtagttctcagatgcgtaaagcagaacagcctcccgaatgaagcgttgccattgaactcaccagtgagttagcagcacgtgttcccgacataacattgtactgtaatggagtgagcgtagcagctcagctctttggatcagtctttgtgatttcatagcgagttttctgaccagcttttgcggagattttgaacagaactgctatttcctctaatgaagaattctgtttagctgtgggtgtgccgggtggggtgtgtgtgatcaaaggacaaagacagtattttgacaaaatacgaagtggagatttacactacattgtacaaggaatgaaagtgtcacgggtaaaaactctaaaaggttaatttctgtcaaatgcagtagatgatgaaagaaaggttggtattatcaggaaatgttttcttaagcttttcctttctcttacacctgccatgcctccccaaattgggcatttaattcatctttaaactggttgttctgttagtcgctaacttagtaagtgcttttcttatagaaccccttctgactgagcaatatgcctccttgtattataaaatctttctgataatgcattagaaggtttttttgtcgattagtaaaagtgctttccatgttactttattcagagctaataagtgctttccttagttttctagtaactaggtgtaaaaatcatgtgttgcagctttatagtttttaaaatattttagataattcttaaactatgaaccttcttaacatcactgtcttgccagattaccgacactgtcacttgaccaatactgaccctctttacctcgcccacgcggacacacgcctcctgtagtcgctttgcctattgatgttcctttgggtctgtgaggttctgtaaactgtgctagtgctgacgatgttctgtacaacttaactcactggcgagaatacagcgtgggacccttcagccactacaacagaattttttaaattgacagttgcagaattgtggagtgtttttacattgatcttttgctaatgcaattagcattatgttttgcatgtatgacttaataaatccttgaatcata

SEQ ID NO: 436663 - DNA, 1996 bp, Homo sapiens
cgtgtggtctgttggcgtgtggtctgtgctggtactgtgctccgtgtggtcttgtggcggcgtgtggtcctgtggacaagaagattatgacagattacgccccctatcctatccgcaaacagatgtgttcttaatttgcttttcccttgtgagtcctgcatcatttgaaaatgtccgtgcaaagtggtatcctgaggtgcggcaccactgtcccaacactcccatcatcctagtgggaactaaacttgatcttagggatgataaagacacgatcgagaaactgaaggagaagaagctgactcccatcacctatccgcagggtctagccatggctaaggagattggtgctgtaaaatacctggagtgctcggcgctcacacagcgaggcctcaagacagtgtttgacgaagcgatccgagcagtcctctgcccgcctcccgtgaagaagaggaagagaaaatgcctgctgttgtaaatgtctcagcccctcgttcttggtcctgtcccttggaacctttgtacgctttgctcaaaaaaaaacaaaaaaaaaaaacaaaaaaaaaaaacaacggtggagccttcgcactcaatgccaactttttgttacagattaatttttccataaaaccattttttgaaccaatcagtaattttaaggttttgtttgttctaaatgtaagagttcagactcacattctattaaaatttagccctaaaatgacaagccttcttaaagccttatttttcaaaagcgccccccccattcttgttcagattaagagttgccaaaataccttctgaactacactgcattgttgtgccgagaacaccgagcactgaactttgcaaagaccttcgtctttgagaagacggtagcttctgcagttaggaggtgcagacacttgctctcctatgtagttctcagatgcgtaaagcagaacagcctcccgaatgaagcgttgccattgaactcaccagtgagttagcagcacgtgttcccgacataacattgtactgtaatggagtgagcgtagcagctcagctctttggatcagtctttgtgatttcatagcgagttttctgaccagcttttgcggagattttgaacagaactgctatttcctctaatgaagaattctgtttagctgtgggtgtgccgggtggggtgtgtgtgatcaaaggacaaagacagtattttgacaaaatacgaagtggagatttacactacattgtacaaggaatgaaagtgtcacgggtaaaaactctaaaaggttaatttctgtcaaatgcagtagatgatgaaagaaaggttggtattatcaggaaatgttttcttaagcttttcctttctcttacacctgccatgcctccccaaattgggcatttaattcatctttaaactggttgttctgttagtcgctaacttagtaagtgcttttcttatagaaccccttctgactgagcaatatgcctccttgtattataaaatctttctgataatgcattagaaggtttttttgtcgattagtaaaagtgctttccatgttactttattcagagctaataagtgctttccttagttttctagtaactaggtgtaaaaatcatgtgttgcagctttatagtttttaaaatattttagataattcttaaactatgaaccttcttaacatcactgtcttgccagattaccgacactgtcacttgaccaatactgaccctctttacctcgcccacgcggacacacgcctcctgtagtcgctttgcctattgatgttcctttgggtctgtgaggttctgtaaactgtgctagtgctgacgatgttctgtacaacttaactcactggcgagaatacagcgtgggacccttcagccactacaacagaattttttaaattgacagttgcagaattgtggagtgtttttacattgatcttttgctaatgcaattagcattatgttttgcatgtatgacttaataaatccttgaatcata

SEQ ID NO: 436664 - DNA, 2249 bp, Homo sapiens
ttctgggattatagacgtgagccaccacgcccggcctctgccaatttttatatgtgatttgatcatctcagaggggcccaacacagctgcagattagctgtttgcagccactttattgtaagtcttaacatggtgtccttctgtgaaccacagtgattcttctcattcactcaccaggataggataccccattatgtgcctttgacaattattctgccaatgttatggtagatggaaaaccggtgaatctgggcttatgggatacagctggacaagaagattatgacagattacgccccctatcctatccgcaaacagttggagaaacgtacggtaaggatataacctcccggggcaaagacaagccgattgccgatgtgttcttaatttgcttttcccttgtgagtcctgcatcatttgaaaatgtccgtgcaaagtggtatcctgaggtgcggcaccactgtcccaacactcccatcatcctagtgggaactaaacttgatcttagggatgataaagacacgatcgagaaactgaaggagaagaagctgactcccatcacctatccgcagggtctagccatggctaaggagattggtgctgtaaaatacctggagtgctcggcgctcacacagcgaggcctcaagacagtgtttgacgaagcgatccgagcagtcctctgcccgcctcccgtgaagaagaggaagagaaaatgcctgctgttgtaaatgtctcagcccctcgttcttggtcctgtcccttggaacctttgtacgctttgctcaaaaaaaaacaaaaaaaaaaaacaaaaaaaaaaaacaacggtggagccttcgcactcaatgccaactttttgttacagattaatttttccataaaaccattttttgaaccaatcagtaattttaaggttttgtttgttctaaatgtaagagttcagactcacattctattaaaatttagccctaaaatgacaagccttcttaaagccttatttttcaaaagcgccccccccattcttgttcagattaagagttgccaaaataccttctgaactacactgcattgttgtgccgagaacaccgagcactgaactttgcaaagaccttcgtctttgagaagacggtagcttctgcagttaggaggtgcagacacttgctctcctatgtagttctcagatgcgtaaagcagaacagcctcccgaatgaagcgttgccattgaactcaccagtgagttagcagcacgtgttcccgacataacattgtactgtaatggagtgagcgtagcagctcagctctttggatcagtctttgtgatttcatagcgagttttctgaccagcttttgcggagattttgaacagaactgctatttcctctaatgaagaattctgtttagctgtgggtgtgccgggtggggtgtgtgtgatcaaaggacaaagacagtattttgacaaaatacgaagtggagatttacactacattgtacaaggaatgaaagtgtcacgggtaaaaactctaaaaggttaatttctgtcaaatgcagtagatgatgaaagaaaggttggtattatcaggaaatgttttcttaagcttttcctttctcttacacctgccatgcctccccaaattgggcatttaattcatctttaaactggttgttctgttagtcgctaacttagtaagtgcttttcttatagaaccccttctgactgagcaatatgcctccttgtattataaaatctttctgataatgcattagaaggtttttttgtcgattagtaaaagtgctttccatgttactttattcagagctaataagtgctttccttagttttctagtaactaggtgtaaaaatcatgtgttgcagctttatagtttttaaaatattttagataattcttaaactatgaaccttcttaacatcactgtcttgccagattaccgacactgtcacttgaccaatactgaccctctttacctcgcccacgcggacacacgcctcctgtagtcgctttgcctattgatgttcctttgggtctgtgaggttctgtaaactgtgctagtgctgacgatgttctgtacaacttaactcactggcgagaatacagcgtgggacccttcagccactacaacagaattttttaaattgacagttgcagaattgtggagtgtttttacattgatcttttgctaatgcaattagcattatgttttgcatgtatgacttaataaatccttgaatcata

SEQ ID NO: 436665 - DNA, 2714 bp, Homo sapiens
actccgggagcggcgcgggcgggagcggcgcgggcgggagcggccccgcccggaacctgggagcggcggcgccggcgcgggggaggggaggccggatgtgagtggagcggccatttcctgtttctctgcagttttcctcagctttgggtggtggccgctgccgggcatcggcttccagtccgcggagggcgaggcggcgtggacagcggccccggcacccagcgccccgccgcccgcaagccgcgcgcccgtccgccgcgccccgagcccgccgcttcctatctcagcgccctgccgccgccgccgcggcccagcgagcggccctgatgcaggccatcaagtgtgtggtggtgggagacggagctgtaggtaaaacttgcctactgatcagttacacaaccaatgcatttcctggagaatatatccctactgtctttgacaattattctgccaatgttatggtagatggaaaaccggtgaatctgggcttatgggatacagctggacaagaagattatgacagattacgccccctatcctatccgcaaacagatgtgttcttaatttgcttttcccttgtgagtcctgcatcatttgaaaatgtccgtgcaaagtggtatcctgaggtgcggcaccactgtcccaacactcccatcatcctagtgggaactaaacttgatcttagggatgataaagacacgatcgagaaactgaaggagaagaagctgactcccatcacctatccgcagggtctagccatggctaaggagattggtatggaatcctgtgtttttcctcctccttgtacctcttttattgtagtgacagagactggagtccagtctgggaaaggagggtgtgtgtctcccactcagggcctggtgtactcttggggaaccagctggcaaggccctgtgggtcttaacgtcagcgttggaaggtggaagcagggctgggagccggcagaaggcgcccgggccccaggagctgcctcccgctggtggtgtgatcagaagagagtggggtcgagtgtacattgccgtgtggtcgtgtttcctgtaggtgctgtaaaatacctggagtgctcggcgctcacacagcgaggcctcaagacagtgtttgacgaagcgatccgagcagtcctctgcccgcctcccgtgaagaagaggaagagaaaatgcctgctgttgtaaatgtctcagcccctcgttcttggtcctgtcccttggaacctttgtacgctttgctcaaaaaaaaacaaaaaaaaaaaacaaaaaaaaaaaacaacggtggagccttcgcactcaatgccaactttttgttacagattaatttttccataaaaccattttttgaaccaatcagtaattttaaggttttgtttgttctaaatgtaagagttcagactcacattctattaaaatttagccctaaaatgacaagccttcttaaagccttatttttcaaaagcgccccccccattcttgttcagattaagagttgccaaaataccttctgaactacactgcattgttgtgccgagaacaccgagcactgaactttgcaaagaccttcgtctttgagaagacggtagcttctgcagttaggaggtgcagacacttgctctcctatgtagttctcagatgcgtaaagcagaacagcctcccgaatgaagcgttgccattgaactcaccagtgagttagcagcacgtgttcccgacataacattgtactgtaatggagtgagcgtagcagctcagctctttggatcagtctttgtgatttcatagcgagttttctgaccagcttttgcggagattttgaacagaactgctatttcctctaatgaagaattctgtttagctgtgggtgtgccgggtggggtgtgtgtgatcaaaggacaaagacagtattttgacaaaatacgaagtggagatttacactacattgtacaaggaatgaaagtgtcacgggtaaaaactctaaaaggttaatttctgtcaaatgcagtagatgatgaaagaaaggttggtattatcaggaaatgttttcttaagcttttcctttctcttacacctgccatgcctccccaaattgggcatttaattcatctttaaactggttgttctgttagtcgctaacttagtaagtgcttttcttatagaaccccttctgactgagcaatatgcctccttgtattataaaatctttctgataatgcattagaaggtttttttgtcgattagtaaaagtgctttccatgttactttattcagagctaataagtgctttccttagttttctagtaactaggtgtaaaaatcatgtgttgcagctttatagtttttaaaatattttagataattcttaaactatgaaccttcttaacatcactgtcttgccagattaccgacactgtcacttgaccaatactgaccctctttacctcgcccacgcggacacacgcctcctgtagtcgctttgcctattgatgttcctttgggtctgtgaggttctgtaaactgtgctagtgctgacgatgttctgtacaacttaactcactggcgagaatacagcgtgggacccttcagccactacaacagaattttttaaattgacagttgcagaattgtggagtgtttttacattgatcttttgctaatgcaattagcattatgttttgcatgtatgacttaataaatccttgaatcata

SEQ ID NO: 436666 - DNA, 1727 bp, Homo sapiens
gcggccgcctactactactactactgctcgaattcaagcttctaacgatgtacggggacatggctaaggagattggtgctgtaaaatacctggagtgctcggcgctcacacagcgaggcctcaagacagtgtttgacgaagcgatccgagcagtcctctgcccgcctcccgtgaagaagaggaagagaaaatgcctgctgttgtaaatgtctcagcccctcgttcttggtcctgtcccttggaacctttgtacgctttgctcaaaaaaaaacaaaaaaaaaaaacaaaaaaaaaaaacaacggtggagccttcgcactcaatgccaactttttgttacagattaatttttccataaaaccattttttgaaccaatcagtaattttaaggttttgtttgttctaaatgtaagagttcagactcacattctattaaaatttagccctaaaatgacaagccttcttaaagccttatttttcaaaagcgccccccccattcttgttcagattaagagttgccaaaataccttctgaactacactgcattgttgtgccgagaacaccgagcactgaactttgcaaagaccttcgtctttgagaagacggtagcttctgcagttaggaggtgcagacacttgctctcctatgtagttctcagatgcgtaaagcagaacagcctcccgaatgaagcgttgccattgaactcaccagtgagttagcagcacgtgttcccgacataacattgtactgtaatggagtgagcgtagcagctcagctctttggatcagtctttgtgatttcatagcgagttttctgaccagcttttgcggagattttgaacagaactgctatttcctctaatgaagaattctgtttagctgtgggtgtgccgggtggggtgtgtgtgatcaaaggacaaagacagtattttgacaaaatacgaagtggagatttacactacattgtacaaggaatgaaagtgtcacgggtaaaaactctaaaaggttaatttctgtcaaatgcagtagatgatgaaagaaaggttggtattatcaggaaatgttttcttaagcttttcctttctcttacacctgccatgcctccccaaattgggcatttaattcatctttaaactggttgttctgttagtcgctaacttagtaagtgcttttcttatagaaccccttctgactgagcaatatgcctccttgtattataaaatctttctgataatgcattagaaggtttttttgtcgattagtaaaagtgctttccatgttactttattcagagctaataagtgctttccttagttttctagtaactaggtgtaaaaatcatgtgttgcagctttatagtttttaaaatattttagataattcttaaactatgaaccttcttaacatcactgtcttgccagattaccgacactgtcacttgaccaatactgaccctctttacctcgcccacgcggacacacgcctcctgtagtcgctttgcctattgatgttcctttgggtctgtgaggttctgtaaactgtgctagtgctgacgatgttctgtacaacttaactcactggcgagaatacagcgtgggacccttcagccactacaacagaattttttaaattgacagttgcagaattgtggagtgtttttacattgatcttttgctaatgcaattagcattatgttttgcatgtatgacttaataaatccttgaatcata

SEQ ID NO: 436667 - DNA, 778 bp, Homo sapiens
actccgggagcggcgcgggcgggagcggcgcgggcgggagcggccccgcccggaacctgggagcggcggcgccggcgcgggggaggggaggccggatgtgagtggagcggccatttcctgtttctctgcagttttcctcagctttgggtggtggccgctgccgggcatcggcttccagtccgcggagggcgaggcggcgtggacagcggccccggcacccagcgccccgccgcccgcaagccgcgcgcccgtccgccgcgccccgagcccgccgcttcctatctcagcgccctgccgccgccgccgcggcccagcgagcggccctgatgcaggccatcaagtgtgtggtggtgggagacggagctgtaggtaaaacttgcctactgatcagttacacaaccaatgcatttcctggagaatatatccctactgtctttgacaattattctgccaatgttatggtagatggaaaaccggtgaatctgggcttatgggatacagctggacaagaagattatgacagattacgccccctatcctatccgcaaacagtaaggattgcagctgacttttaatgtgtcttttagagtatataattctcgagcgcttaattagtgcatgttacctatggacttgcttatattgccatcatttgggtattgagtaaatagcaaacagggtgggattggttccatgtaaacatccccctagatgcaagcccaggggttttgtgttttgagcgttaccagctgttccattgtcgagcactttacagtct

SEQ ID NO: 436668 - DNA, 1401 bp, Homo sapiens
aacccagttggcggaggttgcagtgacccaagatcacaccactgcactccatcctgggtgacagagcgagactctatctgaaaaaataaataaaataaaatttaaaaatataaaaagcaccattgcattttaggaaagctatcatatgttgtgtatttcatagagcattttcacttaaacatttgtgaaaagcaccaagttttctctactgctaagagttgtttaacatcaactaatagtgacttctttattgtttctaatgttgtacggaacaggatgctgaaaacgccattcaacagatgggtggccagtggcttggtggaagacaaatcagaactaactgggcaacccgaaagcctcccgctccaaagagtacatatgagtgtaggtgtattggagaagaaaaggaaatgtggaattttggagaaaaatacgctagattttaaatgttagagctgttcccggagacttattgcagaaatagatgagaagcaaatcaagactactattcaaaaatgtacttagttttcatttttgtaattataaataatattatttctaatgtcaagtctcctattaaatagaaaatactgggtaattttttagacattcgtgggggaggtttaattctgaactgaagtataatatgtgtaatataagcattttgatcaaggttaatgttacctttacagtagtgtagtgaatgctacttttctctttctgcacattttatttaatgaattaaagacataaaccttttctctcaccagcaaataccaaacagctatcatatgatgaggttgtaaatcagtctagtccaagcaactgtactgtatactgtggaggtgttacttctgggctaacaggtatgggagccttccctgtgtggcattaatttttaaagtgcaaagcttaatatttgtaggatttttatataacttagtgtgatttgtttgttttggttttttgtctaacagaacaactaatgcgtcagactttttcaccatttggacaaataatggaaattcgagtctttccagataaaggatattcatttgttcggtagggatggttttttaaaaaaacatttttcttggtaatgtaactggaaaaccagaaaataaataaaaataaaaaactttttcctccaaaatattttttgaacatttacctcgttttcttaaaaatttaccttggttataaaaaagttgaaattttggccgggtgcggtggctcacgcctgtattcccagcactttgggaggccgagacgggtggatcaccgtcatgagtttgagaccagcctggccaacattgtgaaaccccgtctctactaaaaatacaaaaatataaaaattagccggcatggcggtgcatgcctgtaatcacagctactcgggag

SEQ ID NO: 436669 - DNA, 4615 bp, Homo sapiens
aggctcccggctcgccgccatcttgtattggggtttcattgttcccgctgggccgggcggtttagtgtaattgccgccggaggaggaggcggagtaacctctggtcagccgagaaaccccactatcctgtagccataaccgcttaaacgatttgggaggtagtgaagggcagggagctggacctggaggcgccgccgcgacagcagcagccatggaggacgagatgcccaagactctatacgtcggtaacctttccagagatgtgacagaagctctaattctgcaactctttagccagattggaccttgtaaaaactgcaaaatgattatggatacagctggaaatgatccctattgttttgtggagtttcatgagcatcgtcatgcagctgcagcattagctgctatgaatggacggaagataatgggtaaggaagtcaaagtgaattgggcaacaacccctagcagtcaaaagaaagatacaagcaatcatttccatgtctttgttggtgatctcagcccagaaattacaactgaagatataaaagctgcttttgcaccatttggaagaatatcagatgcccgagtggtaaaagacatggcaacaggaaagtctaagggatatggctttgtctcctttttcaacaaatgggatgctgaaaacgccattcaacagatgggtggccagtggcttggtggaagacaaatcagaactaactgggcaacccgaaagcctcccgctccaaagagtacatatgagtcaaataccaaacagctatcatatgatgaggttgtaaatcagtctagtccaagcaactgtactgtatactgtggaggtgttacttctgggctaacagaacaactaatgcgtcagactttttcaccatttggacaaataatggaaattcgagtctttccagataaaggatattcatttgttcggttcaattcccatgaaagtgcagcacatgcaattgtttctgttaatggtactaccattgaaggtcatgttgtgaaatgctattggggcaaagaaactcttgatatgataaatcccgtgcaacagcagaatcaaattggatatccccaaccttatggccagtggggccagtggtatggaaatgcacaacaaattggccagtatatgcctaatggttggcaagttcctgcatatggaatgtatggccaggcatggaaccagcaaggatttaatcagacacagtcttctgcaccatggatgggaccaaattatggagtgcaaccgcctcaagggcaaaatggcagcatgttgcccaatcagccttctgggtatcgagtggcagggtatgaaacccagtgaataaggactccagaatctaaagccagtggcttgaggctacagggagtgtagtaaagccgttgtttacttaaagatttatcaaatcagtcagtgcaaatgtcagatacaatgtatttatttaaaagattcatttttaatcatgaaattacttatcatccacattgttttaaaaagaaacaagatgctggatgtctgccaatttttgccttcattaccttttttgataaagtttctcagatccttgtttcaaacacaaatgcagggattgctgccactttttaactattaagaggcagaaaattgcacaatattgaacttttttccactgaagtagtgtgcagttctagtttgcattcctgatatgatttaaaacatgtaatataaagatgttaaaaaaaaaaaccaaaactgtgcagagtctagaagttgtttgtcatcttcagcttgtgcacaattctgttttaggttaaaaaaaggcattgtttgagctgtcccatctccactgttatccctttggggttttttaatataaattattagtttacatcatttttgtatctacatcttttttcacaaatttgtcttgccttattaaagttctgtaaaatatacttaaatggaaaaaatgatgttcatttagattgaaaacttttctcagatggattgataattgcattcatcttgtgttttatatgagaaggtgcctcaagaatttcctgttggatttgtttaaaaggatttttatctttcgtgataaactttgctgtgtaccaggaactataaaaacaaaaacttgttactaaagaaaatatctgaaatgtgataagttcttatgccatgttaatttcatgtgtcaacttcaacatttacatgtattatttcattatgtaaaatgttttagcaatttaatattttgcacagttagcaaactttgtatgtcatttccttcaaggcatcatgcagagttgacatgagatttataaggttttaagttgtttgcatgtgaaaatcaaatacatactttggtagtctttgaatacaaagtcatctgctcttgtttttcaagaattttgagacacaaagttgtatgtaaaggaatatattaatttgccgttttctaggtagatttgctcaaaaagagtgaatcaacttaatatgtacaaatgatagctgtgaaactgtagaatatctttgtgtcaggcttggagttcattgtgacctccaaattttgcctgaaggaccagctgggcaaagcatcttttaaatgttcagaggccaaaagataaacaaaaaaaaaaccttaaaatcctacctctttaaacagccttcagataagagaatcctcagtgcaatcattattttgattcgtttggtacctgttttcctggagttcccgattttattattttggggtggctccaagcattaagaggtttaatctttgatggcattgttctagttttgaaatttctagtatatttcagagtctcttagaagacttgtgtgggaagtttcactttgttttcagtgaagatcacaaacctccttcttcctttactcaagaggaaaggtcccagtatacatatttgaatggttgatggttttcaagaccttcagggagctccctgcattttacctagaaacagaaaaggcccgcaaaatcttaagtttcctggcctgcatttcccgggtaggggcaaatgactccaagctggtctctaagccaatacccttataaaccagagcccaggaaagacagctcgagtgtataattctctggagctcaattctatgcagttgtgctgatatttcattaagtcactgtgtatttttaagtgttgatacattaaaagtcgctttatggaagatgagtaaattttttaaatacttggaaattttatttccttgttaacttctacagatcagggcatgcaaccaaaagcagcttaaatgaaatattttaaaataaaatatcaggaagctatttttagatttcttctggcttatgtttctactttaggaccctcattgttctcttattaaaaaaaattatttcctgtgcatctcatggactgcagggtaaattatttgggcataaataatttaaatagttttctttcattttgactatctccagtaataacagtttttattatccagcatattggcttattgcacaaatcttaaaatgtacattgactactttctgagaagaaagtggtatcagtactcatgatgaaaaggttactactgaacaaattcacatttcaggaacacctctatctttggtttaaatcttactcttagtttttccgtctaaaaatcatactggtattagtatcaggtaaggaaattaaagtttttaaaatggtttcattctctgcaatatgcaaaatttagattttactttctggtactgtaaagaacctgaagtgatttacacttaatgggtgattaatccagtattctttaccctgaatgtttggatattaaagttcctttatgttttctataaacctgtgggatcttcttgcagtgattattgtgtgtgagattttttttctttttggtctatccatattgttatattcactcaggtattttttttttaatcttattccagaatcagtggtttatattgggttactgtttaacaccaaatggaattggcattctgcagatttaattaattatgaaaccagggtctcattttccttgctgatacttgttgaaaatgagattcacattctagtctttattttcctcctgttttgtccctgtgcttgtacatcttccttttatttgtgtgttatagttctattccatttgagaaggcagttggtaagaactagattgcatgtacaaagacaggtttactaagtgctgtacagtggtcctgaggttacagttgaattagaaaaacgaaatgtacttacaggaaataagaaagcaaacctttcaaatgagagtgatgatttctttaaaaaaaatcagtttttttctctcaaataatgttctttatttcacgaaatcgtcaatcttaagcatgagcagggataaacaactcctagaaggaactcaattcattcttcctggattttctctgttgttaaatcacaaaaatgatagtccccaatcgtttctttataggaggttattacatttcattacagtcactgcattttgactgttgtgtttagaatttgaatgtacatccaaaatgatgagtttcaatttaagagccttaataaaatgtgtgagtgtgtctcaattgaa

SEQ ID NO: 436670 - DNA, 4648 bp, Homo sapiens
aggctcccggctcgccgccatcttgtattggggtttcattgttcccgctgggccgggcggtttagtgtaattgccgccggaggaggaggcggagtaacctctggtcagccgagaaaccccactatcctgtagccataaccgcttaaacgatttgggaggtagtgaagggcagggagctggacctggaggcgccgccgcgacagcagcagccatggaggacgagatgcccaagactctatacgtcggtaacctttccagagatgtgacagaagctctaattctgcaactctttagccagattggaccttgtaaaaactgcaaaatgattatggatacagctggaaatgatccctattgttttgtggagtttcatgagcatcgtcatgcagctgcagcattagctgctatgaatggacggaagataatgggtaaggaagtcaaagtgaattgggcaacaacccctagcagtcaaaagaaagatacaagcagtagtaccgttgtcagcacacagcgttcacaagatcatttccatgtctttgttggtgatctcagcccagaaattacaactgaagatataaaagctgcttttgcaccatttggaagaatatcagatgcccgagtggtaaaagacatggcaacaggaaagtctaagggatatggctttgtctcctttttcaacaaatgggatgctgaaaacgccattcaacagatgggtggccagtggcttggtggaagacaaatcagaactaactgggcaacccgaaagcctcccgctccaaagagtacatatgagtcaaataccaaacagctatcatatgatgaggttgtaaatcagtctagtccaagcaactgtactgtatactgtggaggtgttacttctgggctaacagaacaactaatgcgtcagactttttcaccatttggacaaataatggaaattcgagtctttccagataaaggatattcatttgttcggttcaattcccatgaaagtgcagcacatgcaattgtttctgttaatggtactaccattgaaggtcatgttgtgaaatgctattggggcaaagaaactcttgatatgataaatcccgtgcaacagcagaatcaaattggatatccccaaccttatggccagtggggccagtggtatggaaatgcacaacaaattggccagtatatgcctaatggttggcaagttcctgcatatggaatgtatggccaggcatggaaccagcaaggatttaatcagacacagtcttctgcaccatggatgggaccaaattatggagtgcaaccgcctcaagggcaaaatggcagcatgttgcccaatcagccttctgggtatcgagtggcagggtatgaaacccagtgaataaggactccagaatctaaagccagtggcttgaggctacagggagtgtagtaaagccgttgtttacttaaagatttatcaaatcagtcagtgcaaatgtcagatacaatgtatttatttaaaagattcatttttaatcatgaaattacttatcatccacattgttttaaaaagaaacaagatgctggatgtctgccaatttttgccttcattaccttttttgataaagtttctcagatccttgtttcaaacacaaatgcagggattgctgccactttttaactattaagaggcagaaaattgcacaatattgaacttttttccactgaagtagtgtgcagttctagtttgcattcctgatatgatttaaaacatgtaatataaagatgttaaaaaaaaaaaccaaaactgtgcagagtctagaagttgtttgtcatcttcagcttgtgcacaattctgttttaggttaaaaaaaggcattgtttgagctgtcccatctccactgttatccctttggggttttttaatataaattattagtttacatcatttttgtatctacatcttttttcacaaatttgtcttgccttattaaagttctgtaaaatatacttaaatggaaaaaatgatgttcatttagattgaaaacttttctcagatggattgataattgcattcatcttgtgttttatatgagaaggtgcctcaagaatttcctgttggatttgtttaaaaggatttttatctttcgtgataaactttgctgtgtaccaggaactataaaaacaaaaacttgttactaaagaaaatatctgaaatgtgataagttcttatgccatgttaatttcatgtgtcaacttcaacatttacatgtattatttcattatgtaaaatgttttagcaatttaatattttgcacagttagcaaactttgtatgtcatttccttcaaggcatcatgcagagttgacatgagatttataaggttttaagttgtttgcatgtgaaaatcaaatacatactttggtagtctttgaatacaaagtcatctgctcttgtttttcaagaattttgagacacaaagttgtatgtaaaggaatatattaatttgccgttttctaggtagatttgctcaaaaagagtgaatcaacttaatatgtacaaatgatagctgtgaaactgtagaatatctttgtgtcaggcttggagttcattgtgacctccaaattttgcctgaaggaccagctgggcaaagcatcttttaaatgttcagaggccaaaagataaacaaaaaaaaaaccttaaaatcctacctctttaaacagccttcagataagagaatcctcagtgcaatcattattttgattcgtttggtacctgttttcctggagttcccgattttattattttggggtggctccaagcattaagaggtttaatctttgatggcattgttctagttttgaaatttctagtatatttcagagtctcttagaagacttgtgtgggaagtttcactttgttttcagtgaagatcacaaacctccttcttcctttactcaagaggaaaggtcccagtatacatatttgaatggttgatggttttcaagaccttcagggagctccctgcattttacctagaaacagaaaaggcccgcaaaatcttaagtttcctggcctgcatttcccgggtaggggcaaatgactccaagctggtctctaagccaatacccttataaaccagagcccaggaaagacagctcgagtgtataattctctggagctcaattctatgcagttgtgctgatatttcattaagtcactgtgtatttttaagtgttgatacattaaaagtcgctttatggaagatgagtaaattttttaaatacttggaaattttatttccttgttaacttctacagatcagggcatgcaaccaaaagcagcttaaatgaaatattttaaaataaaatatcaggaagctatttttagatttcttctggcttatgtttctactttaggaccctcattgttctcttattaaaaaaaattatttcctgtgcatctcatggactgcagggtaaattatttgggcataaataatttaaatagttttctttcattttgactatctccagtaataacagtttttattatccagcatattggcttattgcacaaatcttaaaatgtacattgactactttctgagaagaaagtggtatcagtactcatgatgaaaaggttactactgaacaaattcacatttcaggaacacctctatctttggtttaaatcttactcttagtttttccgtctaaaaatcatactggtattagtatcaggtaaggaaattaaagtttttaaaatggtttcattctctgcaatatgcaaaatttagattttactttctggtactgtaaagaacctgaagtgatttacacttaatgggtgattaatccagtattctttaccctgaatgtttggatattaaagttcctttatgttttctataaacctgtgggatcttcttgcagtgattattgtgtgtgagattttttttctttttggtctatccatattgttatattcactcaggtattttttttttaatcttattccagaatcagtggtttatattgggttactgtttaacaccaaatggaattggcattctgcagatttaattaattatgaaaccagggtctcattttccttgctgatacttgttgaaaatgagattcacattctagtctttattttcctcctgttttgtccctgtgcttgtacatcttccttttatttgtgtgttatagttctattccatttgagaaggcagttggtaagaactagattgcatgtacaaagacaggtttactaagtgctgtacagtggtcctgaggttacagttgaattagaaaaacgaaatgtacttacaggaaataagaaagcaaacctttcaaatgagagtgatgatttctttaaaaaaaatcagtttttttctctcaaataatgttctttatttcacgaaatcgtcaatcttaagcatgagcagggataaacaactcctagaaggaactcaattcattcttcctggattttctctgttgttaaatcacaaaaatgatagtccccaatcgtttctttataggaggttattacatttcattacagtcactgcattttgactgttgtgtttagaatttgaatgtacatccaaaatgatgagtttcaatttaagagccttaataaaatgtgtgagtgtgtctcaattgaa

SEQ ID NO: 436671 - DNA, 5145 bp, Homo sapiens
aggctcccggctcgccgccatcttgtattggggtttcattgttcccgctgggccgggcggtttagtgtaattgccgccggaggaggaggcggagtaacctctggtcagccgagaaaccccactatcctgtagccataaccgcttaaacgatttgggaggtagtgaagggcagggagctggacctggaggcgccgccgcgacagcagcagccatggaggacgagatgcccaagactctatacgtcggtaacctttccagagatgtgacagaagctctaattctgcaactctttagccagattggaccttgtaaaaactgcaaaatgattatggatacagctggaaatgatccctattgttttgtggagtttcatgagcatcgtcatgcagctgcagcattagctgctatgaatggacggaagataatgggtaaggaagtcaaagtgaattgggcaacaacccctagcagtcaaaagaaagatacaagcagtagtaccgttgtcagcacacagcgttcacaagatcatttccatgtctttgttggtgatctcagcccagaaattacaactgaagatataaaagctgcttttgcaccatttggaagaatatcagatgcccgagtggtaaaagacatggcaacaggaaagtctaagggatatggctttgtctcctttttcaacaaatgggatgctgaaaacgccattcaacagatgggtggccagtggcttggtggaagacaaatcagaactaactgggcaacccgaaagcctcccgctccaaagagtacatatgagtgtaggtgtattggagaagaaaaggaaatgtggaattttggagaaaaatacgctagattttaaatgttagagctgttcccggagacttattgcagaaatagatgagaagcaaatcaagactactattcaaaaatgtacttagttttcatttttgtaattataaataatattatttctaatgtcaagtctcctattaaatagaaaatactgggtaattttttagacattcgtgggggaggtttaattctgaactgaagtataatatgtgtaatataagcattttgatcaaggttaatgttacctttacagtagtgtagtgaatgctacttttctctttctgcacattttatttaatgaattaaagacataaaccttttctctcaccagcaaataccaaacagctatcatatgatgaggttgtaaatcagtctagtccaagcaactgtactgtatactgtggaggtgttacttctgggctaacaggtatgggagccttccctgtgtggcattaatttttaaagtgcaaagcttaatatttgtaggatttttatataacttagtgtgatttgtttgttttggttttttgtctaacagaacaactaatgcgtcagactttttcaccatttggacaaataatggaaattcgagtctttccagataaaggatattcatttgttcggttcaattcccatgaaagtgcagcacatgcaattgtttctgttaatggtactaccattgaaggtcatgttgtgaaatgctattggggcaaagaaactcttgatatgataaatcccgtgcaacagcagaatcaaattggatatccccaaccttatggccagtggggccagtggtatggaaatgcacaacaaattggccagtatatgcctaatggttggcaagttcctgcatatggaatgtatggccaggcatggaaccagcaaggatttaatcagacacagtcttctgcaccatggatgggaccaaattatggagtgcaaccgcctcaagggcaaaatggcagcatgttgcccaatcagccttctgggtatcgagtggcagggtatgaaacccagtgaataaggactccagaatctaaagccagtggcttgaggctacagggagtgtagtaaagccgttgtttacttaaagatttatcaaatcagtcagtgcaaatgtcagatacaatgtatttatttaaaagattcatttttaatcatgaaattacttatcatccacattgttttaaaaagaaacaagatgctggatgtctgccaatttttgccttcattaccttttttgataaagtttctcagatccttgtttcaaacacaaatgcagggattgctgccactttttaactattaagaggcagaaaattgcacaatattgaacttttttccactgaagtagtgtgcagttctagtttgcattcctgatatgatttaaaacatgtaatataaagatgttaaaaaaaaaaaccaaaactgtgcagagtctagaagttgtttgtcatcttcagcttgtgcacaattctgttttaggttaaaaaaaggcattgtttgagctgtcccatctccactgttatccctttggggttttttaatataaattattagtttacatcatttttgtatctacatcttttttcacaaatttgtcttgccttattaaagttctgtaaaatatacttaaatggaaaaaatgatgttcatttagattgaaaacttttctcagatggattgataattgcattcatcttgtgttttatatgagaaggtgcctcaagaatttcctgttggatttgtttaaaaggatttttatctttcgtgataaactttgctgtgtaccaggaactataaaaacaaaaacttgttactaaagaaaatatctgaaatgtgataagttcttatgccatgttaatttcatgtgtcaacttcaacatttacatgtattatttcattatgtaaaatgttttagcaatttaatattttgcacagttagcaaactttgtatgtcatttccttcaaggcatcatgcagagttgacatgagatttataaggttttaagttgtttgcatgtgaaaatcaaatacatactttggtagtctttgaatacaaagtcatctgctcttgtttttcaagaattttgagacacaaagttgtatgtaaaggaatatattaatttgccgttttctaggtagatttgctcaaaaagagtgaatcaacttaatatgtacaaatgatagctgtgaaactgtagaatatctttgtgtcaggcttggagttcattgtgacctccaaattttgcctgaaggaccagctgggcaaagcatcttttaaatgttcagaggccaaaagataaacaaaaaaaaaaccttaaaatcctacctctttaaacagccttcagataagagaatcctcagtgcaatcattattttgattcgtttggtacctgttttcctggagttcccgattttattattttggggtggctccaagcattaagaggtttaatctttgatggcattgttctagttttgaaatttctagtatatttcagagtctcttagaagacttgtgtgggaagtttcactttgttttcagtgaagatcacaaacctccttcttcctttactcaagaggaaaggtcccagtatacatatttgaatggttgatggttttcaagaccttcagggagctccctgcattttacctagaaacagaaaaggcccgcaaaatcttaagtttcctggcctgcatttcccgggtaggggcaaatgactccaagctggtctctaagccaatacccttataaaccagagcccaggaaagacagctcgagtgtataattctctggagctcaattctatgcagttgtgctgatatttcattaagtcactgtgtatttttaagtgttgatacattaaaagtcgctttatggaagatgagtaaattttttaaatacttggaaattttatttccttgttaacttctacagatcagggcatgcaaccaaaagcagcttaaatgaaatattttaaaataaaatatcaggaagctatttttagatttcttctggcttatgtttctactttaggaccctcattgttctcttattaaaaaaaattatttcctgtgcatctcatggactgcagggtaaattatttgggcataaataatttaaatagttttctttcattttgactatctccagtaataacagtttttattatccagcatattggcttattgcacaaatcttaaaatgtacattgactactttctgagaagaaagtggtatcagtactcatgatgaaaaggttactactgaacaaattcacatttcaggaacacctctatctttggtttaaatcttactcttagtttttccgtctaaaaatcatactggtattagtatcaggtaaggaaattaaagtttttaaaatggtttcattctctgcaatatgcaaaatttagattttactttctggtactgtaaagaacctgaagtgatttacacttaatgggtgattaatccagtattctttaccctgaatgtttggatattaaagttcctttatgttttctataaacctgtgggatcttcttgcagtgattattgtgtgtgagattttttttctttttggtctatccatattgttatattcactcaggtattttttttttaatcttattccagaatcagtggtttatattgggttactgtttaacaccaaatggaattggcattctgcagatttaattaattatgaaaccagggtctcattttccttgctgatacttgttgaaaatgagattcacattctagtctttattttcctcctgttttgtccctgtgcttgtacatcttccttttatttgtgtgttatagttctattccatttgagaaggcagttggtaagaactagattgcatgtacaaagacaggtttactaagtgctgtacagtggtcctgaggttacagttgaattagaaaaacgaaatgtacttacaggaaataagaaagcaaacctttcaaatgagagtgatgatttctttaaaaaaaatcagtttttttctctcaaataatgttctttatttcacgaaatcgtcaatcttaagcatgagcagggataaacaactcctagaaggaactcaattcattcttcctggattttctctgttgttaaatcacaaaaatgatagtccccaatcgtttctttataggaggttattacatttcattacagtcactgcattttgactgttgtgtttagaatttgaatgtacatccaaaatgatgagtttcaatttaagagccttaataaaatgtgtgagtgtgtctcaattgaa

SEQ ID NO: 436672 - DNA, 5363 bp, Homo sapiens
aggctcccggctcgccgccatcttgtattggggtttcattgttcccgctgggccgggcggtttagtgtaattgccgccggaggaggaggcggagtaacctctggtcagccgagaaaccccactatcctgtagccataaccgcttaaacgatttgggaggtagtgaagggcagggagctggacctggaggcgccgccgcgacagcagcagccatggaggacgagatgcccaagactctatacgtcggtaacctttccagagatgtgacagaagctctaattctgcaactctttagccagattggaccttgtaaaaactgcaaaatgattatggatacagctggaaatgatccctattgttttgtggagtttcatgagcatcgtcatgcagctgcagcattagctgctatgaatggacggaagataatgggtaaggaagtcaaagtgaattgggcaacaacccctagcagtcaaaagaaagatacaagcagtagtaccgttgtcagcacacagcgttcacaaggtaattgtatcttcttaaacataaaatgaaatctcttgaaagggtattcactaaccacctgaagtttttttgtttgatatttgggggaggggggcgggaggagatattatttctatttgtctctctagcaatacttttctcccttctcagtgttgaccaagtataacttgtccgctactttggtgctagttcaagctttctgacccgtttggtagcagctgatgccttagaactactttcaccaactaaggggcaaaataccctcctttcttgaggtcaccatttgggcttcatacccagatcttccaaatgcttgagttgctcctcaaattttgtttcccaaagagcaatccaaaatgttgtttaaggcctgtcaaatatgggtaacttttctttccaaatatgctttgtcaaattgatgtatgtgtccattttaaagtgttggtccaacaattttgcatttttaaagtgtttctttttttgataattgtcttttttaaaaacttcagatatgggttggttatttctctccaatgcttttttaatggttctgatataaagtgaagggattactgttttcattctgttgccttcagtcttagttcacttgcacatggattcacataaactgaatggtgtaatgtctgggcaaccaaaactgttggcttttgagaaaactgtcaaatactttaacatcaaactgttgcaatgcaagatcatttccatgtctttgttggtgatctcagcccagaaattacaactgaagatataaaagctgcttttgcaccatttggaagaatatcagatgcccgagtggtaaaagacatggcaacaggaaagtctaagggatatggctttgtctcctttttcaacaaatgggatgctgaaaacgccattcaacagatgggtggccagtggcttggtggaagacaaatcagaactaactgggcaacccgaaagcctcccgctccaaagagtacatatgagtcaaataccaaacagctatcatatgatgaggttgtaaatcagtctagtccaagcaactgtactgtatactgtggaggtgttacttctgggctaacagaacaactaatgcgtcagactttttcaccatttggacaaataatggaaattcgagtctttccagataaaggatattcatttgttcggttcaattcccatgaaagtgcagcacatgcaattgtttctgttaatggtactaccattgaaggtcatgttgtgaaatgctattggggcaaagaaactcttgatatgataaatcccgtgcaacagcagaatcaaattggatatccccaaccttatggccagtggggccagtggtatggaaatgcacaacaaattggccagtatatgcctaatggttggcaagttcctgcatatggaatgtatggccaggcatggaaccagcaaggatttaatcagacacagtcttctgcaccatggatgggaccaaattatggagtgcaaccgcctcaagggcaaaatggcagcatgttgcccaatcagccttctgggtatcgagtggcagggtatgaaacccagtgaataaggactccagaatctaaagccagtggcttgaggctacagggagtgtagtaaagccgttgtttacttaaagatttatcaaatcagtcagtgcaaatgtcagatacaatgtatttatttaaaagattcatttttaatcatgaaattacttatcatccacattgttttaaaaagaaacaagatgctggatgtctgccaatttttgccttcattaccttttttgataaagtttctcagatccttgtttcaaacacaaatgcagggattgctgccactttttaactattaagaggcagaaaattgcacaatattgaacttttttccactgaagtagtgtgcagttctagtttgcattcctgatatgatttaaaacatgtaatataaagatgttaaaaaaaaaaaccaaaactgtgcagagtctagaagttgtttgtcatcttcagcttgtgcacaattctgttttaggttaaaaaaaggcattgtttgagctgtcccatctccactgttatccctttggggttttttaatataaattattagtttacatcatttttgtatctacatcttttttcacaaatttgtcttgccttattaaagttctgtaaaatatacttaaatggaaaaaatgatgttcatttagattgaaaacttttctcagatggattgataattgcattcatcttgtgttttatatgagaaggtgcctcaagaatttcctgttggatttgtttaaaaggatttttatctttcgtgataaactttgctgtgtaccaggaactataaaaacaaaaacttgttactaaagaaaatatctgaaatgtgataagttcttatgccatgttaatttcatgtgtcaacttcaacatttacatgtattatttcattatgtaaaatgttttagcaatttaatattttgcacagttagcaaactttgtatgtcatttccttcaaggcatcatgcagagttgacatgagatttataaggttttaagttgtttgcatgtgaaaatcaaatacatactttggtagtctttgaatacaaagtcatctgctcttgtttttcaagaattttgagacacaaagttgtatgtaaaggaatatattaatttgccgttttctaggtagatttgctcaaaaagagtgaatcaacttaatatgtacaaatgatagctgtgaaactgtagaatatctttgtgtcaggcttggagttcattgtgacctccaaattttgcctgaaggaccagctgggcaaagcatcttttaaatgttcagaggccaaaagataaacaaaaaaaaaaccttaaaatcctacctctttaaacagccttcagataagagaatcctcagtgcaatcattattttgattcgtttggtacctgttttcctggagttcccgattttattattttggggtggctccaagcattaagaggtttaatctttgatggcattgttctagttttgaaatttctagtatatttcagagtctcttagaagacttgtgtgggaagtttcactttgttttcagtgaagatcacaaacctccttcttcctttactcaagaggaaaggtcccagtatacatatttgaatggttgatggttttcaagaccttcagggagctccctgcattttacctagaaacagaaaaggcccgcaaaatcttaagtttcctggcctgcatttcccgggtaggggcaaatgactccaagctggtctctaagccaatacccttataaaccagagcccaggaaagacagctcgagtgtataattctctggagctcaattctatgcagttgtgctgatatttcattaagtcactgtgtatttttaagtgttgatacattaaaagtcgctttatggaagatgagtaaattttttaaatacttggaaattttatttccttgttaacttctacagatcagggcatgcaaccaaaagcagcttaaatgaaatattttaaaataaaatatcaggaagctatttttagatttcttctggcttatgtttctactttaggaccctcattgttctcttattaaaaaaaattatttcctgtgcatctcatggactgcagggtaaattatttgggcataaataatttaaatagttttctttcattttgactatctccagtaataacagtttttattatccagcatattggcttattgcacaaatcttaaaatgtacattgactactttctgagaagaaagtggtatcagtactcatgatgaaaaggttactactgaacaaattcacatttcaggaacacctctatctttggtttaaatcttactcttagtttttccgtctaaaaatcatactggtattagtatcaggtaaggaaattaaagtttttaaaatggtttcattctctgcaatatgcaaaatttagattttactttctggtactgtaaagaacctgaagtgatttacacttaatgggtgattaatccagtattctttaccctgaatgtttggatattaaagttcctttatgttttctataaacctgtgggatcttcttgcagtgattattgtgtgtgagattttttttctttttggtctatccatattgttatattcactcaggtattttttttttaatcttattccagaatcagtggtttatattgggttactgtttaacaccaaatggaattggcattctgcagatttaattaattatgaaaccagggtctcattttccttgctgatacttgttgaaaatgagattcacattctagtctttattttcctcctgttttgtccctgtgcttgtacatcttccttttatttgtgtgttatagttctattccatttgagaaggcagttggtaagaactagattgcatgtacaaagacaggtttactaagtgctgtacagtggtcctgaggttacagttgaattagaaaaacgaaatgtacttacaggaaataagaaagcaaacctttcaaatgagagtgatgatttctttaaaaaaaatcagtttttttctctcaaataatgttctttatttcacgaaatcgtcaatcttaagcatgagcagggataaacaactcctagaaggaactcaattcattcttcctggattttctctgttgttaaatcacaaaaatgatagtccccaatcgtttctttataggaggttattacatttcattacagtcactgcattttgactgttgtgtttagaatttgaatgtacatccaaaatgatgagtttcaatttaagagccttaataaaatgtgtgagtgtgtctcaattgaa

SEQ ID NO: 436673 - DNA, 4951 bp, Homo sapiens
gagcaagcattgtgacatacctgactaacttaaaagcagattgcctgtgaagcacaatttgagtccaattttttgaggtatggagttttagctatcatggctgggtttttactcaatctcaaataatagggctctggttattttgcagagtgtctctgaagaatggacagaattgccctggctaactacaagctacggttcacagtggataaatgttggcgtgcttttttactttctgactttttaaaattttgcttttatatcttgtagttccaatcaattttatatgaatgctattataaaattcagtgtaaaatcttttcttgtctagcttaaaacttgtgtgtgtctagtatttttcttcaatgatttaacatttctgaaaatgtcaagttctcaaaatttagacaaaaaggggggtataaattgatctgaaaaaattaaatagtttaattagtttagggaatatacaactttttcattcttttggtttccagttttctatttttttttaatgattaggtagaatatagtgtcaaataagttataaattgcatggttaaagaaagccattcatctaatgtcctgtgaactttataagtggttaagtagttcatgtgagtagctgctttcaccatgcttaatatttaaaagtttaaaaagttttttgaagagagaggcaatttctgtacaatataaatatacatatatacttaagttattgatttgcatgtctataaaattaagcctcatttcctaatacatgataaattttgtagaataaaaggtgaatttgcattaaaggttcactttaatgaaggtgaaacatgagaatgagttgtgtgtgaaattcttatttgatatccagaggatagtttgcaaacctaaacttctgattgtttctgatttcagagatgcccgagtggtaaaagacatggcaacaggaaagtctaagggatatggctttgtctcctttttcaacaaatgggatgctgaaaacgccattcaacagatgggtggccagtggcttggtggaagacaaatcagaactaactgggcaacccgaaagcctcccgctccaaagagtacatatgagtcaaataccaaacagctatcatatgatgaggttgtaaatcagtctagtccaagcaactgtactgtatactgtggaggtgttacttctgggctaacagaacaactaatgcgtcagactttttcaccatttggacaaataatggaaattcgagtctttccagataaaggatattcatttgttcggttcaattcccatgaaagtgcagcacatgcaattgtttctgttaatggtactaccattgaaggtcatgttgtgaaatgctattggggcaaagaaactcttgatatgataaatcccgtgcaacagcagaatcaaattggatatccccaaccttatggccagtggggccagtggtatggaaatgcacaacaaattggccagtatatgcctaatggttggcaagttcctgcatatggaatgtatggccaggcatggaaccagcaaggatttaatcagacacagtcttctgcaccatggatgggaccaaattatggagtgcaaccgcctcaagggcaaaatggcagcatgttgcccaatcagccttctgggtatcgagtggcagggtatgaaacccagtgaataaggactccagaatctaaagccagtggcttgaggctacagggagtgtagtaaagccgttgtttacttaaagatttatcaaatcagtcagtgcaaatgtcagatacaatgtatttatttaaaagattcatttttaatcatgaaattacttatcatccacattgttttaaaaagaaacaagatgctggatgtctgccaatttttgccttcattaccttttttgataaagtttctcagatccttgtttcaaacacaaatgcagggattgctgccactttttaactattaagaggcagaaaattgcacaatattgaacttttttccactgaagtagtgtgcagttctagtttgcattcctgatatgatttaaaacatgtaatataaagatgttaaaaaaaaaaaccaaaactgtgcagagtctagaagttgtttgtcatcttcagcttgtgcacaattctgttttaggttaaaaaaaggcattgtttgagctgtcccatctccactgttatccctttggggttttttaatataaattattagtttacatcatttttgtatctacatcttttttcacaaatttgtcttgccttattaaagttctgtaaaatatacttaaatggaaaaaatgatgttcatttagattgaaaacttttctcagatggattgataattgcattcatcttgtgttttatatgagaaggtgcctcaagaatttcctgttggatttgtttaaaaggatttttatctttcgtgataaactttgctgtgtaccaggaactataaaaacaaaaacttgttactaaagaaaatatctgaaatgtgataagttcttatgccatgttaatttcatgtgtcaacttcaacatttacatgtattatttcattatgtaaaatgttttagcaatttaatattttgcacagttagcaaactttgtatgtcatttccttcaaggcatcatgcagagttgacatgagatttataaggttttaagttgtttgcatgtgaaaatcaaatacatactttggtagtctttgaatacaaagtcatctgctcttgtttttcaagaattttgagacacaaagttgtatgtaaaggaatatattaatttgccgttttctaggtagatttgctcaaaaagagtgaatcaacttaatatgtacaaatgatagctgtgaaactgtagaatatctttgtgtcaggcttggagttcattgtgacctccaaattttgcctgaaggaccagctgggcaaagcatcttttaaatgttcagaggccaaaagataaacaaaaaaaaaaccttaaaatcctacctctttaaacagccttcagataagagaatcctcagtgcaatcattattttgattcgtttggtacctgttttcctggagttcccgattttattattttggggtggctccaagcattaagaggtttaatctttgatggcattgttctagttttgaaatttctagtatatttcagagtctcttagaagacttgtgtgggaagtttcactttgttttcagtgaagatcacaaacctccttcttcctttactcaagaggaaaggtcccagtatacatatttgaatggttgatggttttcaagaccttcagggagctccctgcattttacctagaaacagaaaaggcccgcaaaatcttaagtttcctggcctgcatttcccgggtaggggcaaatgactccaagctggtctctaagccaatacccttataaaccagagcccaggaaagacagctcgagtgtataattctctggagctcaattctatgcagttgtgctgatatttcattaagtcactgtgtatttttaagtgttgatacattaaaagtcgctttatggaagatgagtaaattttttaaatacttggaaattttatttccttgttaacttctacagatcagggcatgcaaccaaaagcagcttaaatgaaatattttaaaataaaatatcaggaagctatttttagatttcttctggcttatgtttctactttaggaccctcattgttctcttattaaaaaaaattatttcctgtgcatctcatggactgcagggtaaattatttgggcataaataatttaaatagttttctttcattttgactatctccagtaataacagtttttattatccagcatattggcttattgcacaaatcttaaaatgtacattgactactttctgagaagaaagtggtatcagtactcatgatgaaaaggttactactgaacaaattcacatttcaggaacacctctatctttggtttaaatcttactcttagtttttccgtctaaaaatcatactggtattagtatcaggtaaggaaattaaagtttttaaaatggtttcattctctgcaatatgcaaaatttagattttactttctggtactgtaaagaacctgaagtgatttacacttaatgggtgattaatccagtattctttaccctgaatgtttggatattaaagttcctttatgttttctataaacctgtgggatcttcttgcagtgattattgtgtgtgagattttttttctttttggtctatccatattgttatattcactcaggtattttttttttaatcttattccagaatcagtggtttatattgggttactgtttaacaccaaatggaattggcattctgcagatttaattaattatgaaaccagggtctcattttccttgctgatacttgttgaaaatgagattcacattctagtctttattttcctcctgttttgtccctgtgcttgtacatcttccttttatttgtgtgttatagttctattccatttgagaaggcagttggtaagaactagattgcatgtacaaagacaggtttactaagtgctgtacagtggtcctgaggttacagttgaattagaaaaacgaaatgtacttacaggaaataagaaagcaaacctttcaaatgagagtgatgatttctttaaaaaaaatcagtttttttctctcaaataatgttctttatttcacgaaatcgtcaatcttaagcatgagcagggataaacaactcctagaaggaactcaattcattcttcctggattttctctgttgttaaatcacaaaaatgatagtccccaatcgtttctttataggaggttattacatttcattacagtcactgcattttgactgttgtgtttagaatttgaatgtacatccaaaatgatgagtttcaatttaagagccttaataaaatgtgtgagtgtgtctcaattgaa

SEQ ID NO: 436674 - DNA, 4441 bp, Homo sapiens
tttttgcagaactgaaacttgtatgttattagtttattttcttagaccagtgtaataattgactgtaaatagaaatataaatgtcactttacagttagatgtatcacagtcgtttcaggagaatttttcctatattgttaccttgattcattgtttaaaattggtaggatttgtatagatataggatagtgttttatttatactttatcataagccataatcattttaagaatactttattggatagattttagtactttttaaattctaaagttctatttttcttttcacttccccttccttccccttataagatcatttccatgtctttgttggtgatctcagcccagaaattacaactgaagatataaaagctgcttttgcaccatttggaagaatatcagatgcccgagtggtaaaagacatggcaacaggaaagtctaagggatatggctttgtctcctttttcaacaaatgggatgctgaaaacgccattcaacagatgggtggccagtggcttggtggaagacaaatcagaactaactgggcaacccgaaagcctcccgctccaaagagtacatatgagtcaaataccaaacagctatcatatgatgaggttgtaaatcagtctagtccaagcaactgtactgtatactgtggaggtgttacttctgggctaacagaacaactaatgcgtcagactttttcaccatttggacaaataatggaaattcgagtctttccagataaaggatattcatttgttcggttcaattcccatgaaagtgcagcacatgcaattgtttctgttaatggtactaccattgaaggtcatgttgtgaaatgctattggggcaaagaaactcttgatatgataaatcccgtgcaacagcagaatcaaattggatatccccaaccttatggccagtggggccagtggtatggaaatgcacaacaaattggccagtatatgcctaatggttggcaagttcctgcatatggaatgtatggccaggcatggaaccagcaaggatttaatcagacacagtcttctgcaccatggatgggaccaaattatggagtgcaaccgcctcaagggcaaaatggcagcatgttgcccaatcagccttctgggtatcgagtggcagggtatgaaacccagtgaataaggactccagaatctaaagccagtggcttgaggctacagggagtgtagtaaagccgttgtttacttaaagatttatcaaatcagtcagtgcaaatgtcagatacaatgtatttatttaaaagattcatttttaatcatgaaattacttatcatccacattgttttaaaaagaaacaagatgctggatgtctgccaatttttgccttcattaccttttttgataaagtttctcagatccttgtttcaaacacaaatgcagggattgctgccactttttaactattaagaggcagaaaattgcacaatattgaacttttttccactgaagtagtgtgcagttctagtttgcattcctgatatgatttaaaacatgtaatataaagatgttaaaaaaaaaaaccaaaactgtgcagagtctagaagttgtttgtcatcttcagcttgtgcacaattctgttttaggttaaaaaaaggcattgtttgagctgtcccatctccactgttatccctttggggttttttaatataaattattagtttacatcatttttgtatctacatcttttttcacaaatttgtcttgccttattaaagttctgtaaaatatacttaaatggaaaaaatgatgttcatttagattgaaaacttttctcagatggattgataattgcattcatcttgtgttttatatgagaaggtgcctcaagaatttcctgttggatttgtttaaaaggatttttatctttcgtgataaactttgctgtgtaccaggaactataaaaacaaaaacttgttactaaagaaaatatctgaaatgtgataagttcttatgccatgttaatttcatgtgtcaacttcaacatttacatgtattatttcattatgtaaaatgttttagcaatttaatattttgcacagttagcaaactttgtatgtcatttccttcaaggcatcatgcagagttgacatgagatttataaggttttaagttgtttgcatgtgaaaatcaaatacatactttggtagtctttgaatacaaagtcatctgctcttgtttttcaagaattttgagacacaaagttgtatgtaaaggaatatattaatttgccgttttctaggtagatttgctcaaaaagagtgaatcaacttaatatgtacaaatgatagctgtgaaactgtagaatatctttgtgtcaggcttggagttcattgtgacctccaaattttgcctgaaggaccagctgggcaaagcatcttttaaatgttcagaggccaaaagataaacaaaaaaaaaaccttaaaatcctacctctttaaacagccttcagataagagaatcctcagtgcaatcattattttgattcgtttggtacctgttttcctggagttcccgattttattattttggggtggctccaagcattaagaggtttaatctttgatggcattgttctagttttgaaatttctagtatatttcagagtctcttagaagacttgtgtgggaagtttcactttgttttcagtgaagatcacaaacctccttcttcctttactcaagaggaaaggtcccagtatacatatttgaatggttgatggttttcaagaccttcagggagctccctgcattttacctagaaacagaaaaggcccgcaaaatcttaagtttcctggcctgcatttcccgggtaggggcaaatgactccaagctggtctctaagccaatacccttataaaccagagcccaggaaagacagctcgagtgtataattctctggagctcaattctatgcagttgtgctgatatttcattaagtcactgtgtatttttaagtgttgatacattaaaagtcgctttatggaagatgagtaaattttttaaatacttggaaattttatttccttgttaacttctacagatcagggcatgcaaccaaaagcagcttaaatgaaatattttaaaataaaatatcaggaagctatttttagatttcttctggcttatgtttctactttaggaccctcattgttctcttattaaaaaaaattatttcctgtgcatctcatggactgcagggtaaattatttgggcataaataatttaaatagttttctttcattttgactatctccagtaataacagtttttattatccagcatattggcttattgcacaaatcttaaaatgtacattgactactttctgagaagaaagtggtatcagtactcatgatgaaaaggttactactgaacaaattcacatttcaggaacacctctatctttggtttaaatcttactcttagtttttccgtctaaaaatcatactggtattagtatcaggtaaggaaattaaagtttttaaaatggtttcattctctgcaatatgcaaaatttagattttactttctggtactgtaaagaacctgaagtgatttacacttaatgggtgattaatccagtattctttaccctgaatgtttggatattaaagttcctttatgttttctataaacctgtgggatcttcttgcagtgattattgtgtgtgagattttttttctttttggtctatccatattgttatattcactcaggtattttttttttaatcttattccagaatcagtggtttatattgggttactgtttaacaccaaatggaattggcattctgcagatttaattaattatgaaaccagggtctcattttccttgctgatacttgttgaaaatgagattcacattctagtctttattttcctcctgttttgtccctgtgcttgtacatcttccttttatttgtgtgttatagttctattccatttgagaaggcagttggtaagaactagattgcatgtacaaagacaggtttactaagtgctgtacagtggtcctgaggttacagttgaattagaaaaacgaaatgtacttacaggaaataagaaagcaaacctttcaaatgagagtgatgatttctttaaaaaaaatcagtttttttctctcaaataatgttctttatttcacgaaatcgtcaatcttaagcatgagcagggataaacaactcctagaaggaactcaattcattcttcctggattttctctgttgttaaatcacaaaaatgatagtccccaatcgtttctttataggaggttattacatttcattacagtcactgcattttgactgttgtgtttagaatttgaatgtacatccaaaatgatgagtttcaatttaagagccttaataaaatgtgtgagtgtgtctcaattgaa

SEQ ID NO: 436675 - DNA, 4889 bp, Homo sapiens
gagcaagcattgtgacatacctgactaacttaaaagcagattgcctgtgaagcacaatttgagtccaattttttgaggtatggagttttagctatcatggctgggtttttactcaatctcaaataatagggctctggttattttgcagagtgtctctgaagaatggacagaattgccctggctaactacaagctacggttcacagtggataaatgttggcgtgcttttttactttctgactttttaaaattttgcttttatatcttgtagttccaatcaattttatatgaatgctattataaaattcagtgtaaaatcttttcttgtctagcttaaaacttgtgtgtgtctagtatttttcttcaatgatttaacatttctgaaaatgtcaagttctcaaaatttagacaaaaaggggggtataaattgatctgaaaaaattaaatagtttaattagtttagggaatatacaactttttcattcttttggtttccagttttctatttttttttaatgattaggtagaatatagtgtcaaataagttataaattgcatggttaaagaaagccattcatctaatgtcctgtgaactttataagtggttaagtagttcatgtgagtagctgctttcaccatgcttaatatttaaaagtttaaaaagttttttgaagagagaggcaatttctgtacaatataaatatacatatatacttaagttattgatttgcatgtctataaaattaagcctcatttcctaatacatgataaattttgtagaataaaaggtgaatttgcattaaaggttcactttaatgaaggtgaaacatgagaatgagttgtgtgtgaaattcttatttgatatccagaggatagtttgcaaacctaaacttctgattgtttctgatttcagagatgcccgagtggtaaaagacatggcaacaggaaagtctaagggatatggctttgtctcctttttcaacaaatggtaactgggcaacccgaaagcctcccgctccaaagagtacatatgagtcaaataccaaacagctatcatatgatgaggttgtaaatcagtctagtccaagcaactgtactgtatactgtggaggtgttacttctgggctaacagaacaactaatgcgtcagactttttcaccatttggacaaataatggaaattcgagtctttccagataaaggatattcatttgttcggttcaattcccatgaaagtgcagcacatgcaattgtttctgttaatggtactaccattgaaggtcatgttgtgaaatgctattggggcaaagaaactcttgatatgataaatcccgtgcaacagcagaatcaaattggatatccccaaccttatggccagtggggccagtggtatggaaatgcacaacaaattggccagtatatgcctaatggttggcaagttcctgcatatggaatgtatggccaggcatggaaccagcaaggatttaatcagacacagtcttctgcaccatggatgggaccaaattatggagtgcaaccgcctcaagggcaaaatggcagcatgttgcccaatcagccttctgggtatcgagtggcagggtatgaaacccagtgaataaggactccagaatctaaagccagtggcttgaggctacagggagtgtagtaaagccgttgtttacttaaagatttatcaaatcagtcagtgcaaatgtcagatacaatgtatttatttaaaagattcatttttaatcatgaaattacttatcatccacattgttttaaaaagaaacaagatgctggatgtctgccaatttttgccttcattaccttttttgataaagtttctcagatccttgtttcaaacacaaatgcagggattgctgccactttttaactattaagaggcagaaaattgcacaatattgaacttttttccactgaagtagtgtgcagttctagtttgcattcctgatatgatttaaaacatgtaatataaagatgttaaaaaaaaaaaccaaaactgtgcagagtctagaagttgtttgtcatcttcagcttgtgcacaattctgttttaggttaaaaaaaggcattgtttgagctgtcccatctccactgttatccctttggggttttttaatataaattattagtttacatcatttttgtatctacatcttttttcacaaatttgtcttgccttattaaagttctgtaaaatatacttaaatggaaaaaatgatgttcatttagattgaaaacttttctcagatggattgataattgcattcatcttgtgttttatatgagaaggtgcctcaagaatttcctgttggatttgtttaaaaggatttttatctttcgtgataaactttgctgtgtaccaggaactataaaaacaaaaacttgttactaaagaaaatatctgaaatgtgataagttcttatgccatgttaatttcatgtgtcaacttcaacatttacatgtattatttcattatgtaaaatgttttagcaatttaatattttgcacagttagcaaactttgtatgtcatttccttcaaggcatcatgcagagttgacatgagatttataaggttttaagttgtttgcatgtgaaaatcaaatacatactttggtagtctttgaatacaaagtcatctgctcttgtttttcaagaattttgagacacaaagttgtatgtaaaggaatatattaatttgccgttttctaggtagatttgctcaaaaagagtgaatcaacttaatatgtacaaatgatagctgtgaaactgtagaatatctttgtgtcaggcttggagttcattgtgacctccaaattttgcctgaaggaccagctgggcaaagcatcttttaaatgttcagaggccaaaagataaacaaaaaaaaaaccttaaaatcctacctctttaaacagccttcagataagagaatcctcagtgcaatcattattttgattcgtttggtacctgttttcctggagttcccgattttattattttggggtggctccaagcattaagaggtttaatctttgatggcattgttctagttttgaaatttctagtatatttcagagtctcttagaagacttgtgtgggaagtttcactttgttttcagtgaagatcacaaacctccttcttcctttactcaagaggaaaggtcccagtatacatatttgaatggttgatggttttcaagaccttcagggagctccctgcattttacctagaaacagaaaaggcccgcaaaatcttaagtttcctggcctgcatttcccgggtaggggcaaatgactccaagctggtctctaagccaatacccttataaaccagagcccaggaaagacagctcgagtgtataattctctggagctcaattctatgcagttgtgctgatatttcattaagtcactgtgtatttttaagtgttgatacattaaaagtcgctttatggaagatgagtaaattttttaaatacttggaaattttatttccttgttaacttctacagatcagggcatgcaaccaaaagcagcttaaatgaaatattttaaaataaaatatcaggaagctatttttagatttcttctggcttatgtttctactttaggaccctcattgttctcttattaaaaaaaattatttcctgtgcatctcatggactgcagggtaaattatttgggcataaataatttaaatagttttctttcattttgactatctccagtaataacagtttttattatccagcatattggcttattgcacaaatcttaaaatgtacattgactactttctgagaagaaagtggtatcagtactcatgatgaaaaggttactactgaacaaattcacatttcaggaacacctctatctttggtttaaatcttactcttagtttttccgtctaaaaatcatactggtattagtatcaggtaaggaaattaaagtttttaaaatggtttcattctctgcaatatgcaaaatttagattttactttctggtactgtaaagaacctgaagtgatttacacttaatgggtgattaatccagtattctttaccctgaatgtttggatattaaagttcctttatgttttctataaacctgtgggatcttcttgcagtgattattgtgtgtgagattttttttctttttggtctatccatattgttatattcactcaggtattttttttttaatcttattccagaatcagtggtttatattgggttactgtttaacaccaaatggaattggcattctgcagatttaattaattatgaaaccagggtctcattttccttgctgatacttgttgaaaatgagattcacattctagtctttattttcctcctgttttgtccctgtgcttgtacatcttccttttatttgtgtgttatagttctattccatttgagaaggcagttggtaagaactagattgcatgtacaaagacaggtttactaagtgctgtacagtggtcctgaggttacagttgaattagaaaaacgaaatgtacttacaggaaataagaaagcaaacctttcaaatgagagtgatgatttctttaaaaaaaatcagtttttttctctcaaataatgttctttatttcacgaaatcgtcaatcttaagcatgagcagggataaacaactcctagaaggaactcaattcattcttcctggattttctctgttgttaaatcacaaaaatgatagtccccaatcgtttctttataggaggttattacatttcattacagtcactgcattttgactgttgtgtttagaatttgaatgtacatccaaaatgatgagtttcaatttaagagccttaataaaatgtgtgagtgtgtctcaattgaa

SEQ ID NO: 436676 - DNA, 4897 bp, Homo sapiens
gagcaagcattgtgacatacctgactaacttaaaagcagattgcctgtgaagcacaatttgagtccaattttttgaggtatggagttttagctatcatggctgggtttttactcaatctcaaataatagggctctggttattttgcagagtgtctctgaagaatggacagaattgccctggctaactacaagctacggttcacagtggataaatgttggcgtgcttttttactttctgactttttaaaattttgcttttatatcttgtagttccaatcaattttatatgaatgctattataaaattcagtgtaaaatcttttcttgtctagcttaaaacttgtgtgtgtctagtatttttcttcaatgatttaacatttctgaaaatgtcaagttctcaaaatttagacaaaaaggggggtataaattgatctgaatttccagttttctatttttttttaatgattaggtagaatatagtgtcaaataagttataaattgcatggttaaagaaagccattcatctaatgtcctgtgaactttataagtggttaagtagttcatgtgagtagctgctttcaccatgcttaatatttaaaagtttaaaaagttttttgaagagagaggcaatttctgtacaatataaatatacatatatacttaagttattgatttgcatgtctataaaattaagcctcatttcctaatacatgataaattttgtagaataaaaggtgaatttgcattaaaggttcactttaatgaaggtgaaacatgagaatgagttgtgtgtgaaattcttatttgatatccagaggatagtttgcaaacctaaacttctgattgtttctgatttcagagatgcccgagtggtaaaagacatggcaacaggaaagtctaagggatatggctttgtctcctttttcaacaaatgggatgctgaaaacgccattcaacagatgggtggccagtggcttggtggaagacaaatcagaactaactgggcaacccgaaagcctcccgctccaaagagtacatatgagtcaaataccaaacagctatcatatgatgaggttgtaaatcagtctagtccaagcaactgtactgtatactgtggaggtgttacttctgggctaacagaacaactaatgcgtcagactttttcaccatttggacaaataatggaaattcgagtctttccagataaaggatattcatttgttcggttcaattcccatgaaagtgcagcacatgcaattgtttctgttaatggtactaccattgaaggtcatgttgtgaaatgctattggggcaaagaaactcttgatatgataaatcccgtgcaacagcagaatcaaattggatatccccaaccttatggccagtggggccagtggtatggaaatgcacaacaaattggccagtatatgcctaatggttggcaagttcctgcatatggaatgtatggccaggcatggaaccagcaaggatttaatcagacacagtcttctgcaccatggatgggaccaaattatggagtgcaaccgcctcaagggcaaaatggcagcatgttgcccaatcagccttctgggtatcgagtggcagggtatgaaacccagtgaataaggactccagaatctaaagccagtggcttgaggctacagggagtgtagtaaagccgttgtttacttaaagatttatcaaatcagtcagtgcaaatgtcagatacaatgtatttatttaaaagattcatttttaatcatgaaattacttatcatccacattgttttaaaaagaaacaagatgctggatgtctgccaatttttgccttcattaccttttttgataaagtttctcagatccttgtttcaaacacaaatgcagggattgctgccactttttaactattaagaggcagaaaattgcacaatattgaacttttttccactgaagtagtgtgcagttctagtttgcattcctgatatgatttaaaacatgtaatataaagatgttaaaaaaaaaaaccaaaactgtgcagagtctagaagttgtttgtcatcttcagcttgtgcacaattctgttttaggttaaaaaaaggcattgtttgagctgtcccatctccactgttatccctttggggttttttaatataaattattagtttacatcatttttgtatctacatcttttttcacaaatttgtcttgccttattaaagttctgtaaaatatacttaaatggaaaaaatgatgttcatttagattgaaaacttttctcagatggattgataattgcattcatcttgtgttttatatgagaaggtgcctcaagaatttcctgttggatttgtttaaaaggatttttatctttcgtgataaactttgctgtgtaccaggaactataaaaacaaaaacttgttactaaagaaaatatctgaaatgtgataagttcttatgccatgttaatttcatgtgtcaacttcaacatttacatgtattatttcattatgtaaaatgttttagcaatttaatattttgcacagttagcaaactttgtatgtcatttccttcaaggcatcatgcagagttgacatgagatttataaggttttaagttgtttgcatgtgaaaatcaaatacatactttggtagtctttgaatacaaagtcatctgctcttgtttttcaagaattttgagacacaaagttgtatgtaaaggaatatattaatttgccgttttctaggtagatttgctcaaaaagagtgaatcaacttaatatgtacaaatgatagctgtgaaactgtagaatatctttgtgtcaggcttggagttcattgtgacctccaaattttgcctgaaggaccagctgggcaaagcatcttttaaatgttcagaggccaaaagataaacaaaaaaaaaaccttaaaatcctacctctttaaacagccttcagataagagaatcctcagtgcaatcattattttgattcgtttggtacctgttttcctggagttcccgattttattattttggggtggctccaagcattaagaggtttaatctttgatggcattgttctagttttgaaatttctagtatatttcagagtctcttagaagacttgtgtgggaagtttcactttgttttcagtgaagatcacaaacctccttcttcctttactcaagaggaaaggtcccagtatacatatttgaatggttgatggttttcaagaccttcagggagctccctgcattttacctagaaacagaaaaggcccgcaaaatcttaagtttcctggcctgcatttcccgggtaggggcaaatgactccaagctggtctctaagccaatacccttataaaccagagcccaggaaagacagctcgagtgtataattctctggagctcaattctatgcagttgtgctgatatttcattaagtcactgtgtatttttaagtgttgatacattaaaagtcgctttatggaagatgagtaaattttttaaatacttggaaattttatttccttgttaacttctacagatcagggcatgcaaccaaaagcagcttaaatgaaatattttaaaataaaatatcaggaagctatttttagatttcttctggcttatgtttctactttaggaccctcattgttctcttattaaaaaaaattatttcctgtgcatctcatggactgcagggtaaattatttgggcataaataatttaaatagttttctttcattttgactatctccagtaataacagtttttattatccagcatattggcttattgcacaaatcttaaaatgtacattgactactttctgagaagaaagtggtatcagtactcatgatgaaaaggttactactgaacaaattcacatttcaggaacacctctatctttggtttaaatcttactcttagtttttccgtctaaaaatcatactggtattagtatcaggtaaggaaattaaagtttttaaaatggtttcattctctgcaatatgcaaaatttagattttactttctggtactgtaaagaacctgaagtgatttacacttaatgggtgattaatccagtattctttaccctgaatgtttggatattaaagttcctttatgttttctataaacctgtgggatcttcttgcagtgattattgtgtgtgagattttttttctttttggtctatccatattgttatattcactcaggtattttttttttaatcttattccagaatcagtggtttatattgggttactgtttaacaccaaatggaattggcattctgcagatttaattaattatgaaaccagggtctcattttccttgctgatacttgttgaaaatgagattcacattctagtctttattttcctcctgttttgtccctgtgcttgtacatcttccttttatttgtgtgttatagttctattccatttgagaaggcagttggtaagaactagattgcatgtacaaagacaggtttactaagtgctgtacagtggtcctgaggttacagttgaattagaaaaacgaaatgtacttacaggaaataagaaagcaaacctttcaaatgagagtgatgatttctttaaaaaaaatcagtttttttctctcaaataatgttctttatttcacgaaatcgtcaatcttaagcatgagcagggataaacaactcctagaaggaactcaattcattcttcctggattttctctgttgttaaatcacaaaaatgatagtccccaatcgtttctttataggaggttattacatttcattacagtcactgcattttgactgttgtgtttagaatttgaatgtacatccaaaatgatgagtttcaatttaagagccttaataaaatgtgtgagtgtgtctcaattgaa

SEQ ID NO: 436677 - DNA, 4253 bp, Homo sapiens
gagcaagcattgtgacatacctgactaacttaaaagcagattgcctgtgaagcacaatttgagtccaattttttgaggtatggagttttagctatcatggctgggtttttactcaatctcaaataatagggctctggttattttgcagagtgtctctgaagaatggacagaattgccctggctaactacaagctacggttcacagtggataaatagatgcccgagtggtaaaagacatggcaacaggaaagtctaagggatatggctttgtctcctttttcaacaaatgggatgctgaaaacgccattcaacagatgggtggccagtggcttggtggaagacaaatcagaactaactgggcaacccgaaagcctcccgctccaaagagtacatatgagtcaaataccaaacagctatcatatgatgaggttgtaaatcagtctagtccaagcaactgtactgtatactgtggaggtgttacttctgggctaacagaacaactaatgcgtcagactttttcaccatttggacaaataatggaaattcgagtctttccagataaaggatattcatttgttcggttcaattcccatgaaagtgcagcacatgcaattgtttctgttaatggtactaccattgaaggtcatgttgtgaaatgctattggggcaaagaaactcttgatatgataaatcccgtgcaacagcagaatcaaattggatatccccaaccttatggccagtggggccagtggtatggaaatgcacaacaaattggccagtatatgcctaatggttggcaagttcctgcatatggaatgtatggccaggcatggaaccagcaaggatttaatcagacacagtcttctgcaccatggatgggaccaaattatggagtgcaaccgcctcaagggcaaaatggcagcatgttgcccaatcagccttctgggtatcgagtggcagggtatgaaacccagtgaataaggactccagaatctaaagccagtggcttgaggctacagggagtgtagtaaagccgttgtttacttaaagatttatcaaatcagtcagtgcaaatgtcagatacaatgtatttatttaaaagattcatttttaatcatgaaattacttatcatccacattgttttaaaaagaaacaagatgctggatgtctgccaatttttgccttcattaccttttttgataaagtttctcagatccttgtttcaaacacaaatgcagggattgctgccactttttaactattaagaggcagaaaattgcacaatattgaacttttttccactgaagtagtgtgcagttctagtttgcattcctgatatgatttaaaacatgtaatataaagatgttaaaaaaaaaaaccaaaactgtgcagagtctagaagttgtttgtcatcttcagcttgtgcacaattctgttttaggttaaaaaaaggcattgtttgagctgtcccatctccactgttatccctttggggttttttaatataaattattagtttacatcatttttgtatctacatcttttttcacaaatttgtcttgccttattaaagttctgtaaaatatacttaaatggaaaaaatgatgttcatttagattgaaaacttttctcagatggattgataattgcattcatcttgtgttttatatgagaaggtgcctcaagaatttcctgttggatttgtttaaaaggatttttatctttcgtgataaactttgctgtgtaccaggaactataaaaacaaaaacttgttactaaagaaaatatctgaaatgtgataagttcttatgccatgttaatttcatgtgtcaacttcaacatttacatgtattatttcattatgtaaaatgttttagcaatttaatattttgcacagttagcaaactttgtatgtcatttccttcaaggcatcatgcagagttgacatgagatttataaggttttaagttgtttgcatgtgaaaatcaaatacatactttggtagtctttgaatacaaagtcatctgctcttgtttttcaagaattttgagacacaaagttgtatgtaaaggaatatattaatttgccgttttctaggtagatttgctcaaaaagagtgaatcaacttaatatgtacaaatgatagctgtgaaactgtagaatatctttgtgtcaggcttggagttcattgtgacctccaaattttgcctgaaggaccagctgggcaaagcatcttttaaatgttcagaggccaaaagataaacaaaaaaaaaaccttaaaatcctacctctttaaacagccttcagataagagaatcctcagtgcaatcattattttgattcgtttggtacctgttttcctggagttcccgattttattattttggggtggctccaagcattaagaggtttaatctttgatggcattgttctagttttgaaatttctagtatatttcagagtctcttagaagacttgtgtgggaagtttcactttgttttcagtgaagatcacaaacctccttcttcctttactcaagaggaaaggtcccagtatacatatttgaatggttgatggttttcaagaccttcagggagctccctgcattttacctagaaacagaaaaggcccgcaaaatcttaagtttcctggcctgcatttcccgggtaggggcaaatgactccaagctggtctctaagccaatacccttataaaccagagcccaggaaagacagctcgagtgtataattctctggagctcaattctatgcagttgtgctgatatttcattaagtcactgtgtatttttaagtgttgatacattaaaagtcgctttatggaagatgagtaaattttttaaatacttggaaattttatttccttgttaacttctacagatcagggcatgcaaccaaaagcagcttaaatgaaatattttaaaataaaatatcaggaagctatttttagatttcttctggcttatgtttctactttaggaccctcattgttctcttattaaaaaaaattatttcctgtgcatctcatggactgcagggtaaattatttgggcataaataatttaaatagttttctttcattttgactatctccagtaataacagtttttattatccagcatattggcttattgcacaaatcttaaaatgtacattgactactttctgagaagaaagtggtatcagtactcatgatgaaaaggttactactgaacaaattcacatttcaggaacacctctatctttggtttaaatcttactcttagtttttccgtctaaaaatcatactggtattagtatcaggtaaggaaattaaagtttttaaaatggtttcattctctgcaatatgcaaaatttagattttactttctggtactgtaaagaacctgaagtgatttacacttaatgggtgattaatccagtattctttaccctgaatgtttggatattaaagttcctttatgttttctataaacctgtgggatcttcttgcagtgattattgtgtgtgagattttttttctttttggtctatccatattgttatattcactcaggtattttttttttaatcttattccagaatcagtggtttatattgggttactgtttaacaccaaatggaattggcattctgcagatttaattaattatgaaaccagggtctcattttccttgctgatacttgttgaaaatgagattcacattctagtctttattttcctcctgttttgtccctgtgcttgtacatcttccttttatttgtgtgttatagttctattccatttgagaaggcagttggtaagaactagattgcatgtacaaagacaggtttactaagtgctgtacagtggtcctgaggttacagttgaattagaaaaacgaaatgtacttacaggaaataagaaagcaaacctttcaaatgagagtgatgatttctttaaaaaaaatcagtttttttctctcaaataatgttctttatttcacgaaatcgtcaatcttaagcatgagcagggataaacaactcctagaaggaactcaattcattcttcctggattttctctgttgttaaatcacaaaaatgatagtccccaatcgtttctttataggaggttattacatttcattacagtcactgcattttgactgttgtgtttagaatttgaatgtacatccaaaatgatgagtttcaatttaagagccttaataaaatgtgtgagtgtgtctcaattgaa

SEQ ID NO: 436678 - DNA, 4386 bp, Homo sapiens
gagcaagcattgtgacatacctgactaacttaaaagcagattgcctgtgaagcacaatttgagtccaattttttgaggtatggagttttagctatcatggctgggtttttactcaatctcaaataatagggctctggttattttgcagagtgtctctgaagaatggacagaattgccctggctaactacaagctacggttcacagtggataaatagatgcccgagtggtaaaagacatggcaacaggaaagtctaagggatatggctttgtctcctttttcaacaaatgggatgctgaaaacgccattcaacagatgggtggccagtggcttggtggaagacaaatcagaactaactgggcaacccgaaagcctcccgctccaaagagtacatatgagtgtaggtgtattggagaagaaaaggaaatgtggaattttggagaaaaatacgctagattttaaatgttagagctgttcccggagacttattgcagaaatagatgagaagcaaatcaagactactattcaaaaatcaaataccaaacagctatcatatgatgaggttgtaaatcagtctagtccaagcaactgtactgtatactgtggaggtgttacttctgggctaacagaacaactaatgcgtcagactttttcaccatttggacaaataatggaaattcgagtctttccagataaaggatattcatttgttcggttcaattcccatgaaagtgcagcacatgcaattgtttctgttaatggtactaccattgaaggtcatgttgtgaaatgctattggggcaaagaaactcttgatatgataaatcccgtgcaacagcagaatcaaattggatatccccaaccttatggccagtggggccagtggtatggaaatgcacaacaaattggccagtatatgcctaatggttggcaagttcctgcatatggaatgtatggccaggcatggaaccagcaaggatttaatcagacacagtcttctgcaccatggatgggaccaaattatggagtgcaaccgcctcaagggcaaaatggcagcatgttgcccaatcagccttctgggtatcgagtggcagggtatgaaacccagtgaataaggactccagaatctaaagccagtggcttgaggctacagggagtgtagtaaagccgttgtttacttaaagatttatcaaatcagtcagtgcaaatgtcagatacaatgtatttatttaaaagattcatttttaatcatgaaattacttatcatccacattgttttaaaaagaaacaagatgctggatgtctgccaatttttgccttcattaccttttttgataaagtttctcagatccttgtttcaaacacaaatgcagggattgctgccactttttaactattaagaggcagaaaattgcacaatattgaacttttttccactgaagtagtgtgcagttctagtttgcattcctgatatgatttaaaacatgtaatataaagatgttaaaaaaaaaaaccaaaactgtgcagagtctagaagttgtttgtcatcttcagcttgtgcacaattctgttttaggttaaaaaaaggcattgtttgagctgtcccatctccactgttatccctttggggttttttaatataaattattagtttacatcatttttgtatctacatcttttttcacaaatttgtcttgccttattaaagttctgtaaaatatacttaaatggaaaaaatgatgttcatttagattgaaaacttttctcagatggattgataattgcattcatcttgtgttttatatgagaaggtgcctcaagaatttcctgttggatttgtttaaaaggatttttatctttcgtgataaactttgctgtgtaccaggaactataaaaacaaaaacttgttactaaagaaaatatctgaaatgtgataagttcttatgccatgttaatttcatgtgtcaacttcaacatttacatgtattatttcattatgtaaaatgttttagcaatttaatattttgcacagttagcaaactttgtatgtcatttccttcaaggcatcatgcagagttgacatgagatttataaggttttaagttgtttgcatgtgaaaatcaaatacatactttggtagtctttgaatacaaagtcatctgctcttgtttttcaagaattttgagacacaaagttgtatgtaaaggaatatattaatttgccgttttctaggtagatttgctcaaaaagagtgaatcaacttaatatgtacaaatgatagctgtgaaactgtagaatatctttgtgtcaggcttggagttcattgtgacctccaaattttgcctgaaggaccagctgggcaaagcatcttttaaatgttcagaggccaaaagataaacaaaaaaaaaaccttaaaatcctacctctttaaacagccttcagataagagaatcctcagtgcaatcattattttgattcgtttggtacctgttttcctggagttcccgattttattattttggggtggctccaagcattaagaggtttaatctttgatggcattgttctagttttgaaatttctagtatatttcagagtctcttagaagacttgtgtgggaagtttcactttgttttcagtgaagatcacaaacctccttcttcctttactcaagaggaaaggtcccagtatacatatttgaatggttgatggttttcaagaccttcagggagctccctgcattttacctagaaacagaaaaggcccgcaaaatcttaagtttcctggcctgcatttcccgggtaggggcaaatgactccaagctggtctctaagccaatacccttataaaccagagcccaggaaagacagctcgagtgtataattctctggagctcaattctatgcagttgtgctgatatttcattaagtcactgtgtatttttaagtgttgatacattaaaagtcgctttatggaagatgagtaaattttttaaatacttggaaattttatttccttgttaacttctacagatcagggcatgcaaccaaaagcagcttaaatgaaatattttaaaataaaatatcaggaagctatttttagatttcttctggcttatgtttctactttaggaccctcattgttctcttattaaaaaaaattatttcctgtgcatctcatggactgcagggtaaattatttgggcataaataatttaaatagttttctttcattttgactatctccagtaataacagtttttattatccagcatattggcttattgcacaaatcttaaaatgtacattgactactttctgagaagaaagtggtatcagtactcatgatgaaaaggttactactgaacaaattcacatttcaggaacacctctatctttggtttaaatcttactcttagtttttccgtctaaaaatcatactggtattagtatcaggtaaggaaattaaagtttttaaaatggtttcattctctgcaatatgcaaaatttagattttactttctggtactgtaaagaacctgaagtgatttacacttaatgggtgattaatccagtattctttaccctgaatgtttggatattaaagttcctttatgttttctataaacctgtgggatcttcttgcagtgattattgtgtgtgagattttttttctttttggtctatccatattgttatattcactcaggtattttttttttaatcttattccagaatcagtggtttatattgggttactgtttaacaccaaatggaattggcattctgcagatttaattaattatgaaaccagggtctcattttccttgctgatacttgttgaaaatgagattcacattctagtctttattttcctcctgttttgtccctgtgcttgtacatcttccttttatttgtgtgttatagttctattccatttgagaaggcagttggtaagaactagattgcatgtacaaagacaggtttactaagtgctgtacagtggtcctgaggttacagttgaattagaaaaacgaaatgtacttacaggaaataagaaagcaaacctttcaaatgagagtgatgatttctttaaaaaaaatcagtttttttctctcaaataatgttctttatttcacgaaatcgtcaatcttaagcatgagcagggataaacaactcctagaaggaactcaattcattcttcctggattttctctgttgttaaatcacaaaaatgatagtccccaatcgtttctttataggaggttattacatttcattacagtcactgcattttgactgttgtgtttagaatttgaatgtacatccaaaatgatgagtttcaatttaagagccttaataaaatgtgtgagtgtgtctcaattgaa

SEQ ID NO: 436679 - DNA, 4624 bp, Homo sapiens
aacccagttggcggaggttgcagtgacccaagatcacaccactgcactccatcctgggtgacagagcgagactctatctgaaaaaataaataaaataaaatttaaaaatataaaaagcaccattgcattttaggaaagctatcatatgttgtgtatttcatagagcattttcacttaaacatttgtgaaaagcaccaagttttctctactgctaagagttgtttaacatcaactaatagtgacttctttattgtttctaatgttgtacggaacaggatgctgaaaacgccattcaacagatgggtggccagtggcttggtggaagacaaatcagaactaactgggcaacccgaaagcctcccgctccaaagagtacatatgagtgtaggtgtattggagaagaaaaggaaatgtggaattttggagaaaaatacgctagattttaaatgttagagctgttcccggagacttattgcagaaatagatgagaagcaaatcaagactactattcaaaaatgtacttagttttcatttttgtaattataaataatattatttctaatgtcaagtctcctattaaatagaaaatactgggtaattttttagacattcgtgggggaggtttaattctgaactgaagtataatatgtgtaatataagcattttgatcaaggttaatgttacctttacagtagtgtagtgaatgctacttttctctttctgcacattttatttaatgaattaaagacataaaccttttctctcaccagcaaataccaaacagctatcatatgatgaggttgtaaatcagtctagtccaagcaactgtactgtatactgtggaggtgttacttctgggctaacagaacaactaatgcgtcagactttttcaccatttggacaaataatggaaattcgagtctttccagataaaggatattcatttgttcggttcaattcccatgaaagtgcagcacatgcaattgtttctgttaatggtactaccattgaaggtcatgttgtgaaatgctattggggcaaagaaactcttgatatgataaatcccgtgcaacagcagaatcaaattggatatccccaaccttatggccagtggggccagtggtatggaaatgcacaacaaattggccagtatatgcctaatggttggcaagttcctgcatatggaatgtatggccaggcatggaaccagcaaggatttaatcagacacagtcttctgcaccatggatgggaccaaattatggagtgcaaccgcctcaagggcaaaatggcagcatgttgcccaatcagccttctgggtatcgagtggcagggtatgaaacccagtgaataaggactccagaatctaaagccagtggcttgaggctacagggagtgtagtaaagccgttgtttacttaaagatttatcaaatcagtcagtgcaaatgtcagatacaatgtatttatttaaaagattcatttttaatcatgaaattacttatcatccacattgttttaaaaagaaacaagatgctggatgtctgccaatttttgccttcattaccttttttgataaagtttctcagatccttgtttcaaacacaaatgcagggattgctgccactttttaactattaagaggcagaaaattgcacaatattgaacttttttccactgaagtagtgtgcagttctagtttgcattcctgatatgatttaaaacatgtaatataaagatgttaaaaaaaaaaaccaaaactgtgcagagtctagaagttgtttgtcatcttcagcttgtgcacaattctgttttaggttaaaaaaaggcattgtttgagctgtcccatctccactgttatccctttggggttttttaatataaattattagtttacatcatttttgtatctacatcttttttcacaaatttgtcttgccttattaaagttctgtaaaatatacttaaatggaaaaaatgatgttcatttagattgaaaacttttctcagatggattgataattgcattcatcttgtgttttatatgagaaggtgcctcaagaatttcctgttggatttgtttaaaaggatttttatctttcgtgataaactttgctgtgtaccaggaactataaaaacaaaaacttgttactaaagaaaatatctgaaatgtgataagttcttatgccatgttaatttcatgtgtcaacttcaacatttacatgtattatttcattatgtaaaatgttttagcaatttaatattttgcacagttagcaaactttgtatgtcatttccttcaaggcatcatgcagagttgacatgagatttataaggttttaagttgtttgcatgtgaaaatcaaatacatactttggtagtctttgaatacaaagtcatctgctcttgtttttcaagaattttgagacacaaagttgtatgtaaaggaatatattaatttgccgttttctaggtagatttgctcaaaaagagtgaatcaacttaatatgtacaaatgatagctgtgaaactgtagaatatctttgtgtcaggcttggagttcattgtgacctccaaattttgcctgaaggaccagctgggcaaagcatcttttaaatgttcagaggccaaaagataaacaaaaaaaaaaccttaaaatcctacctctttaaacagccttcagataagagaatcctcagtgcaatcattattttgattcgtttggtacctgttttcctggagttcccgattttattattttggggtggctccaagcattaagaggtttaatctttgatggcattgttctagttttgaaatttctagtatatttcagagtctcttagaagacttgtgtgggaagtttcactttgttttcagtgaagatcacaaacctccttcttcctttactcaagaggaaaggtcccagtatacatatttgaatggttgatggttttcaagaccttcagggagctccctgcattttacctagaaacagaaaaggcccgcaaaatcttaagtttcctggcctgcatttcccgggtaggggcaaatgactccaagctggtctctaagccaatacccttataaaccagagcccaggaaagacagctcgagtgtataattctctggagctcaattctatgcagttgtgctgatatttcattaagtcactgtgtatttttaagtgttgatacattaaaagtcgctttatggaagatgagtaaattttttaaatacttggaaattttatttccttgttaacttctacagatcagggcatgcaaccaaaagcagcttaaatgaaatattttaaaataaaatatcaggaagctatttttagatttcttctggcttatgtttctactttaggaccctcattgttctcttattaaaaaaaattatttcctgtgcatctcatggactgcagggtaaattatttgggcataaataatttaaatagttttctttcattttgactatctccagtaataacagtttttattatccagcatattggcttattgcacaaatcttaaaatgtacattgactactttctgagaagaaagtggtatcagtactcatgatgaaaaggttactactgaacaaattcacatttcaggaacacctctatctttggtttaaatcttactcttagtttttccgtctaaaaatcatactggtattagtatcaggtaaggaaattaaagtttttaaaatggtttcattctctgcaatatgcaaaatttagattttactttctggtactgtaaagaacctgaagtgatttacacttaatgggtgattaatccagtattctttaccctgaatgtttggatattaaagttcctttatgttttctataaacctgtgggatcttcttgcagtgattattgtgtgtgagattttttttctttttggtctatccatattgttatattcactcaggtattttttttttaatcttattccagaatcagtggtttatattgggttactgtttaacaccaaatggaattggcattctgcagatttaattaattatgaaaccagggtctcattttccttgctgatacttgttgaaaatgagattcacattctagtctttattttcctcctgttttgtccctgtgcttgtacatcttccttttatttgtgtgttatagttctattccatttgagaaggcagttggtaagaactagattgcatgtacaaagacaggtttactaagtgctgtacagtggtcctgaggttacagttgaattagaaaaacgaaatgtacttacaggaaataagaaagcaaacctttcaaatgagagtgatgatttctttaaaaaaaatcagtttttttctctcaaataatgttctttatttcacgaaatcgtcaatcttaagcatgagcagggataaacaactcctagaaggaactcaattcattcttcctggattttctctgttgttaaatcacaaaaatgatagtccccaatcgtttctttataggaggttattacatttcattacagtcactgcattttgactgttgtgtttagaatttgaatgtacatccaaaatgatgagtttcaatttaagagccttaataaaatgtgtgagtgtgtctcaattgaa

SEQ ID NO: 436680 - DNA, 3813 bp, Homo sapiens
  misc_feature (3670)..(3670): n is a, c, g, or t
  misc_feature (3672)..(3672): n is a, c, g, or t
  misc_feature (3674)..(3674): n is a, c, g, or t
  misc_feature (3678)..(3678): n is a, c, g, or t
  misc_feature (3682)..(3682): n is a, c, g, or t
  misc_feature (3684)..(3684): n is a, c, g, or t
  misc_feature (3689)..(3689): n is a, c, g, or t
aggctcccggctcgccgccatcttgtattggggtttcattgttcccgctgggccgggcggtttagtgtaattgccgccggaggaggaggcggagtaacctctggtcagccgagaaaccccactatcctgtagccataaccgcttaaacgatttgggaggtagtgaagggcagggagctggacctggaggcgccgccgcgacagcagcagccatggaggacgagatgcccaagactctatacgtcggtaacctttccagagatgtgacagaagctctaattctgcaactctttagccagattggaccttgtaaaaactgcaaaatgattatggatacagctggaaatgatccctattgttttgtggagtttcatgagcatcgtcatgcagctgcagcattagctgctatgaatggacggaagataatgggtaaggaagtcaaagtgaattgggcaacaacccctagcagtcaaaagaaagatacaagcaatcatttccatgtctttgttggtgatctcagcccagaaattacaactgaagatataaaagctgcttttgcaccatttggaagaatatcagatgcccgagtggtaaaagacatggcaacaggaaagtctaagggatatggctttgtctcctttttcaacaaatgggatgctgaaaacgccattcaacagatgggtggccagtggcttggtggaagacaaatcagaactaactgggcaacccgaaagcctcccgctccaaagagtacatatgagtcaaataccaaacagctatcatatgatgaggttgtaaatcagtctagtccaagcaactgtactgtatactgtggaggtgttacttctgggctaacagaacaactaatgcgtcagactttttcaccatttggacaaataatggaaattcgagtctttccagataaaggatattcatttgttcggttcaattcccatgaaagtgcagcacatgcaattgtttctgttaatggtactaccattgaaggtcatgttgtgaaatgctattggggcaaagaaactcttgatatgataaatcccgtgcaacagcagaatcaaattggatatccccaaccttatggccagtggggccagtggtatggaaatgcacaacaaattggccagtatatgcctaatggttggcaagttcctgcatatggaatgtatggccaggcatggaaccagcaaggatttaatcagacacagtcttctgcaccatggatgggaccaaattatggagtgcaaccgcctcaagggcaaaatggcagcatgttgcccaatcagccttctgggtatcgagtggcagggtatgaaacccagtgaataaggactccagaatctaaagccagtggcttgaggctacagggagtgtagtaaagccgttgtttacttaaagatttatcaaatcagtcagtgcaaatgtcagatacaatgtatttatttaaaagattcatttttaatcatgaaattacttatcatccacattgttttaaaaagaaacaagatgctggatgtctgccaatttttgccttcattaccttttttgataaagtttctcagatccttgtttcaaacacaaatgcagggattgctgccactttttaactattaagaggcagaaaattgcacaatattgaacttttttccactgaagtagtgtgcagttctagtttgcattcctgatatgatttaaaacatgtaatataaagatgttaaaaaaaaaaaccaaaactgtgcagagtctagaagttgtttgtcatcttcagcttgtgcacaattctgttttaggttaaaaaaaggcattgtttgagctgtcccatctccactgttatccctttggggttttttaatataaattattagtttacatcatttttgtatctacatcttttttcacaaatttgtcttgccttattaaagttctgtaaaatatacttaaatggaaaaaatgatgttcatttagattgaaaacttttctcagatggattgataattgcattcatcttgtgttttatatgagaaggtgcctcaagaatttcctgttggatttgtttaaaaggatttttatctttcgtgataaactttgctgtgtaccaggaactataaaaacaaaaacttgttactaaagaaaatatctgaaatgtgataagttcttatgccatgttaatttcatgtgtcaacttcaacatttacatgtattatttcattatgtaaaatgttttagcaatttaatattttgcacagttagcaaactttgtatgtcatttccttcaaggcatcatgcagagttgacatgagatttataaggttttaagttgtttgcatgtgaaaatcaaatacatactttggtagtctttgaatacaaagtcatctgctcttgtttttcaagaattttgagacacaaagttgtatgtaaaggaatatattaatttgccgttttctaggtagatttgctcaaaaagagtgaatcaacttaatatgtacaaatgatagctgtgaaactgtagaatatctttgtgtcaggcttggagttcattgtgacctccaaattttgcctgaaggaccagctgggcaaagcatcttttaaatgttcagaggccaaaagataaacaaaaaaaaaaccttaaaatcctacctctttaaacagccttcagataagagaatcctcagtgcaatcattattttgattcgtttggtacctgttttcctggagttcccgattttattattttggggtggctccaagcattaagaggtttaatctttgatggcattgttctagttttgaaatttctagtatatttcagagtctcttagaagacttgtgtgggaagtttcactttgttttcagtgaagatcacaaacctccttcttcctttactcaagaggaaaggtcccagtatacatatttgaatggttgatggttttcaagaccttcagggagctccctgcattttacctagaaacagaaaaggcccgcaaaatcttaagtttcctggcctgcatttcccgggtaggggcaaatgactccaagctggtctctaagccaatacccttataaaccagagcccaggaaagacagctcgagtgtataattctctggagctcaattctatgcagttgtgctgatatttcattaagtcactgtgtatttttaagtgttgatacattaaaagtcgctttatggaagatgagtaaattttttaaatacttggaaattttatttccttgttaacttctacagatcagggcatgcaaccaaaagcagcttaaatgaaatattttaaaataaaatatcaggaagctatttttagatttcttctggcttatgtttctactttaggaccctcattgttctcttattaaaaaaaattatttcctgtgcatctcatggactgcagggtaaattatttgggcataaataatttaaatagttttctttcattttgactatctccagtaataacagtttttattatccagcatattggcttattgcacaaatcttaaaatgtacattgactactttctgagaagaaagtggtatcagtactcatgatgaaaaggttactactgaacaaattcacatttcaggaacacctctatctttggtttaaatcttactcttagtttttccgtctaaaaatcatacgntnanatcnggangnaatangtttaaaggtgctttctggaattggaattagattacttggggtcggaacaccgagggtacctatgggggatcagattacgaaggggataaggctgtgtttgaaacaaaaaaaaagggggtggaa

SEQ ID NO: 436681 - DNA, 2993 bp, Homo sapiens
tggatcccccgggctgcaggttcaaacacaaatgcagggattgctgccactttttaactattaagaggcagaaaattgcacaatattgaacttttttccactgaagtagtgtgcagttctagtttgcattcctgatatgatttaaaacatgtaatataaagatgttaaaaattctgttttaggttaaaaaaaggcattgtttgagctgtcccatctccactgttatccctttggggttttttaatataaattattagtttacatcatttttgtatctacatcttttttcacaaatttgtcttgccttattaaagttctgtaaaatatacttaaatggaaaaaatgatgttcatttagattgaaaacttttctcagatggattgataattgcattcatcttgtgttttatatgagaaggtgcctcaagaatttcctgttggatttgtttaaaaggatttttatctttcgtgataaactttgctgtgtaccaggaactataaaaacaaaaacttgttactaaagaaaatatctgaaatgtgataagttcttatgccatgttaatttcatgtgtcaacttcaacatttacatgtattatttcattatgtaaaatgttttagcaatttaatattttgcacagttagcaaactttgtatgtcatttccttcaaggcatcatgcagagttgacatgagatttataaggttttaagttgtttgcatgtgaaaatcaaatacatactttggtagtctttgaatacaaagtcatctgctcttgtttttcaagaattttgagacacaaagttgtatgtaaaggaatatattaatttgccgttttctaggtagatttgctcaaaaagagtgaatcaacttaatatgtacaaatgatagctgtgaaactgtagaatatctttgtgtcaggcttggagttcattgtgacctccaaattttgcctgaaggaccagctgggcaaagcatcttttaaatgttcagaggccaaaagataaacaaaaaaaaaaccttaaaatcctacctctttaaacagccttcagataagagaatcctcagtgcaatcattattttgattcgtttggtacctgttttcctggagttcccgattttattattttggggtggctccaagcattaagaggtttaatctttgatggcattgttctagttttgaaatttctagtatatttcagagtctcttagaagacttgtgtgggaagtttcactttgttttcagtgaagatcacaaacctccttcttcctttactcaagaggaaaggtcccagtatacatatttgaatggttgatggttttcaagaccttcagggagctccctgcattttacctagaaacagaaaaggcccgcaaaatcttaagtttcctggcctgcatttcccgggtaggggcaaatgactccaagctggtctctaagccaatacccttataaaccagagcccaggaaagacagctcgagtgtataattctctggagctcaattctatgcagttgtgctgatatttcattaagtcactgtgtatttttaagtgttgatacattaaaagtcgctttatggaagatgagtaaattttttaaatacttggaaattttatttccttgttaacttctacagatcagggcatgcaaccaaaagcagcttaaatgaaatattttaaaataaaatatcaggaagctatttttagatttcttctggcttatgtttctactttaggaccctcattgttctcttattaaaaaaaattatttcctgtgcatctcatggactgcagggtaaattatttgggcataaataatttaaatagttttctttcattttgactatctccagtaataacagtttttattatccagcatattggcttattgcacaaatcttaaaatgtacattgactactttctgagaagaaagtggtatcagtactcatgatgaaaaggttactactgaacaaattcacatttcaggaacacctctatctttggtttaaatcttactcttagtttttccgtctaaaaatcatactggtattagtatcaggtaaggaaattaaagtttttaaaatggtttcattctctgcaatatgcaaaatttagattttactttctggtactgtaaagaacctgaagtgatttacacttaatgggtgattaatccagtattctttaccctgaatgtttggatattaaagttcctttatgttttctataaacctgtgggatcttcttgcagtgattattgtgtgtgagattttttttctttttggtctatccatattgttatattcactcaggtattttttttttaatcttattccagaatcagtggtttatattgggttactgtttaacaccaaatggaattggcattctgcagatttaattaattatgaaaccagggtctcattttccttgctgatacttgttgaaaatgagattcacattctagtctttattttcctcctgttttgtccctgtgcttgtacatcttccttttatttgtgtgttatagttctattccatttgagaaggcagttggtaagaactagattgcatgtacaaagacaggtttactaagtgctgtacagtggtcctgaggttacagttgaattagaaaaacgaaatgtacttacaggaaataagaaagcaaacctttcaaatgagagtgatgatttctttaaaaaaaatcagtttttttctctcaaataatgttctttatttcacgaaatcgtcaatcttaagcatgagcagggataaacaactcctagaaggaactcaattcattcttcctggattttctctgttgttaaatcacaaaaatgatagtccccaatcgtttctttataggaggttattacatttcattacagtcactgcattttgactgttgtgtttagaatttgaatgtacatccaaaatgatgagtttcaatttaagagccttaataaaatgtgtgagtgtgtctcaattgaa

SEQ ID NO: 436682 - DNA, 3007 bp, Homo sapiens
gttcctactggtaaacccctccagtatctttgacaccaacccgattaaagtctggcccggcgagtaacacatagacctttattaggattaccggagtaattctttatccatcaaaccagatcaatagctgctttagtctgaaggtgggtcatcaaaagagaccgttgcctctcccttcagcttgccagtttccctgtctgtgtacaaattaatcatgggctgtcccatctccactgttatccctttggggttttttaatataaattattagtttacatcatttttgtatctacatcttttttcacaaatttgtcttgccttattaaagttctgtaaaatatacttaaatggaaaaaatgatgttcatttagattgaaaacttttctcagatggattgataattgcattcatcttgtgttttatatgagaaggtgcctcaagaatttcctgttggatttgtttaaaaggatttttatctttcgtgataaactttgctgtgtaccaggaactataaaaacaaaaacttgttactaaagaaaatatctgaaatgtgataagttcttatgccatgttaatttcatgtgtcaacttcaacatttacatgtattatttcattatgtaaaatgttttagcaatttaatattttgcacagttagcaaactttgtatgtcatttccttcaaggcatcatgcagagttgacatgagatttataaggttttaagttgtttgcatgtgaaaatcaaatacatactttggtagtctttgaatacaaagtcatctgctcttgtttttcaagaattttgagacacaaagttgtatgtaaaggaatatattaatttgccgttttctaggtagatttgctcaaaaagagtgaatcaacttaatatgtacaaatgatagctgtgaaactgtagaatatctttgtgtcaggcttggagttcattgtgacctccaaattttgcctgaaggaccagctgggcaaagcatcttttaaatgttcagaggccaaaagataaacaaaaaaaaaaccttaaaatcctacctctttaaacagccttcagataagagaatcctcagtgcaatcattattttgattcgtttggtacctgttttcctggagttcccgattttattattttggggtggctccaagcattaagaggtttaatctttgatggcattgttctagttttgaaatttctagtatatttcagagtctcttagaagacttgtgtgggaagtttcactttgttttcagtgaagatcacaaacctccttcttcctttactcaagaggaaaggtcccagtatacatatttgaatggttgatggttttcaagaccttcagggagctccctgcattttacctagaaacagaaaaggcccgcaaaatcttaagtttcctggcctgcatttcccgggtaggggcaaatgactccaagctggtctctaagccaatacccttataaaccagagcccaggaaagacagctcgagtgtataattctctggagctcaattctatgcagttgtgctgatatttcattaagtcactgtgtatttttaagtgttgatacattaaaagtcgctttatggaagatgagtaaattttttaaatacttggaaattttatttccttgttaacttctacagatcagggcatgcaaccaaaagcagcttaaatgaaatattttaaaataaaatatcaggaagctatttttagatttcttctggcttatgtttctactttaggaccctcattgttctcttattaaaaaaaattatttcctgtgcatctcatggactgcagggtaaattatttgggcataaataatttaaatagttttctttcattttgactatctccagtaataacagtttttattatccagcatattggcttattgcacaaatcttaaaatgtacattgactactttctgagaagaaagtggtatcagtactcatgatgaaaaggttactactgaacaaattcacatttcaggaacacctctatctttggtttaaatcttactcttagtttttccgtctaaaaatcatactggtattagtatcaggtaaggaaattaaagtttttaaaatggtttcattctctgcaatatgcaaaatttagattttactttctggtactgtaaagaacctgaagtgatttacacttaatgggtgattaatccagtattctttaccctgaatgtttggatattaaagttcctttatgttttctataaacctgtgggatcttcttgcagtgattattgtgtgtgagattttttttctttttggtctatccatattgttatattcactcaggtattttttttttaatcttattccagaatcagtggtttatattgggttactgtttaacaccaaatggaattggcattctgcagatttaattaattatgaaaccagggtctcattttccttgctgatacttgttgaaaatgagattcacattctagtctttattttcctcctgttttgtccctgtgcttgtacatcttccttttatttgtgtgttatagttctattccatttgagaaggcagttggtaagaactagattgcatgtacaaagacaggtttactaagtgctgtacagtggtcctgaggttacagttgaattagaaaaacgaaatgtacttacaggaaataagaaagcaaacctttcaaatgagagtgatgatttctttaaaaaaaatcagtttttttctctcaaataatgttctttatttcacgaaatcgtcaatcttaagcatgagcagggataaacaactcctagaaggaactcaattcattcttcctggattttctctgttgttaaatcacaaaaatgatagtccccaatcgtttctttataggaggttattacatttcattacagtcactgcattttgactgttgtgtttagaatttgaatgtacatccaaaatgatgagtttcaatttaagagccttaataaaatgtgtgagtgtgtctcaattgaa

SEQ ID NO: 436683 - DNA, 2294 bp, Homo sapiens
gcggccgcttactactactactactactactaaattcgcggccgcgtcgactgaatacaaagtcatctgctcttgtttttcaagaattttgagacacaaagttgtatgtaaaggaatatattaatttgccgttttctaggtagatttgctcaaaaagagtgaatcaacttaatatgtacaaatgatagctgtgaaactgtagaatatctttgtgtcaggcttggagttcattgtgacctccaaattttgcctgaaggaccagctgggcaaagcatcttttaaatgttcagaggccaaaagataaacaaaaaaaaaaccttaaaatcctacctctttaaacagccttcagataagagaatcctcagtgcaatcattattttgattcgtttggtacctgttttcctggagttcccgattttattattttggggtggctccaagcattaagaggtttaatctttgatggcattgttctagttttgaaatttctagtatatttcagagtctcttagaagacttgtgtgggaagtttcactttgttttcagtgaagatcacaaacctccttcttcctttactcaagaggaaaggtcccagtatacatatttgaatggttgatggttttcaagaccttcagggagctccctgcattttacctagaaacagaaaaggcccgcaaaatcttaagtttcctggcctgcatttcccgggtaggggcaaatgactccaagctggtctctaagccaatacccttataaaccagagcccaggaaagacagctcgagtgtataattctctggagctcaattctatgcagttgtgctgatatttcattaagtcactgtgtatttttaagtgttgatacattaaaagtcgctttatggaagatgagtaaattttttaaatacttggaaattttatttccttgttaacttctacagatcagggcatgcaaccaaaagcagcttaaatgaaatattttaaaataaaatatcaggaagctatttttagatttcttctggcttatgtttctactttaggaccctcattgttctcttattaaaaaaaattatttcctgtgcatctcatggactgcagggtaaattatttgggcataaataatttaaatagttttctttcattttgactatctccagtaataacagtttttattatccagcatattggcttattgcacaaatcttaaaatgtacattgactactttctgagaagaaagtggtatcagtactcatgatgaaaaggttactactgaacaaattcacatttcaggaacacctctatctttggtttaaatcttactcttagtttttccgtctaaaaatcatactggtattagtatcaggtaaggaaattaaagtttttaaaatggtttcattctctgcaatatgcaaaatttagattttactttctggtactgtaaagaacctgaagtgatttacacttaatgggtgattaatccagtattctttaccctgaatgtttggatattaaagttcctttatgttttctataaacctgtgggatcttcttgcagtgattattgtgtgtgagattttttttctttttggtctatccatattgttatattcactcaggtattttttttttaatcttattccagaatcagtggtttatattgggttactgtttaacaccaaatggaattggcattctgcagatttaattaattatgaaaccagggtctcattttccttgctgatacttgttgaaaatgagattcacattctagtctttattttcctcctgttttgtccctgtgcttgtacatcttccttttatttgtgtgttatagttctattccatttgagaaggcagttggtaagaactagattgcatgtacaaagacaggtttactaagtgctgtacagtggtcctgaggttacagttgaattagaaaaacgaaatgtacttacaggaaataagaaagcaaacctttcaaatgagagtgatgatttctttaaaaaaaatcagtttttttctctcaaataatgttctttatttcacgaaatcgtcaatcttaagcatgagcagggataaacaactcctagaaggaactcaattcattcttcctggattttctctgttgttaaatcacaaaaatgatagtccccaatcgtttctttataggaggttattacatttcattacagtcactgcattttgactgttgtgtttagaatttgaatgtacatccaaaatgatgagtttcaatttaagagccttaataaaatgtgtgagtgtgtctcaattgaa

SEQ ID NO: 436684 - DNA, 1250 bp, Homo sapiens
gcggccgcctactactactaaattctcggccgctcgatctcatggactgcagggtaaattatttgggcataaataatttaaatagttttctttcattttgactatctccagtaataacagtttttattatccagcatattggcttattgcacaaatcttaaaatgtacattgactactttctgagaagaaagtggtatcagtactcatgatgaaaaggttactactgaacaaattcacatttcaggaacacctctatctttggtttaaatcttactcttagtttttccgtctaaaaatcatactggtattagtatcaggtaaggaaattaaagtttttaaaatggtttcattctctgcaatatgcaaaatttagattttactttctggtactgtaaagaacctgaagtgatttacacttaatgggtgattaatccagtattctttaccctgaatgtttggatattaaagttcctttatgttttctataaacctgtgggatcttcttgcagtgattattgtgtgtgagattttttttctttttggtctatccatattgttatattcactcaggtattttttttttaatcttattccagaatcagtggtttatattgggttactgtttaacaccaaatggaattggcattctgcagatttaattaattatgaaaccagggtctcattttccttgctgatacttgttgaaaatgagattcacattctagtctttattttcctcctgttttgtccctgtgcttgtacatcttccttttatttgtgtgttatagttctattccatttgagaaggcagttggtaagaactagattgcatgtacaaagacaggtttactaagtgctgtacagtggtcctgaggttacagttgaattagaaaaacgaaatgtacttacaggaaataagaaagcaaacctttcaaatgagagtgatgatttctttaaaaaaaatcagtttttttctctcaaataatgttctttatttcacgaaatcgtcaatcttaagcatgagcagggataaacaactcctagaaggaactcaattcattcttcctggattttctctgttgttaaatcacaaaaatgatagtccccaatcgtttctttataggaggttattacatttcattacagtcactgcattttgactgttgtgtttagaatttgaatgtacatccaaaatgatgagtttcaatttaagagccttaataaaatgtgtgagtgtgtctcaattgaa

SEQ ID NO: 436685 - DNA, 1811 bp, Homo sapiens
aggctcccggctcgccgccatcttgtattggggtttcattgttcccgctgggccgggcggtttagtgtaattgccgccggaggaggaggcggagtaacctctggtcagccgagaaaccccactatcctgtagccataaccgcttaaacgatttgggaggtagtgaagggcagggagctggacctggaggcgccgccgcgacagcagcagccatggaggacgagatgcccaagactctatacgtcggtaacctttccagagatgtgacagaagctctaattctgcaactctttagccagattggaccttgtaaaaactgcaaaatgattatggatacagctggaaatgatccctattgttttgtggagtttcatgagcatcgtcatgcagctgcagcattagctgctatgaatggacggaagataatgggtaaggaagtcaaagtgaattgggcaacaacccctagcagtcaaaagaaagatacaagcagtagtaccgttgtcagcacacagcgttcacaagatcatttccatgtctttgttggtgatctcagcccagaaattacaactgaagatataaaagctgcttttgcaccatttggaagaatatcagatgcccgagtggtaaaagacatggcaacaggaaagtctaagggatatggctttgtctcctttttcaacaaatgggatgctgaaaacgccattcaacagatgggtggccagtggcttggtggaagacaaatcagaactaactgggcaacccgaaagcctcccgctccaaagagtacatatgagtgtaggtgtattggagaagaaaaggaaatgtggaattttggagaaaaatacgctagattttaaatgttagagctgttcccggagacttattgcagaaatagatgagaagcaaatcaagactactattcaaaaatgtacttagttttcatttttgtaattataaataatattatttctaatgtcaagtctcctattaaatagaaaatactgggtaattttttagacattcgtgggggaggtttaattctgaactgaagtataatatgtgtaatataagcattttgatcaaggttaatgttacctttacagtagtgtagtgaatgctacttttctctttctgcacattttatttaatgaattaaagacataaaccttttctctcaccagcaaataccaaacagctatcatatgatgaggttgtaaatcagtctagtccaagcaactgtactgtatactgtggaggtgttacttctgggctaacaggtatgggagccttccctgtgtggcattaatttttaaagtgcaaagcttaatatttgtaggatttttatataacttagtgtgatttgtttgttttggttttttgtctaacagaacaactaatgcgtcagactttttcaccatttggacaaataatggaaattcgagtctttccagataaaggatattcatttgttcggtagggatggttttttaaaaaaacatttttcttggtaatgtaactggaaaaccagaaaataaataaaaataaaaaactttttcctccaaaatattttttgaacatttacctcgttttcttaaaaatttaccttggttataaaaaagttgaaattttggccgggtgcggtggctcacgcctgtattcccagcactttgggaggccgagacgggtggatcaccgtcatgagtttgagaccagcctggccaacattgtgaaaccccgtctctactaaaaatacaaaaatataaaaattagccggcatggcggtgcatgcctgtaatcacagctactcgggag

SEQ ID NO: 436686 - DNA, 1395 bp, Homo sapiens
aggctcccggctcgccgccatcttgtattggggtttcattgttcccgctgggccgggcggtttagtgtaattgccgccggaggaggaggcggagtaacctctggtcagccgagaaaccccactatcctgtagccataaccgcttaaacgatttgggaggtagtgaagggcagggagctggacctggaggcgccgccgcgacagcagcagccatggaggacgagatgcccaagactctatacgtcggtaacctttccagagatgtgacagaagctctaattctgcaactctttagccagattggaccttgtaaaaactgcaaaatgattatggatacagctggaaatgatccctattgttttgtggagtttcatgagcatcgtcatgcagctgcagcattagctgctatgaatggacggaagataatgggtaaggaagtcaaagtgaattgggcaacaacccctagcagtcaaaagaaagatacaagcagtagtaccgttgtcagcacacagcgttcacaaggtaattgtatcttcttaaacataaaatgaaatctcttgaaagggtattcactaaccacctgaagtttttttgtttgatatttgggggaggggggcgggaggagatattatttctatttgtctctctagcaatacttttctcccttctcagtgttgaccaagtataacttgtccgctactttggtgctagttcaagctttctgacccgtttggtagcagctgatgccttagaactactttcaccaactaaggggcaaaataccctcctttcttgaggtcaccatttgggcttcatacccagatcttccaaatgcttgagttgctcctcaaattttgtttcccaaagagcaatccaaaatgttgtttaaggcctgtcaaatatgggtaacttttctttccaaatatgctttgtcaaattgatgtatgtgtccattttaaagtgttggtccaacaattttgcatttttaaagtgtttctttttttgataattgtcttttttaaaaacttcagatatgggttggttatttctctccaatgcttttttaatggttctgatataaagtgaagggattactgttttcattctgttgccttcagtcttagttcacttgcacatggattcacataaactgaatggtgtaatgtctgggcaaccaaaactgttggcttttgagaaaactgtcaaatactttaacatcaaactgttgcaatgcaaggtatttctttgattgttcttcacaaaatatggttaaaccaagtatatatcatgtagctagcttcagtaaattgtgttaactgaggcaaatctagtctacataattcacagtaccactattttattttaatttgtaaagccttaatatagtggtaaactg

SEQ ID NO: 436687 - DNA, 1122 bp, Homo sapiens
gagcaagcattgtgacatacctgactaacttaaaagcagattgcctgtgaagcacaatttgagtccaattttttgaggtatggagttttagctatcatggctgggtttttactcaatctcaaataatagggctctggttattttgcagagtgtctctgaagaatggacagaattgccctggctaactacaagctacggttcacagtggataaatgttggcgtgcttttttactttctgactttttaaaattttgcttttatatcttgtagttccaatcaattttatatgaatgctattataaaattcagtgtaaaatcttttcttgtctagcttaaaacttgtgtgtgtctagtatttttcttcaatgatttaacatttctgaaaatgtcaagttctcaaaatttagacaaaaaggggggtataaattgatctgaaaaaattaaatagtttaattagtttagggaatatacaactttttcattcttttggtttccagttttctatttttttttaatgattaggtagaatatagtgtcaaataagttataaattgcatggttaaagaaagccattcatctaatgtcctgtgaactttataagtggttaagtagttcatgtgagtagctgctttcaccatgcttaatatttaaaagtttaaaaagttttttgaagagagaggcaatttctgtacaatataaatatacatatatacttaagttattgatttgcatgtctataaaattaagcctcatttcctaatacatgataaattttgtagaataaaaggtgaatttgcattaaaggttcactttaatgaaggtgaaacatgagaatgagttgtgtgtgaaattcttatttgatatccagaggatagtttgcaaacctaaacttctgattgtttctgatttcagagatgcccgagtggtaaaagacatggcaacaggaaagtctaagggatatggctttgtctcctttttcaacaaatgggtgagctcagtgagaagtgcatggataatgcttaaagagtaaagaatggaaacactccgttttaattactaatctttttttcgtctgctgtttattttactgatgattaaaataaaccctcactagaagatttc

SEQ ID NO: 436688 - DNA, 938 bp, Homo sapiens
aggctcccggctcgccgccatcttgtattggggtttcattgttcccgctgggccgggcggtttagtgtaattgccgccggaggaggaggcggagtaacctctggtcagccgagaaaccccactatcctgtagccataaccgcttaaacgatttgggaggtagtgaagggcagggagctggacctggaggcgccgccgcgacagcagcagccatggaggacgagatgcccaagactctatacgtcggtaacctttccagagatgtgacagaagctctaattctgcaactctttagccagattggaccttgtaaaaactgcaaaatgattatggatacagctggaaatgatccctattgttttgtggagtttcatgagcatcgtcatgcagctgcagcattagctgctatgaatggacggaagataatgggtaaggaagtcaaagtgaattgggcaacaacccctagcagtcaaaagaaagatacaagcagtagtaccgttgtcagcacacagcgttcacaagtcttagttcacttgcacatggattcacataaactgaatggtgtaatgtctgggcaaccaaaactgttggcttttgagaaaactgtcaaatactttaacatcaaactgttgcaatgcaagatcatttccatgtctttgttggtgatctcagcccagaaattacaactgaagatataaaagctgcttttgcaccatttggaagaatatcagatgcccgagtggtaaaagacatggcaacaggaaagtctaagggatatggctttgtctcctttttcaacaaatgggtgagctcagtgagaagtgcatggataatgcttaaagagtaaagaatggaaacactccgttttaattactaatctttttttcgtctgctgtttattttactgatgattaaaataaaccctcactagaagatttc

SEQ ID NO: 436689 - DNA, 532 bp, Homo sapiens
  misc_feature (488)..(488): n is a, c, g, or t
  misc_feature (492)..(492): n is a, c, g, or t
aggctcccggctcgccgccatcttgtattggggtttcattgttcccgctgggccgggcggtttagtgtaattgccgccggaggaggaggcggagtaacctctggtcagccgagaaaccccactatcctgtagccataaccgcttaaacgatttgggaggtagtgaagggcagggagctggacctggaggcgccgccgcgacagcagcagccatggaggacgagatgcccaagactctacagctggaaatgatccctattgttttgtggagtttcatgagcatcgtcatgcagctgcagcattagctgctatgaatggacggaagataatgggtaaggaagtcaaagtgaattgggcaacaacccctagcagtcaaaagaaagatacaagcaatcatttccatgtctttgttggtgatctcagcccagaaattacaactgaagatataaaagctgcttttgcaccatttggaagaatatcagatgcccnagtngtaaaagacatggcagggttggattggctttgctcctttt

SEQ ID NO: 436690 - DNA, 4669 bp, Homo sapiens
aggctcccggctcgccgccatcttgtattggggtttcattgttcccgctgggccgggcggtttagtgtaattgccgccggaggaggaggcggagtaacctctggtcagccgagaaaccccactatcctgtagccataaccgcttaaacgatttgggaggtagtgaagggcagggagctggacctggaggcgccgccgcgacagcagcagccatggaggacgagatgcccaagactctatacgtcggtaacctttccagagatgtgacagaagctctaattctgcaactctttagccagattggaccttgtaaaaactgcaaaatgattatggatacagctggaaatgatccctattgttttgtggagtttcatgagcatcgtcatgcagctgcagcattagctgctatgaatggacggaagataatgggtaaggaagtcaaagtgaattgggcaacaacccctagcagtcaaaagaaagatacaagcaatcatttccatgtctttgttggtgatctcagcccagaaattacaactgaagatataaaagctgcttttgcaccatttggaagaatatcagatgcccgagtggtaaaagacatggcaacaggaaagtctaagggatatggctttgtctcctttttcaacaaatgggatgctgaaaacgccattcaacagatgggtggccagtggcttggtggaagacaaatcagaactaactgggcaacccgaaagcctcccgctccaaagagtacatatgagtcaaataccaaacagctatcatatgatgaggttgtaaatcagtctagtccaagcaactgtactgtatactgtggaggtgttacttctgggctaacagaacaactaatgcgtcagactttttcaccatttggacaaataatggaaattcgagtctttccagataaaggatattcatttgttcggttcaattcccatgaaagtgcagcacatgcaattgtttctgttaatggtactaccattgaaggtcatgttgtgaaatgctattggggcaaagaaactcttgatatgataaatcccgtgcaacagcagaatcaaattggatatccccaaccttatggccagtggggccagtggtatggaaatgcacaacaaattggccagtatatgcctaatggttggcaagttcctgcatatggaatgtatggccaggcatggaaccagcaaggatttaatcagacacagtcttctgcaccatggatgggaccaaattatggagtgcaaccgcctcaagggcaaaatggcagcatgttgcccaatcagccttctgggtatcgagtggcagggtatgaaacccagtgaataaggactccagaatctaaagccagtggcttgaggctacagggagtgtagtaaagccgttgtttacttaaagatttatcaaatcagtcagtgcaaatgtcagatacaatgtatttatttaaaagattcatttttaatcatgaaattacttatcatccacattgttttaaaaagaaacaagatgctggatgtctgccaatttttgccttcattaccttttttgataaagtttctcagatccttgtttcaaacacaaatgcagggattgctgccactttttaactattaagaggcagaaaattgcacaatattgaacttttttccactgaagtagtgtgcagttctagtttgcattcctgatatgatttaaaacatgtaatataaagatgttaaaaaaaaaaaccaaaactgtgcagagtctagaagttgtttgtcatcttcagcttgtgcacaattctgttttaggttaaaaaaaggcattgtttgagctgtcccatctccactgttatccctttggggttttttaatataaattattagtttacatcatttttgtatctacatcttttttcacaaatttgtcttgccttattaaagttctgtaaaatatacttaaatggaaaaaatgatgttcatttagattgaaaacttttctcagatggattgataattgcattcatcttgtgttttatatgagaaggtgcctcaagaatttcctgttggatttgtttaaaaggatttttatctttcgtgataaactttgctgtgtaccaggaactataaaaacaaaaacttgttactaaagaaaatatctgaaatgtgataagttcttatgccatgttaatttcatgtgtcaacttcaacatttacatgtattatttcattatgtaaaatgttttagcaatttaatattttgcacagttagcaaactttgtatgtcatttccttcaaggcatcatgcagagttgacatgagatttataaggttttaagttgtttgcatgtgaaaatcaaatacatactttggtagtctttgaatacaaagtcatctgctcttgtttttcaagaattttgagacacaaagttgtatgtaaaggaatatattaatttgccgttttctaggtagatttgctcaaaaagagtgaatcaacttaatatgtacaaatgatagctgtgaaactgtagaatatctttgtgtcaggcttggagttcattgtgacctccaaattttgcctgaaggaccagctgggcaaagcatcttttaaatgttcagaggccaaaagataaacaaaaaaaaaaccttaaaatcctacctctttaaacagccttcagataagagaatcctcagtgcaatcattattttgattcgtttggtacctgttttcctggagttcccgattttattattttggggtggctccaagcattaagaggtttaatctttgatggcattgttctagttttgaaatttctagtatatttcagagtctcttagaagacttgtgtgggaagtttcactttgttttcagtgaagatcacaaacctccttcttcctttactcaagaggaaaggtcccagtatacatatttgaatggttgatggttttcaagaccttcagggagctccctgcattttacctagaaacagaaaaggcccgcaaaatcttaagtttcctggcctgcatttcccgggtaggggcaaatgactccaagctggtctctaagccaatacccttataaaccagagcccaggaaagacagctcgagtgtataattctctggagctcaattctatgcagttgtgctgatatttcattaagtcactgtgtatttttaagtgttgatacattaaaagtcgctttatggaagatgagtaaattttttaaatacttggaaattttatttccttgttaacttctacagatcagggcatgcaaccaaaagcagcttaaatgaaatattttaaaataaaatatcaggaagctatttttagatttcttctggcttatgtttctactttaggaccctcattgttctcttattaaaaaaaattatttcctgtgcatctcatggactgcagggtaaattatttgggcataaataatttaaatagttttctttcattttgactatctccagtaataacagtttttattatccagcatattggcttattgcacaaatcttaaaatgtacattgactactttctgagaagaaagtggtatcagtactcatgatgaaaaggttactactgaacaaattcacatttcaggaacacctctatctttggtttaaatcttactcttagtttttccgtctaaaaatcatactggtattagtatcaggtaaggaaattaaagtttttaaaatggtttcattctctgcaatatgcaaaatttagattttactttctggtactgtaaagaacctgaagtgatttacacttaatgggtgattaatccagtattctttaccctgaatgtttggatattaaagttcctttatgttttctataaacctgtgggatcttcttgcagtgattattgtgtgtgagattttttttctttttggtctatccatattgttatattcactcaggtattttttttttaatcttattccagaatcagtggtttatattgggttactgtttaacaccaaatggaattggcattctgcagatttaattaattatgaaaccagggtctcattttccttgctgatacttgttgaaaatgagattcacattctagtctttattttcctcctgttttgtccctgtgcttgtacatcttccttttatttgtgtgttatagttctattccatttgagaaggcagttggtaagaactagattgcatgtacaaagacaggtttactaagtgctgtacagtggtcctgaggttacagttgaattagaaaaacgaaatgtacttacaggaaataagaaagcaaacctttcaaatgagagtgatgatttctttaaaaaaaatcagtttttttctctcaaataatgttctttatttcacgaaatcgtcaatcttaagcatgagcagggataaacaactcctagaaggaactcaattcattcttcctggattttctctgttgttaaatcacaaaaatgatagtccccaatcgtttctttataggaggttattacatttcattacagtcactgcattttgactgttgtgtttagaatttgaatgtacatccaaaatgatgagtttcaatttaagagccttaataaaatgtgtgagtgtgtctcaattgaaaaaaaaaacacaaaaaaaacatttgtggggcgccggcccgaaaagttttaaacc

SEQ ID NO: 436691 - DNA, 5034 bp, Homo sapiens
aggctcccggctcgccgccatcttgtattggggtttcattgttcccgctgggccgggcggtttagtgtaattgccgccggaggaggaggcggagtaacctctggtcagccgagaaaccccactatcctgtagccataaccgcttaaacgatttgggaggtagtgaagggcagggagctggacctggaggcgccgccgcgacagcagcagccatggaggacgagatgcccaagactctatacgtcggtaacctttccagagatgtgacagaagctctaattctgcaactctttagccagattggaccttgtaaaaactgcaaaatgattatggatacagctggaaatgatccctattgttttgtggagtttcatgagcatcgtcatgcagctgcagcattagctgctatgaatggacggaagataatgggtaaggaagtcaaagtgaattgggcaacaacccctagcagtcaaaagaaagatacaagcagtagtaccgttgtcagcacacagcgttcacaagatcatttccatgtctttgttggtgatctcagcccagaaattacaactgaagatataaaagctgcttttgcaccatttggaagaatatcagatgcccgagtggtaaaagacatggcaacaggaaagtctaagggatatggctttgtctcctttttcaacaaatgggatgctgaaaacgccattcaacagatgggtggccagtggcttggtggaagacaaatcagaactaactgggcaacccgaaagcctcccgctccaaagagtacatatgagtgtaggtgtattggagaagaaaaggaaatgtggaattttggagaaaaatacgctagattttaaatgttagagctgttcccggagacttattgcagaaatagatgagaagcaaatcaagactactattcaaaaatgtacttagttttcatttttgtaattataaataatattatttctaatgtcaagtctcctattaaatagaaaatactgggtaattttttagacattcgtgggggaggtttaattctgaactgaagtataatatgtgtaatataagcattttgatcaaggttaatgttacctttacagtagtgtagtgaatgctacttttctctttctgcacattttatttaatgaattaaagacataaaccttttctctcaccagcaaataccaaacagctatcatatgatgaggttgtaaatcagtctagtccaagcaactgtactgtatactgtggaggtgttacttctgggctaacagaacaactaatgcgtcagactttttcaccatttggacaaataatggaaattcgagtctttccagataaaggatattcatttgttcggttcaattcccatgaaagtgcagcacatgcaattgtttctgttaatggtactaccattgaaggtcatgttgtgaaatgctattggggcaaagaaactcttgatatgataaatcccgtgcaacagcagaatcaaattggatatccccaaccttatggccagtggggccagtggtatggaaatgcacaacaaattggccagtatatgcctaatggttggcaagttcctgcatatggaatgtatggccaggcatggaaccagcaaggatttaatcagacacagtcttctgcaccatggatgggaccaaattatggagtgcaaccgcctcaagggcaaaatggcagcatgttgcccaatcagccttctgggtatcgagtggcagggtatgaaacccagtgaataaggactccagaatctaaagccagtggcttgaggctacagggagtgtagtaaagccgttgtttacttaaagatttatcaaatcagtcagtgcaaatgtcagatacaatgtatttatttaaaagattcatttttaatcatgaaattacttatcatccacattgttttaaaaagaaacaagatgctggatgtctgccaatttttgccttcattaccttttttgataaagtttctcagatccttgtttcaaacacaaatgcagggattgctgccactttttaactattaagaggcagaaaattgcacaatattgaacttttttccactgaagtagtgtgcagttctagtttgcattcctgatatgatttaaaacatgtaatataaagatgttaaaaaaaaaaaccaaaactgtgcagagtctagaagttgtttgtcatcttcagcttgtgcacaattctgttttaggttaaaaaaaggcattgtttgagctgtcccatctccactgttatccctttggggttttttaatataaattattagtttacatcatttttgtatctacatcttttttcacaaatttgtcttgccttattaaagttctgtaaaatatacttaaatggaaaaaatgatgttcatttagattgaaaacttttctcagatggattgataattgcattcatcttgtgttttatatgagaaggtgcctcaagaatttcctgttggatttgtttaaaaggatttttatctttcgtgataaactttgctgtgtaccaggaactataaaaacaaaaacttgttactaaagaaaatatctgaaatgtgataagttcttatgccatgttaatttcatgtgtcaacttcaacatttacatgtattatttcattatgtaaaatgttttagcaatttaatattttgcacagttagcaaactttgtatgtcatttccttcaaggcatcatgcagagttgacatgagatttataaggttttaagttgtttgcatgtgaaaatcaaatacatactttggtagtctttgaatacaaagtcatctgctcttgtttttcaagaattttgagacacaaagttgtatgtaaaggaatatattaatttgccgttttctaggtagatttgctcaaaaagagtgaatcaacttaatatgtacaaatgatagctgtgaaactgtagaatatctttgtgtcaggcttggagttcattgtgacctccaaattttgcctgaaggaccagctgggcaaagcatcttttaaatgttcagaggccaaaagataaacaaaaaaaaaaccttaaaatcctacctctttaaacagccttcagataagagaatcctcagtgcaatcattattttgattcgtttggtacctgttttcctggagttcccgattttattattttggggtggctccaagcattaagaggtttaatctttgatggcattgttctagttttgaaatttctagtatatttcagagtctcttagaagacttgtgtgggaagtttcactttgttttcagtgaagatcacaaacctccttcttcctttactcaagaggaaaggtcccagtatacatatttgaatggttgatggttttcaagaccttcagggagctccctgcattttacctagaaacagaaaaggcccgcaaaatcttaagtttcctggcctgcatttcccgggtaggggcaaatgactccaagctggtctctaagccaatacccttataaaccagagcccaggaaagacagctcgagtgtataattctctggagctcaattctatgcagttgtgctgatatttcattaagtcactgtgtatttttaagtgttgatacattaaaagtcgctttatggaagatgagtaaattttttaaatacttggaaattttatttccttgttaacttctacagatcagggcatgcaaccaaaagcagcttaaatgaaatattttaaaataaaatatcaggaagctatttttagatttcttctggcttatgtttctactttaggaccctcattgttctcttattaaaaaaaattatttcctgtgcatctcatggactgcagggtaaattatttgggcataaataatttaaatagttttctttcattttgactatctccagtaataacagtttttattatccagcatattggcttattgcacaaatcttaaaatgtacattgactactttctgagaagaaagtggtatcagtactcatgatgaaaaggttactactgaacaaattcacatttcaggaacacctctatctttggtttaaatcttactcttagtttttccgtctaaaaatcatactggtattagtatcaggtaaggaaattaaagtttttaaaatggtttcattctctgcaatatgcaaaatttagattttactttctggtactgtaaagaacctgaagtgatttacacttaatgggtgattaatccagtattctttaccctgaatgtttggatattaaagttcctttatgttttctataaacctgtgggatcttcttgcagtgattattgtgtgtgagattttttttctttttggtctatccatattgttatattcactcaggtattttttttttaatcttattccagaatcagtggtttatattgggttactgtttaacaccaaatggaattggcattctgcagatttaattaattatgaaaccagggtctcattttccttgctgatacttgttgaaaatgagattcacattctagtctttattttcctcctgttttgtccctgtgcttgtacatcttccttttatttgtgtgttatagttctattccatttgagaaggcagttggtaagaactagattgcatgtacaaagacaggtttactaagtgctgtacagtggtcctgaggttacagttgaattagaaaaacgaaatgtacttacaggaaataagaaagcaaacctttcaaatgagagtgatgatttctttaaaaaaaatcagtttttttctctcaaataatgttctttatttcacgaaatcgtcaatcttaagcatgagcagggataaacaactcctagaaggaactcaattcattcttcctggattttctctgttgttaaatcacaaaaatgatagtccccaatcgtttctttataggaggttattacatttcattacagtcactgcattttgactgttgtgtttagaatttgaatgtacatccaaaatgatgagtttcaatttaagagccttaataaaatgtgtgagtgtgtctcaattgaa

SEQ ID NO: 436692 - DNA, 4767 bp, Homo sapiens
aggctcccggctcgccgccatcttgtattggggtttcattgttcccgctgggccgggcggtttagtgtaattgccgccggaggaggaggcggagtaacctctggtcagccgagaaaccccactatcctgtagccataaccgcttaaacgatttgggaggtagtgaagggcagggagctggacctggaggcgccgccgcgacagcagcagccatggaggacgagatgcccaagactctatacgtcggtaacctttccagagatgtgacagaagctctaattctgcaactctttagccagattggaccttgtaaaaactgcaaaatgattatggatacagctggaaatgatccctattgttttgtggagtttcatgagcatcgtcatgcagctgcagcattagctgctatgaatggacggaagataatgggtaaggaagtcaaagtgaattgggcaacaacccctagcagtcaaaagaaagatacaagcagtagtaccgttgtcagcacacagcgttcacaagtcttagttcacttgcacatggattcacataaactgaatggtgtaatgtctgggcaaccaaaactgttggcttttgagaaaactgtcaaatactttaacatcaaactgttgcaatgcaagatcatttccatgtctttgttggtgatctcagcccagaaattacaactgaagatataaaagctgcttttgcaccatttggaagaatatcagatgcccgagtggtaaaagacatggcaacaggaaagtctaagggatatggctttgtctcctttttcaacaaatgggatgctgaaaacgccattcaacagatgggtggccagtggcttggtggaagacaaatcagaactaactgggcaacccgaaagcctcccgctccaaagagtacatatgagtcaaataccaaacagctatcatatgatgaggttgtaaatcagtctagtccaagcaactgtactgtatactgtggaggtgttacttctgggctaacagaacaactaatgcgtcagactttttcaccatttggacaaataatggaaattcgagtctttccagataaaggatattcatttgttcggttcaattcccatgaaagtgcagcacatgcaattgtttctgttaatggtactaccattgaaggtcatgttgtgaaatgctattggggcaaagaaactcttgatatgataaatcccgtgcaacagcagaatcaaattggatatccccaaccttatggccagtggggccagtggtatggaaatgcacaacaaattggccagtatatgcctaatggttggcaagttcctgcatatggaatgtatggccaggcatggaaccagcaaggatttaatcagacacagtcttctgcaccatggatgggaccaaattatggagtgcaaccgcctcaagggcaaaatggcagcatgttgcccaatcagccttctgggtatcgagtggcagggtatgaaacccagtgaataaggactccagaatctaaagccagtggcttgaggctacagggagtgtagtaaagccgttgtttacttaaagatttatcaaatcagtcagtgcaaatgtcagatacaatgtatttatttaaaagattcatttttaatcatgaaattacttatcatccacattgttttaaaaagaaacaagatgctggatgtctgccaatttttgccttcattaccttttttgataaagtttctcagatccttgtttcaaacacaaatgcagggattgctgccactttttaactattaagaggcagaaaattgcacaatattgaacttttttccactgaagtagtgtgcagttctagtttgcattcctgatatgatttaaaacatgtaatataaagatgttaaaaaaaaaaaccaaaactgtgcagagtctagaagttgtttgtcatcttcagcttgtgcacaattctgttttaggttaaaaaaaggcattgtttgagctgtcccatctccactgttatccctttggggttttttaatataaattattagtttacatcatttttgtatctacatcttttttcacaaatttgtcttgccttattaaagttctgtaaaatatacttaaatggaaaaaatgatgttcatttagattgaaaacttttctcagatggattgataattgcattcatcttgtgttttatatgagaaggtgcctcaagaatttcctgttggatttgtttaaaaggatttttatctttcgtgataaactttgctgtgtaccaggaactataaaaacaaaaacttgttactaaagaaaatatctgaaatgtgataagttcttatgccatgttaatttcatgtgtcaacttcaacatttacatgtattatttcattatgtaaaatgttttagcaatttaatattttgcacagttagcaaactttgtatgtcatttccttcaaggcatcatgcagagttgacatgagatttataaggttttaagttgtttgcatgtgaaaatcaaatacatactttggtagtctttgaatacaaagtcatctgctcttgtttttcaagaattttgagacacaaagttgtatgtaaaggaatatattaatttgccgttttctaggtagatttgctcaaaaagagtgaatcaacttaatatgtacaaatgatagctgtgaaactgtagaatatctttgtgtcaggcttggagttcattgtgacctccaaattttgcctgaaggaccagctgggcaaagcatcttttaaatgttcagaggccaaaagataaacaaaaaaaaaaccttaaaatcctacctctttaaacagccttcagataagagaatcctcagtgcaatcattattttgattcgtttggtacctgttttcctggagttcccgattttattattttggggtggctccaagcattaagaggtttaatctttgatggcattgttctagttttgaaatttctagtatatttcagagtctcttagaagacttgtgtgggaagtttcactttgttttcagtgaagatcacaaacctccttcttcctttactcaagaggaaaggtcccagtatacatatttgaatggttgatggttttcaagaccttcagggagctccctgcattttacctagaaacagaaaaggcccgcaaaatcttaagtttcctggcctgcatttcccgggtaggggcaaatgactccaagctggtctctaagccaatacccttataaaccagagcccaggaaagacagctcgagtgtataattctctggagctcaattctatgcagttgtgctgatatttcattaagtcactgtgtatttttaagtgttgatacattaaaagtcgctttatggaagatgagtaaattttttaaatacttggaaattttatttccttgttaacttctacagatcagggcatgcaaccaaaagcagcttaaatgaaatattttaaaataaaatatcaggaagctatttttagatttcttctggcttatgtttctactttaggaccctcattgttctcttattaaaaaaaattatttcctgtgcatctcatggactgcagggtaaattatttgggcataaataatttaaatagttttctttcattttgactatctccagtaataacagtttttattatccagcatattggcttattgcacaaatcttaaaatgtacattgactactttctgagaagaaagtggtatcagtactcatgatgaaaaggttactactgaacaaattcacatttcaggaacacctctatctttggtttaaatcttactcttagtttttccgtctaaaaatcatactggtattagtatcaggtaaggaaattaaagtttttaaaatggtttcattctctgcaatatgcaaaatttagattttactttctggtactgtaaagaacctgaagtgatttacacttaatgggtgattaatccagtattctttaccctgaatgtttggatattaaagttcctttatgttttctataaacctgtgggatcttcttgcagtgattattgtgtgtgagattttttttctttttggtctatccatattgttatattcactcaggtattttttttttaatcttattccagaatcagtggtttatattgggttactgtttaacaccaaatggaattggcattctgcagatttaattaattatgaaaccagggtctcattttccttgctgatacttgttgaaaatgagattcacattctagtctttattttcctcctgttttgtccctgtgcttgtacatcttccttttatttgtgtgttatagttctattccatttgagaaggcagttggtaagaactagattgcatgtacaaagacaggtttactaagtgctgtacagtggtcctgaggttacagttgaattagaaaaacgaaatgtacttacaggaaataagaaagcaaacctttcaaatgagagtgatgatttctttaaaaaaaatcagtttttttctctcaaataatgttctttatttcacgaaatcgtcaatcttaagcatgagcagggataaacaactcctagaaggaactcaattcattcttcctggattttctctgttgttaaatcacaaaaatgatagtccccaatcgtttctttataggaggttattacatttcattacagtcactgcattttgactgttgtgtttagaatttgaatgtacatccaaaatgatgagtttcaatttaagagccttaataaaatgtgtgagtgtgtctcaattgaa

SEQ ID NO: 436693 - DNA, 4781 bp, Homo sapiens
aggctcccggctcgccgccatcttgtattggggtttcattgttcccgctgggccgggcggtttagtgtaattgccgccggaggaggaggcggagtaacctctggtcagccgagaaaccccactatcctgtagccataaccgcttaaacgatttgggaggtagtgaagggcagggagctggacctggaggcgccgccgcgacagcagcagccatggaggacgagatgcccaagactctatacgtcggtaacctttccagagatgtgacagaagctctaattctgcaactctttagccagattggaccttgtaaaaactgcaaaatgattatggatacagctggaaatgatccctattgttttgtggagtttcatgagcatcgtcatgcagctgcagcattagctgctatgaatggacggaagataatgggtaaggaagtcaaagtgaattgggcaacaacccctagcagtcaaaagaaagatacaagcagtagtaccgttgtcagcacacagcgttcacaagatcatttccatgtctttgttggtgatctcagcccagaaattacaactgaagatataaaagctgcttttgcaccatttggaagaatatcagatgcccgagtggtaaaagacatggcaacaggaaagtctaagggatatggctttgtctcctttttcaacaaatgggatgctgaaaacgccattcaacagatgggtggccagtggcttggtggaagacaaatcagaactaactgggcaacccgaaagcctcccgctccaaagagtacatatgagtgtaggtgtattggagaagaaaaggaaatgtggaattttggagaaaaatacgctagattttaaatgttagagctgttcccggagacttattgcagaaatagatgagaagcaaatcaagactactattcaaaaatcaaataccaaacagctatcatatgatgaggttgtaaatcagtctagtccaagcaactgtactgtatactgtggaggtgttacttctgggctaacagaacaactaatgcgtcagactttttcaccatttggacaaataatggaaattcgagtctttccagataaaggatattcatttgttcggttcaattcccatgaaagtgcagcacatgcaattgtttctgttaatggtactaccattgaaggtcatgttgtgaaatgctattggggcaaagaaactcttgatatgataaatcccgtgcaacagcagaatcaaattggatatccccaaccttatggccagtggggccagtggtatggaaatgcacaacaaattggccagtatatgcctaatggttggcaagttcctgcatatggaatgtatggccaggcatggaaccagcaaggatttaatcagacacagtcttctgcaccatggatgggaccaaattatggagtgcaaccgcctcaagggcaaaatggcagcatgttgcccaatcagccttctgggtatcgagtggcagggtatgaaacccagtgaataaggactccagaatctaaagccagtggcttgaggctacagggagtgtagtaaagccgttgtttacttaaagatttatcaaatcagtcagtgcaaatgtcagatacaatgtatttatttaaaagattcatttttaatcatgaaattacttatcatccacattgttttaaaaagaaacaagatgctggatgtctgccaatttttgccttcattaccttttttgataaagtttctcagatccttgtttcaaacacaaatgcagggattgctgccactttttaactattaagaggcagaaaattgcacaatattgaacttttttccactgaagtagtgtgcagttctagtttgcattcctgatatgatttaaaacatgtaatataaagatgttaaaaaaaaaaaccaaaactgtgcagagtctagaagttgtttgtcatcttcagcttgtgcacaattctgttttaggttaaaaaaaggcattgtttgagctgtcccatctccactgttatccctttggggttttttaatataaattattagtttacatcatttttgtatctacatcttttttcacaaatttgtcttgccttattaaagttctgtaaaatatacttaaatggaaaaaatgatgttcatttagattgaaaacttttctcagatggattgataattgcattcatcttgtgttttatatgagaaggtgcctcaagaatttcctgttggatttgtttaaaaggatttttatctttcgtgataaactttgctgtgtaccaggaactataaaaacaaaaacttgttactaaagaaaatatctgaaatgtgataagttcttatgccatgttaatttcatgtgtcaacttcaacatttacatgtattatttcattatgtaaaatgttttagcaatttaatattttgcacagttagcaaactttgtatgtcatttccttcaaggcatcatgcagagttgacatgagatttataaggttttaagttgtttgcatgtgaaaatcaaatacatactttggtagtctttgaatacaaagtcatctgctcttgtttttcaagaattttgagacacaaagttgtatgtaaaggaatatattaatttgccgttttctaggtagatttgctcaaaaagagtgaatcaacttaatatgtacaaatgatagctgtgaaactgtagaatatctttgtgtcaggcttggagttcattgtgacctccaaattttgcctgaaggaccagctgggcaaagcatcttttaaatgttcagaggccaaaagataaacaaaaaaaaaaccttaaaatcctacctctttaaacagccttcagataagagaatcctcagtgcaatcattattttgattcgtttggtacctgttttcctggagttcccgattttattattttggggtggctccaagcattaagaggtttaatctttgatggcattgttctagttttgaaatttctagtatatttcagagtctcttagaagacttgtgtgggaagtttcactttgttttcagtgaagatcacaaacctccttcttcctttactcaagaggaaaggtcccagtatacatatttgaatggttgatggttttcaagaccttcagggagctccctgcattttacctagaaacagaaaaggcccgcaaaatcttaagtttcctggcctgcatttcccgggtaggggcaaatgactccaagctggtctctaagccaatacccttataaaccagagcccaggaaagacagctcgagtgtataattctctggagctcaattctatgcagttgtgctgatatttcattaagtcactgtgtatttttaagtgttgatacattaaaagtcgctttatggaagatgagtaaattttttaaatacttggaaattttatttccttgttaacttctacagatcagggcatgcaaccaaaagcagcttaaatgaaatattttaaaataaaatatcaggaagctatttttagatttcttctggcttatgtttctactttaggaccctcattgttctcttattaaaaaaaattatttcctgtgcatctcatggactgcagggtaaattatttgggcataaataatttaaatagttttctttcattttgactatctccagtaataacagtttttattatccagcatattggcttattgcacaaatcttaaaatgtacattgactactttctgagaagaaagtggtatcagtactcatgatgaaaaggttactactgaacaaattcacatttcaggaacacctctatctttggtttaaatcttactcttagtttttccgtctaaaaatcatactggtattagtatcaggtaaggaaattaaagtttttaaaatggtttcattctctgcaatatgcaaaatttagattttactttctggtactgtaaagaacctgaagtgatttacacttaatgggtgattaatccagtattctttaccctgaatgtttggatattaaagttcctttatgttttctataaacctgtgggatcttcttgcagtgattattgtgtgtgagattttttttctttttggtctatccatattgttatattcactcaggtattttttttttaatcttattccagaatcagtggtttatattgggttactgtttaacaccaaatggaattggcattctgcagatttaattaattatgaaaccagggtctcattttccttgctgatacttgttgaaaatgagattcacattctagtctttattttcctcctgttttgtccctgtgcttgtacatcttccttttatttgtgtgttatagttctattccatttgagaaggcagttggtaagaactagattgcatgtacaaagacaggtttactaagtgctgtacagtggtcctgaggttacagttgaattagaaaaacgaaatgtacttacaggaaataagaaagcaaacctttcaaatgagagtgatgatttctttaaaaaaaatcagtttttttctctcaaataatgttctttatttcacgaaatcgtcaatcttaagcatgagcagggataaacaactcctagaaggaactcaattcattcttcctggattttctctgttgttaaatcacaaaaatgatagtccccaatcgtttctttataggaggttattacatttcattacagtcactgcattttgactgttgtgtttagaatttgaatgtacatccaaaatgatgagtttcaatttaagagccttaataaaatgtgtgagtgtgtctcaattgaa

SEQ ID NO: 436694 - DNA, 4107 bp, Homo sapiens
tagaggactgatatcgtgtgcacaactgaagatataaaagctgcttttgcaccatttggaagaatatcagatgcccgagtggtaaaagacatggcaacaggaaagtctaagggatatggctttgtctcctttttcaacaaatgggatgctgaaaacgccattcaacagatgggtggccagtggcttggtggaagacaaatcagaactaactgggcaacccgaaagcctcccgctccaaagagtacatatgagtcaaataccaaacagctatcatatgatgaggttgtaaatcagtctagtccaagcaactgtactgtatactgtggaggtgttacttctgggctaacagaacaactaatgcgtcagactttttcaccatttggacaaataatggaaattcgagtctttccagataaaggatattcatttgttcggttcaattcccatgaaagtgcagcacatgcaattgtttctgttaatggtactaccattgaaggtcatgttgtgaaatgctattggggcaaagaaactcttgatatgataaatcccgtgcaacagcagaatcaaattggatatccccaaccttatggccagtggggccagtggtatggaaatgcacaacaaattggccagtatatgcctaatggttggcaagttcctgcatatggaatgtatggccaggcatggaaccagcaaggatttaatcagacacagtcttctgcaccatggatgggaccaaattatggagtgcaaccgcctcaagggcaaaatggcagcatgttgcccaatcagccttctgggtatcgagtggcagggtatgaaacccagtgaataaggactccagaatctaaagccagtggcttgaggctacagggagtgtagtaaagccgttgtttacttaaagatttatcaaatcagtcagtgcaaatgtcagatacaatgtatttatttaaaagattcatttttaatcatgaaattacttatcatccacattgttttaaaaagaaacaagatgctggatgtctgccaatttttgccttcattaccttttttgataaagtttctcagatccttgtttcaaacacaaatgcagggattgctgccactttttaactattaagaggcagaaaattgcacaatattgaacttttttccactgaagtagtgtgcagttctagtttgcattcctgatatgatttaaaacatgtaatataaagatgttaaaaaaaaaaaccaaaactgtgcagagtctagaagttgtttgtcatcttcagcttgtgcacaattctgttttaggttaaaaaaaggcattgtttgagctgtcccatctccactgttatccctttggggttttttaatataaattattagtttacatcatttttgtatctacatcttttttcacaaatttgtcttgccttattaaagttctgtaaaatatacttaaatggaaaaaatgatgttcatttagattgaaaacttttctcagatggattgataattgcattcatcttgtgttttatatgagaaggtgcctcaagaatttcctgttggatttgtttaaaaggatttttatctttcgtgataaactttgctgtgtaccaggaactataaaaacaaaaacttgttactaaagaaaatatctgaaatgtgataagttcttatgccatgttaatttcatgtgtcaacttcaacatttacatgtattatttcattatgtaaaatgttttagcaatttaatattttgcacagttagcaaactttgtatgtcatttccttcaaggcatcatgcagagttgacatgagatttataaggttttaagttgtttgcatgtgaaaatcaaatacatactttggtagtctttgaatacaaagtcatctgctcttgtttttcaagaattttgagacacaaagttgtatgtaaaggaatatattaatttgccgttttctaggtagatttgctcaaaaagagtgaatcaacttaatatgtacaaatgatagctgtgaaactgtagaatatctttgtgtcaggcttggagttcattgtgacctccaaattttgcctgaaggaccagctgggcaaagcatcttttaaatgttcagaggccaaaagataaacaaaaaaaaaaccttaaaatcctacctctttaaacagccttcagataagagaatcctcagtgcaatcattattttgattcgtttggtacctgttttcctggagttcccgattttattattttggggtggctccaagcattaagaggtttaatctttgatggcattgttctagttttgaaatttctagtatatttcagagtctcttagaagacttgtgtgggaagtttcactttgttttcagtgaagatcacaaacctccttcttcctttactcaagaggaaaggtcccagtatacatatttgaatggttgatggttttcaagaccttcagggagctccctgcattttacctagaaacagaaaaggcccgcaaaatcttaagtttcctggcctgcatttcccgggtaggggcaaatgactccaagctggtctctaagccaatacccttataaaccagagcccaggaaagacagctcgagtgtataattctctggagctcaattctatgcagttgtgctgatatttcattaagtcactgtgtatttttaagtgttgatacattaaaagtcgctttatggaagatgagtaaattttttaaatacttggaaattttatttccttgttaacttctacagatcagggcatgcaaccaaaagcagcttaaatgaaatattttaaaataaaatatcaggaagctatttttagatttcttctggcttatgtttctactttaggaccctcattgttctcttattaaaaaaaattatttcctgtgcatctcatggactgcagggtaaattatttgggcataaataatttaaatagttttctttcattttgactatctccagtaataacagtttttattatccagcatattggcttattgcacaaatcttaaaatgtacattgactactttctgagaagaaagtggtatcagtactcatgatgaaaaggttactactgaacaaattcacatttcaggaacacctctatctttggtttaaatcttactcttagtttttccgtctaaaaatcatactggtattagtatcaggtaaggaaattaaagtttttaaaatggtttcattctctgcaatatgcaaaatttagattttactttctggtactgtaaagaacctgaagtgatttacacttaatgggtgattaatccagtattctttaccctgaatgtttggatattaaagttcctttatgttttctataaacctgtgggatcttcttgcagtgattattgtgtgtgagattttttttctttttggtctatccatattgttatattcactcaggtattttttttttaatcttattccagaatcagtggtttatattgggttactgtttaacaccaaatggaattggcattctgcagatttaattaattatgaaaccagggtctcattttccttgctgatacttgttgaaaatgagattcacattctagtctttattttcctcctgttttgtccctgtgcttgtacatcttccttttatttgtgtgttatagttctattccatttgagaaggcagttggtaagaactagattgcatgtacaaagacaggtttactaagtgctgtacagtggtcctgaggttacagttgaattagaaaaacgaaatgtacttacaggaaataagaaagcaaacctttcaaatgagagtgatgatttctttaaaaaaaatcagtttttttctctcaaataatgttctttatttcacgaaatcgtcaatcttaagcatgagcagggataaacaactcctagaaggaactcaattcattcttcctggattttctctgttgttaaatcacaaaaatgatagtccccaatcgtttctttataggaggttattacatttcattacagtcactgcattttgactgttgtgtttagaatttgaatgtacatccaaaatgatgagtttcaatttaagagccttaataaaatgtgtgagtgtgtctcaattgaa

SEQ ID NO: 436695 - DNA, 4238 bp, Homo sapiens
aacccagttggcggaggttgcagtgacccaagatcacaccactgcactccatcctgggtgacagagcgagactctatctgaaaaaataaataaaataaaatttaaaaatataaaaagcaccattgcattttaggaaagctatcatatgttgtgtatttcatagagcattttcacttaaacatttgtgaaaagcaccaagttttctctactgctaagagttgtttaacatcaactaatagtgacttctttattgtttctaatgttgtacggaacaggatgctgaaaacgccattcaacagatgggtggccagtggcttggtggaagacaaatcagaactaactgggcaacccgaaagcctcccgctccaaagagtacatatgagtcaaataccaaacagctatcatatgatgaggttgtaaatcagtctagtccaagcaactgtactgtatactgtggaggtgttacttctgggctaacagaacaactaatgcgtcagactttttcaccatttggacaaataatggaaattcgagtctttccagataaaggatattcatttgttcggttcaattcccatgaaagtgcagcacatgcaattgtttctgttaatggtactaccattgaaggtcatgttgtgaaatgctattggggcaaagaaactcttgatatgataaatcccgtgcaacagcagaatcaaattggatatccccaaccttatggccagtggggccagtggtatggaaatgcacaacaaattggccagtatatgcctaatggttggcaagttcctgcatatggaatgtatggccaggcatggaaccagcaaggatttaatcagacacagtcttctgcaccatggatgggaccaaattatggagtgcaaccgcctcaagggcaaaatggcagcatgttgcccaatcagccttctgggtatcgagtggcagggtatgaaacccagtgaataaggactccagaatctaaagccagtggcttgaggctacagggagtgtagtaaagccgttgtttacttaaagatttatcaaatcagtcagtgcaaatgtcagatacaatgtatttatttaaaagattcatttttaatcatgaaattacttatcatccacattgttttaaaaagaaacaagatgctggatgtctgccaatttttgccttcattaccttttttgataaagtttctcagatccttgtttcaaacacaaatgcagggattgctgccactttttaactattaagaggcagaaaattgcacaatattgaacttttttccactgaagtagtgtgcagttctagtttgcattcctgatatgatttaaaacatgtaatataaagatgttaaaaaaaaaaaccaaaactgtgcagagtctagaagttgtttgtcatcttcagcttgtgcacaattctgttttaggttaaaaaaaggcattgtttgagctgtcccatctccactgttatccctttggggttttttaatataaattattagtttacatcatttttgtatctacatcttttttcacaaatttgtcttgccttattaaagttctgtaaaatatacttaaatggaaaaaatgatgttcatttagattgaaaacttttctcagatggattgataattgcattcatcttgtgttttatatgagaaggtgcctcaagaatttcctgttggatttgtttaaaaggatttttatctttcgtgataaactttgctgtgtaccaggaactataaaaacaaaaacttgttactaaagaaaatatctgaaatgtgataagttcttatgccatgttaatttcatgtgtcaacttcaacatttacatgtattatttcattatgtaaaatgttttagcaatttaatattttgcacagttagcaaactttgtatgtcatttccttcaaggcatcatgcagagttgacatgagatttataaggttttaagttgtttgcatgtgaaaatcaaatacatactttggtagtctttgaatacaaagtcatctgctcttgtttttcaagaattttgagacacaaagttgtatgtaaaggaatatattaatttgccgttttctaggtagatttgctcaaaaagagtgaatcaacttaatatgtacaaatgatagctgtgaaactgtagaatatctttgtgtcaggcttggagttcattgtgacctccaaattttgcctgaaggaccagctgggcaaagcatcttttaaatgttcagaggccaaaagataaacaaaaaaaaaaccttaaaatcctacctctttaaacagccttcagataagagaatcctcagtgcaatcattattttgattcgtttggtacctgttttcctggagttcccgattttattattttggggtggctccaagcattaagaggtttaatctttgatggcattgttctagttttgaaatttctagtatatttcagagtctcttagaagacttgtgtgggaagtttcactttgttttcagtgaagatcacaaacctccttcttcctttactcaagaggaaaggtcccagtatacatatttgaatggttgatggttttcaagaccttcagggagctccctgcattttacctagaaacagaaaaggcccgcaaaatcttaagtttcctggcctgcatttcccgggtaggggcaaatgactccaagctggtctctaagccaatacccttataaaccagagcccaggaaagacagctcgagtgtataattctctggagctcaattctatgcagttgtgctgatatttcattaagtcactgtgtatttttaagtgttgatacattaaaagtcgctttatggaagatgagtaaattttttaaatacttggaaattttatttccttgttaacttctacagatcagggcatgcaaccaaaagcagcttaaatgaaatattttaaaataaaatatcaggaagctatttttagatttcttctggcttatgtttctactttaggaccctcattgttctcttattaaaaaaaattatttcctgtgcatctcatggactgcagggtaaattatttgggcataaataatttaaatagttttctttcattttgactatctccagtaataacagtttttattatccagcatattggcttattgcacaaatcttaaaatgtacattgactactttctgagaagaaagtggtatcagtactcatgatgaaaaggttactactgaacaaattcacatttcaggaacacctctatctttggtttaaatcttactcttagtttttccgtctaaaaatcatactggtattagtatcaggtaaggaaattaaagtttttaaaatggtttcattctctgcaatatgcaaaatttagattttactttctggtactgtaaagaacctgaagtgatttacacttaatgggtgattaatccagtattctttaccctgaatgtttggatattaaagttcctttatgttttctataaacctgtgggatcttcttgcagtgattattgtgtgtgagattttttttctttttggtctatccatattgttatattcactcaggtattttttttttaatcttattccagaatcagtggtttatattgggttactgtttaacaccaaatggaattggcattctgcagatttaattaattatgaaaccagggtctcattttccttgctgatacttgttgaaaatgagattcacattctagtctttattttcctcctgttttgtccctgtgcttgtacatcttccttttatttgtgtgttatagttctattccatttgagaaggcagttggtaagaactagattgcatgtacaaagacaggtttactaagtgctgtacagtggtcctgaggttacagttgaattagaaaaacgaaatgtacttacaggaaataagaaagcaaacctttcaaatgagagtgatgatttctttaaaaaaaatcagtttttttctctcaaataatgttctttatttcacgaaatcgtcaatcttaagcatgagcagggataaacaactcctagaaggaactcaattcattcttcctggattttctctgttgttaaatcacaaaaatgatagtccccaatcgtttctttataggaggttattacatttcattacagtcactgcattttgactgttgtgtttagaatttgaatgtacatccaaaatgatgagtttcaatttaagagccttaataaaatgtgtgagtgtgtctcaattgaa

SEQ ID NO: 436696 - DNA, 4757 bp, Homo sapiens
aggctcccggctcgccgccatcttgtattggggtttcattgttcccgctgggccgggcggtttagtgtaattgccgccggaggaggaggcggagtaacctctggtcagccgagaaaccccactatcctgtagccataaccgcttaaacgatttgggaggtagtgaagggcagggagctggacctggaggcgccgccgcgacagcagcagccatggaggacgagatgcccaagactctatacgtcggtaacctttccagagatgtgacagaagctctaattctgcaactctttagccagattggaccttgtaaaaactgcaaaatgattatggatacagctggaaatgatccctattgttttgtggagtttcatgagcatcgtcatgcagctgcagcattagctgctatgaatggacggaagataatgggtaaggaagtcaaagtgaattgggcaacaacccctagcagtcaaaagaaagatacaagcagtagtaccgttgtcagcacacagcgttcacaagatcatttccatgtctttgttggtgatctcagcccagaaattacaactgaagatataaaagctgcttttgcaccatttggaagaatatcagatgcccgagtggtaaaagacatggcaacaggaaagtctaagggatatggctttgtctcctttttcaacaaatgggatgctgaaaacgccattcaacagatgggtggccagtggcttggtggaagacaaatcagaactaactgggcaacccgaaagcctcccgctccaaagagtacatatgagtcaaataccaaacagctatcatatgatgaggttgtaaatcagtctagtccaagcaactgtactgtatactgtggaggtgttacttctgggctaacagaacaactaatgcgtcagactttttcaccatttggacaaataatggaaattcgagtctttccagataaaggatattcatttgttcggttcaattcccatgaaagtgcagcacatgcaattgtttctgttaatggtactaccattgaaggtcatgttgtgaaatgctattggggcaaagaaactcttgatatgataaatcccgtgcaacagttccagaatggtgtttcatggattgcagtggtgacatgatgaatgtgaccgcctcaattgactcatgctcacacagtggattttaaaatgctccgagaaacctaaaaggcagaatcaaattggatatccccaaccttatggccagtggggccagtggtatggaaatgcacaacaaattggccagtatatgcctaatggttggcaagttcctgcatatggaatgtatggccaggcatggaaccagcaaggatttaatcagacacagtcttctgcaccatggatgggaccaaattatggagtgcaaccgcctcaagggcaaaatggcagcatgttgcccaatcagccttctgggtatcgagtggcagggtatgaaacccagtgaataaggactccagaatctaaagccagtggcttgaggctacagggagtgtagtaaagccgttgtttacttaaagatttatcaaatcagtcagtgcaaatgtcagatacaatgtatttatttaaaagattcatttttaatcatgaaattacttatcatccacattgttttaaaaagaaacaagatgctggatgtctgccaatttttgccttcattaccttttttgataaagtttctcagatccttgtttcaaacacaaatgcagggattgctgccactttttaactattaagaggcagaaaattgcacaatattgaacttttttccactgaagtagtgtgcagttctagtttgcattcctgatatgatttaaaacatgtaatataaagatgttaaaaaaaaaaaccaaaactgtgcagagtctagaagttgtttgtcatcttcagcttgtgcacaattctgttttaggttaaaaaaaggcattgtttgagctgtcccatctccactgttatccctttggggttttttaatataaattattagtttacatcatttttgtatctacatcttttttcacaaatttgtcttgccttattaaagttctgtaaaatatacttaaatggaaaaaatgatgttcatttagattgaaaacttttctcagatggattgataattgcattcatcttgtgttttatatgagaaggtgcctcaagaatttcctgttggatttgtttaaaaggatttttatctttcgtgataaactttgctgtgtaccaggaactataaaaacaaaaacttgttactaaagaaaatatctgaaatgtgataagttcttatgccatgttaatttcatgtgtcaacttcaacatttacatgtattatttcattatgtaaaatgttttagcaatttaatattttgcacagttagcaaactttgtatgtcatttccttcaaggcatcatgcagagttgacatgagatttataaggttttaagttgtttgcatgtgaaaatcaaatacatactttggtagtctttgaatacaaagtcatctgctcttgtttttcaagaattttgagacacaaagttgtatgtaaaggaatatattaatttgccgttttctaggtagatttgctcaaaaagagtgaatcaacttaatatgtacaaatgatagctgtgaaactgtagaatatctttgtgtcaggcttggagttcattgtgacctccaaattttgcctgaaggaccagctgggcaaagcatcttttaaatgttcagaggccaaaagataaacaaaaaaaaaaccttaaaatcctacctctttaaacagccttcagataagagaatcctcagtgcaatcattattttgattcgtttggtacctgttttcctggagttcccgattttattattttggggtggctccaagcattaagaggtttaatctttgatggcattgttctagttttgaaatttctagtatatttcagagtctcttagaagacttgtgtgggaagtttcactttgttttcagtgaagatcacaaacctccttcttcctttactcaagaggaaaggtcccagtatacatatttgaatggttgatggttttcaagaccttcagggagctccctgcattttacctagaaacagaaaaggcccgcaaaatcttaagtttcctggcctgcatttcccgggtaggggcaaatgactccaagctggtctctaagccaatacccttataaaccagagcccaggaaagacagctcgagtgtataattctctggagctcaattctatgcagttgtgctgatatttcattaagtcactgtgtatttttaagtgttgatacattaaaagtcgctttatggaagatgagtaaattttttaaatacttggaaattttatttccttgttaacttctacagatcagggcatgcaaccaaaagcagcttaaatgaaatattttaaaataaaatatcaggaagctatttttagatttcttctggcttatgtttctactttaggaccctcattgttctcttattaaaaaaaattatttcctgtgcatctcatggactgcagggtaaattatttgggcataaataatttaaatagttttctttcattttgactatctccagtaataacagtttttattatccagcatattggcttattgcacaaatcttaaaatgtacattgactactttctgagaagaaagtggtatcagtactcatgatgaaaaggttactactgaacaaattcacatttcaggaacacctctatctttggtttaaatcttactcttagtttttccgtctaaaaatcatactggtattagtatcaggtaaggaaattaaagtttttaaaatggtttcattctctgcaatatgcaaaatttagattttactttctggtactgtaaagaacctgaagtgatttacacttaatgggtgattaatccagtattctttaccctgaatgtttggatattaaagttcctttatgttttctataaacctgtgggatcttcttgcagtgattattgtgtgtgagattttttttctttttggtctatccatattgttatattcactcaggtattttttttttaatcttattccagaatcagtggtttatattgggttactgtttaacaccaaatggaattggcattctgcagatttaattaattatgaaaccagggtctcattttccttgctgatacttgttgaaaatgagattcacattctagtctttattttcctcctgttttgtccctgtgcttgtacatcttccttttatttgtgtgttatagttctattccatttgagaaggcagttggtaagaactagattgcatgtacaaagacaggtttactaagtgctgtacagtggtcctgaggttacagttgaattagaaaaacgaaatgtacttacaggaaataagaaagcaaacctttcaaatgagagtgatgatttctttaaaaaaaatcagtttttttctctcaaataatgttctttatttcacgaaatcgtcaatcttaagcatgagcagggataaacaactcctagaaggaactcaattcattcttcctggattttctctgttgttaaatcacaaaaatgatagtccccaatcgtttctttataggaggttattacatttcattacagtcactgcattttgactgttgtgtttagaatttgaatgtacatccaaaatgatgagtttcaatttaagagccttaataaaatgtgtgagtgtgtctcaattgaa

SEQ ID NO: 436697 - DNA, 4976 bp, Homo sapiens
aggctcccggctcgccgccatcttgtattggggtttcattgttcccgctgggccgggcggtttagtgtaattgccgccggaggaggaggcggagtaacctctggtcagccgagaaaccccactatcctgtagccataaccgcttaaacgatttgggaggtagtgaagggcagggagctggacctggaggcgccgccgcgacagcagcagccatggaggacgagatgcccaagactctatacgtcggtaacctttccagagatgtgacagaagctctaattctgcaactctttagccagattggaccttgtaaaaactgcaaaatgattatggatacagctggaaatgatccctattgttttgtggagtttcatgagcatcgtcatgcagctgcagcattagctgctatgaatggacggaagataatgggtaaggaagtcaaagtgaattgggcaacaacccctagcagtcaaaagaaagatacaagcagtagtaccgttgtcagcacacagcgttcacaagatcatttccatgtctttgttggtgatctcagcccagaaattacaactgaagatataaaagctgcttttgcaccatttggaagaatatcagatgcccgagtggtaaaagacatggcaacaggaaagtctaagggatatggctttgtctcctttttcaacaaatgggatgctgaaaacgccattcaacagatgggtggccagtggcttggtggaagacaaatcagaactaactgggcaacccgaaagcctcccgctccaaagagtacatatgagtgtaggtgtattggagaagaaaaggaaatgtggaattttggagaaaaatacgctagattttaaatgttagagctgttcccggagacttattgcagaaatagatgagaagcaaatcaagactactattcaaaaatgtacttagttttcatttttgtaattataaataatattatttctaatgtcaagtctcctattaaatagaaaatactgggtaattttttagacattcgtgggggaggtttaattctgaactgaagtataatatgtgtaatataagcattttgatcaaggttaatgttacctttacagtagtgtagtgaatgctacttttctctttctgcacattttatttaatgaattaaagacataaaccttttctctcaccagcaaataccaaacagctatcatatgatgaggttgtaaatcagtctagtccaagcaactgtactgtatactgtggaggtgttacttctgggctaacagaacaactaatgcgtcagactttttcaccatttggacaaataatggaaattcgagtctttccagataaaggatattcatttgttcggttcaattcccatgaaagtgcagcacatgcaattgtttctgttaatggtactaccattgaaggtcatgttgtgaaatgctattggggcaaagaaactcttgatatgataaatcccgtgcaacagcagaatcaaattggatatccccaaccttatggccagtggggccagtggtatggaaatgcacaacaaattggccagtatatgcctaatggttggcaagttcctgcatatggaatgtatggccaggcatggaaccagcaaggatttaatcagacacagtcttctgcaccatggatgggaccaaattatggagtgcaaccgcctcaagggcaaaatggcagcatgttgcccaatcagccttctgggtatcgagtggcagggtatgaaacccagtgaataaggactccagaatctaaagccagtggcttgaggctacagggagtgtagtaaagccgttgtttacttaaagatttatcaaatcagtcagtgcaaatgtcagatacaatgtatttatttaaaagattcatttttaatcatgaaattacttatcatccacattgttttaaaaagaaacaagatgctggatgtctgccaatttttgccttcattaccttttttgataaagtttctcagatccttgtttcaaacacaaatgcagggattgctgccactttttaactattaagaggcagaaaattgcacaatattgaacttttttccactgaagtagtgtgcagttctagtttgcattcctgatatgatttaaaacatgtaatataaagatgttaaaaattctgttttaggttaaaaaaaggcattgtttgagctgtcccatctccactgttatccctttggggttttttaatataaattattagtttacatcatttttgtatctacatcttttttcacaaatttgtcttgccttattaaagttctgtaaaatatacttaaatggaaaaaatgatgttcatttagattgaaaacttttctcagatggattgataattgcattcatcttgtgttttatatgagaaggtgcctcaagaatttcctgttggatttgtttaaaaggatttttatctttcgtgataaactttgctgtgtaccaggaactataaaaacaaaaacttgttactaaagaaaatatctgaaatgtgataagttcttatgccatgttaatttcatgtgtcaacttcaacatttacatgtattatttcattatgtaaaatgttttagcaatttaatattttgcacagttagcaaactttgtatgtcatttccttcaaggcatcatgcagagttgacatgagatttataaggttttaagttgtttgcatgtgaaaatcaaatacatactttggtagtctttgaatacaaagtcatctgctcttgtttttcaagaattttgagacacaaagttgtatgtaaaggaatatattaatttgccgttttctaggtagatttgctcaaaaagagtgaatcaacttaatatgtacaaatgatagctgtgaaactgtagaatatctttgtgtcaggcttggagttcattgtgacctccaaattttgcctgaaggaccagctgggcaaagcatcttttaaatgttcagaggccaaaagataaacaaaaaaaaaaccttaaaatcctacctctttaaacagccttcagataagagaatcctcagtgcaatcattattttgattcgtttggtacctgttttcctggagttcccgattttattattttggggtggctccaagcattaagaggtttaatctttgatggcattgttctagttttgaaatttctagtatatttcagagtctcttagaagacttgtgtgggaagtttcactttgttttcagtgaagatcacaaacctccttcttcctttactcaagaggaaaggtcccagtatacatatttgaatggttgatggttttcaagaccttcagggagctccctgcattttacctagaaacagaaaaggcccgcaaaatcttaagtttcctggcctgcatttcccgggtaggggcaaatgactccaagctggtctctaagccaatacccttataaaccagagcccaggaaagacagctcgagtgtataattctctggagctcaattctatgcagttgtgctgatatttcattaagtcactgtgtatttttaagtgttgatacattaaaagtcgctttatggaagatgagtaaattttttaaatacttggaaattttatttccttgttaacttctacagatcagggcatgcaaccaaaagcagcttaaatgaaatattttaaaataaaatatcaggaagctatttttagatttcttctggcttatgtttctactttaggaccctcattgttctcttattaaaaaaaattatttcctgtgcatctcatggactgcagggtaaattatttgggcataaataatttaaatagttttctttcattttgactatctccagtaataacagtttttattatccagcatattggcttattgcacaaatcttaaaatgtacattgactactttctgagaagaaagtggtatcagtactcatgatgaaaaggttactactgaacaaattcacatttcaggaacacctctatctttggtttaaatcttactcttagtttttccgtctaaaaatcatactggtattagtatcaggtaaggaaattaaagtttttaaaatggtttcattctctgcaatatgcaaaatttagattttactttctggtactgtaaagaacctgaagtgatttacacttaatgggtgattaatccagtattctttaccctgaatgtttggatattaaagttcctttatgttttctataaacctgtgggatcttcttgcagtgattattgtgtgtgagattttttttctttttggtctatccatattgttatattcactcaggtattttttttttaatcttattccagaatcagtggtttatattgggttactgtttaacaccaaatggaattggcattctgcagatttaattaattatgaaaccagggtctcattttccttgctgatacttgttgaaaatgagattcacattctagtctttattttcctcctgttttgtccctgtgcttgtacatcttccttttatttgtgtgttatagttctattccatttgagaaggcagttggtaagaactagattgcatgtacaaagacaggtttactaagtgctgtacagtggtcctgaggttacagttgaattagaaaaacgaaatgtacttacaggaaataagaaagcaaacctttcaaatgagagtgatgatttctttaaaaaaaatcagtttttttctctcaaataatgttctttatttcacgaaatcgtcaatcttaagcatgagcagggataaacaactcctagaaggaactcaattcattcttcctggattttctctgttgttaaatcacaaaaatgatagtccccaatcgtttctttataggaggttattacatttcattacagtcactgcattttgactgttgtgtttagaatttgaatgtacatccaaaatgatgagtttcaatttaagagccttaataaaatgtgtgagtgtgtctcaattgaa

SEQ ID NO: 436698 - DNA, 1447 bp, Homo sapiens
aggctcccggctcgccgccatcttgtattggggtttcattgttcccgctgggccgggcggtttagtgtaattgccgccggaggaggaggcggagtaacctctggtcagccgagaaaccccactatcctgtagccataaccgcttaaacgatttgggaggtagtgaagggcagggagctggacctggaggcgccgccgcgacagcagcagccatggaggacgagatgcccaagactctatacgtcggtaacctttccagagatgtgacagaagctctaattctgcaactctttagccagattggaccttgtaaaaactgcaaaatgattatggatacagctggaaatgatccctattgttttgtggagtttcatgagcatcgtcatgcagctgcagcattagctgctatgaatggacggaagataatgggtaaggaagtcaaagtgaattgggcaacaacccctagcagtcaaaagaaagatacaagcagtagtaccgttgtcagcacacagcgttcacaagatcatttccatgtctttgttggtgatctcagcccagaaattacaactgaagatataaaagctgcttttgcaccatttggaagaatatcagatgcccgagtggtaaaagacatggcaacaggaaagtctaagggatatggctttgtctcctttttcaacaaatgggatgctgaaaacgccattcaacagatgggtggccagtggcttggtggaagacaaatcagaactaactgggcaacccgaaagcctcccgctccaaagagtacatatgagtgtaggtgtattggagaagaaaaggaaatgtggaattttggagaaaaatacgctagattttaaatgttagagctgttcccggagacttattgcagaaatagatgagaagcaaatcaagactactattcaaaaatcaaataccaaacagctatcatatgatgaggttgtaaatcagtctagtccaagcaactgtactgtatactgtggaggtgttacttctgggctaacagaacaactaatgcgtcagactttttcaccatttggacaaataatggaaattcgagtctttccagataaaggatattcatttgttcggtagggatggttttttaaaaaaacatttttcttggtaatgtaactggaaaaccagaaaataaataaaaataaaaaactttttcctccaaaatattttttgaacatttacctcgttttcttaaaaatttaccttggttataaaaaagttgaaattttggccgggtgcggtggctcacgcctgtattcccagcactttgggaggccgagacgggtggatcaccgtcatgagtttgagaccagcctggccaacattgtgaaaccccgtctctactaaaaatacaaaaatataaaaattagccggcatggcggtgcatgcctgtaatcacagctactcgggag

SEQ ID NO: 436699 - DNA, 786 bp, Homo sapiens
aggctcccggctcgccgccatcttgtattggggtttcattgttcccgctgggccgggcggtttagtgtaattgccgccggaggaggaggcggagtaacctctggtcagccgagaaaccccactatcctgtagccataaccgcttaaacgatttgggaggtagtgaagggcagggagctggacctggaggcgccgccgcgacagcagcagccatggaggacgagatgcccaagactctatacgtcggtaacctttccagagatgtgacagaagctctaattctgcaactctttagccagattggaccttgtaaaaactgcaaaatgattatggatacagctggaaatgatccctattgttttgtggagtttcatgagcatcgtcatgcagctgcagcattagctgctatgaatggacggaagataatgggtaaggaagtcaaagtgaattgggcaacaacccctagcagtcaaaagaaagatacaagcaatcatttccatgtctttgttggtgatctcagcccagaaattacaactgaagatataaaagctgcttttgcaccatttggaagaatatcagatgcccgagtggtaaaagacatggcaacaggaaagtctaagggatatggctttgtctcctttttcaacaaatgggtgagctcagtgagaagtgcatggataatgcttaaagagtaaagaatggaaacactccgttttaattactaatctttttttcgtctgctgtttattttactgatgattaaaataaaccctcactagaagatttc

SEQ ID NO: 436700 - DNA, 611 bp, Homo sapiens
tcactggggctagcagagggctgtgaagctctctctgacttgataaaatccctcctcctaggcttttcagtgcttggctctccctgtgtgggtgtaattggaactgggagaggaaaggattatggaaagcaatagtctgctttctgctagtttccagcagctgttttgggctggtgggggctggggtgttatgtgtgtggtggtgaatttgagtggccgccatttgtggaaatgtgacaacatgtcatcaactgataggtagctagacctgaggaatgtgaggccagaagattctagctgcaaagggccccagctctgcagccccagatgcagggtcagacctctgctctactgctcctagcccctgctgtgacctcgggcaatgcacctgggtggggtaggatgtgtaagtccactctgtcattagcacagtcttccaggaaagaatcctgtgagacagaagaatccggtgagactgagagacacaagaaggagaagttgtgtagcacttatacttacctaccacaccagccagtggataaaggcgctgttctcagggttgctgtagagctagacaggagttagttcatgacagaatcacattgcaaaga

SEQ ID NO: 436701 - DNA, 1573 bp, Homo sapiens
aagaaaagggaacgaggaaggccggtgattggtgaagctctaacggctgttttgactggcgtagccggagccggcgacgtgaggcgggcgttgctcgcgcgacaagtagttgctgggacagcgaaatggaggggtgtgtgtctaacctaatggtctgcaacctggcctacagcgggaagctggaagagttgaaggagagtattctggccgataaatccctggctactagaactgaccaggacagcagaactgcattgcactgggcatgctcagctggacatacagaaattgttgaatttttgttgcaacttggagtgccagtgaatgataaagacgatgcaggttggtctcctcttcatattgcggcttctgctggccgggatgagattgtaaaagcccttctgggaaaaggtgctcaagtgaatgctgtcaatcaaaatggctgtactcccttacattatgcagcttcgaaaaacaggcatgagatcgctgtcatgttactggaaggcggggctaatccagatgctaaggaccattatgaggctacagcaatgcaccgggcagcagccaagggtaacttgaagatgattcatatccttctgtactacaaagcatccacaaacatccaagacactgagggtaacactcctctacacttagcctgtgatgaggagagagtggaagaagcaaaactgctggtgtcccaaggagcaagtatttacattgagaataaagaagaaaagacacccctgcaagtggccaaaggtggcctgggtttaatactcaagagaatggtggaaggttaaacagcttggatttattcttactttgtatgttgtgttgttgtccccagtgtcctacaaactaatgtatttgtgcacaagacatcatctatgaatgatgaagttttctcaccttcaaagtcttataaacatgttgactcttgttcctgctgagttacttgttcgaagcttacagcttgttttccaggcatcgaataactgttgagattgttctactgttgtcgtatattcttctatattgaattctggttaatttggagtaactaattctgtggctgttgtgagtcttcagcaccctcccatgtaccttatatccctctctgaaacagaacagctccaatagcaacaagctagttgttctgccagatgtttctatgtggattctgtaatgttcctccatacagttaaaacatcctaacttgtttttcaagctcactcaggcctacgccaaacgtttctgttttttttaaccatgaggtttaatttatttttgtgataggagggatatttacatattttagtggaccacattttaagttggatggtgtgctctaaaatactgaaaaacaatagcccatatacctatgtatttgtttttgatgggttgtttactctgaaataaaatgtatggttttcttaaaaggaagttttaaagtacctattttgtgtcatcctgtattgaaaagaatgtcaagcttgttaaaatgacatgtaacaaaaatgtattttgatttgtatttcagaaactaaaaaataaaatgttgaaagaa

SEQ ID NO: 436702 - DNA, 610 bp, Homo sapiens
aagaaaagggaacgaggaaggccggtgattggtgaagctctaacggctgttttgactggcgtagccggagccggcgacgtgaggcgggcgttgctcgcgcgacaagtagttgctgggacagcgaaatggaggggtgtgtgtctaacctaatggtctgcaacctggcctacagcgggaagctggaagagttgaaggagagtattctggccgataaatccctggctactagaactgaccaggacagcagaactgcattgcactgggcatgctcagctggacatacagaaattgttgaatttttgttgcaacttggagtgccagtgaatgataaagacgatgtgagtactttgataaagttgagttgataaattcccagttatctttgtactccagactggtgtttactgaagcctgtgcattaagcttataaagaaaattgtaacctttatgactggaaagttacatcatggcccttgtgatcaagcatgagactcatggttgcattattttacaatgttatgtttgccactcatactctgtgatttaaggtaaacatacaggagaggctgaggtaggaggattgctccagcctagtagtttgaggctgcag

SEQ ID NO: 436703 - DNA, 1363 bp, Homo sapiens
aagaaaagggaacgaggaaggccggtgattggtgaagctctaacggctgttttgactggcgtagccggagccggcgacgtgaggcgggcgttgctcgcgcgacaagtagttgctgggacagcgaaatggaggggtgtgtgtctaacctaatggtctgcaacctggcctacagcgggaagctggaagagttgaaggagagtattctggccgataaatccctggctactagaactgaccaggacagcagaactgcattgcactgggcatgctcagctggacatacagaaattgttgaatttttgttgcaacttggagtgccagtgaatgataaagacgatgcaggttggtctcctcttcatattgcggcttctgctggccgggatgagattgtaaaagcccttctgggaaaaggtgctcaagtgaatgctgtcaatcaaaatggctgtactcccttacattatgcagcttcgaaaaacaggcatgagatcgctgtcatgttactggaaggcggggctaatccagatgctaaggaccattatgaggctacagcaatgcaccgggcagcagccaagggtaacttgaagatgattcatatccttctgtactacaaagcatccacaaacatccaagacactgagggtaacactcctctacacttagcctgtgatgaggagagagtggaagaagcaaaactgctggtgtcccaaggagcaagtatttacattgagaataaagaagaaaagacacccctgcaagtggccaaaggtggcctgggtttaatactcaagagaatggtggaaggttaaacagcttggatttattcttactttgtatgttgtgttgttgtccccagtgtcctacaaactaatgtatttgtgcacaagacatcatctatgaatgatgaagttttctcaccttcaaagtcttataaacatgttgactcttgttcctgctgagttacttgttcgaagcttacagcttgttttccaggcatcgaataactgttgagattgttctactgttgtcgtatattcttctatattgaattctggttaatttggagtaactaattctgtggctgttgtgagtcttcagcaccctcccatgtaccttatatccctctctgaaacagaacagctccaatagcaacaagctagttgttctgccagatgtttctatgtggattctgtaatgttcctccatacagttaaaacatcctaacttgtttttcaagctcactcaggcctacgccaaacgtttctgttttttttaaccatgaggtttaatttatttttgtgataggaggttattggcatatgccaataacctccccccttagtcttccaggtagctggaactacag

SEQ ID NO: 436704 - DNA, 1519 bp, Homo sapiens
aagaaaagggaacgaggaaggccggtgattggtgaagctctaacggctgttttgactggcgtagccggagccggcgacgtgaggcgggcgttgctcgcgcgacaagtagttgctgggacagcgaaatggaggggtgtgtgtctaacctaatggtctgcaacctggcctacagcgggaagctggaagagttgaaggagagtattctggccgataaatccctggctactagaactgaccaggacagcagaactgcattgcactgggcatgctcagctggacatacagaaattgttgaatttttgttgcaacttggagtgccagtgaatgataaagacgatgcaggttggtctcctcttcatattgcggcttctgctggccgggatgagattgtaaaagcccttctgggaaaaggtgctcaagtgaatgctgtcaatcaaaatggctgtactcccttacattatgcagcttcgaaaaacaggcatgagatcgctgtcatgttactggaaggcggggctaatccagatgctaaggaccattatgaggctacagcaatgcaccgggcagcagccaagggtaacttgaagatgattcatatccttctgtactacaaagcatccacaaacatccaagacactgagggtaacactcctctacacttagcctgtgatgaggagagagtggaagaagcaaaactgctggtgtcccaaggagcaagtatttacattgagaataaagaaatggtggaaggttaaacagcttggatttattcttactttgtatgttgtgttgttgtccccagtgtcctacaaactaatgtatttgtgcacaagacatcatctatgaatgatgaagttttctcaccttcaaagtcttataaacatgttgactcttgttcctgctgagttacttgttcgaagcttacagcttgttttccaggcatcgaataactgttgagattgttctactgttgtcgtatattcttctatattgaattctggttaatttggagtaactaattctgtggctgttgtgagtcttcagcaccctcccatgtaccttatatccctctctgaaacagaacagctccaatagcaacaagctagttgttctgccagatgtttctatgtggattctgtaatgttcctccatacagttaaaacatcctaacttgtttttcaagctcactcaggcctacgccaaacgtttctgttttttttaaccatgaggtttaatttatttttgtgataggagggatatttacatattttagtggaccacattttaagttggatggtgtgctctaaaatactgaaaaacaatagcccatatacctatgtatttgtttttgatgggttgtttactctgaaataaaatgtatggttttcttaaaaggaagttttaaagtacctattttgtgtcatcctgtattgaaaagaatgtcaagcttgttaaaatgacatgtaacaaaaatgtattttgatttgtatttcagaaactaaaaaataaaatgttgaaagaa

SEQ ID NO: 436705 - DNA, 1474 bp, Homo sapiens
aagaaaagggaacgaggaaggccggtgattggtgaagctctaacggctgttttgactggcgtagccggagccggcgacgtgaggcgggcgttgctcgcgcgacaagtagttgctgggacagcgaaatggaggggtgtgtgtctaacctaatggtctgcaacctggcctacagcgggaagctggaagagttgaaggagagtattctggccgataaatccctggctactagaactgaccaggcaggttggtctcctcttcatattgcggcttctgctggccgggatgagattgtaaaagcccttctgggaaaaggtgctcaagtgaatgctgtcaatcaaaatggctgtactcccttacattatgcagcttcgaaaaacaggcatgagatcgctgtcatgttactggaaggcggggctaatccagatgctaaggaccattatgaggctacagcaatgcaccgggcagcagccaagggtaacttgaagatgattcatatccttctgtactacaaagcatccacaaacatccaagacactgagggtaacactcctctacacttagcctgtgatgaggagagagtggaagaagcaaaactgctggtgtcccaaggagcaagtatttacattgagaataaagaagaaaagacacccctgcaagtggccaaaggtggcctgggtttaatactcaagagaatggtggaaggttaaacagcttggatttattcttactttgtatgttgtgttgttgtccccagtgtcctacaaactaatgtatttgtgcacaagacatcatctatgaatgatgaagttttctcaccttcaaagtcttataaacatgttgactcttgttcctgctgagttacttgttcgaagcttacagcttgttttccaggcatcgaataactgttgagattgttctactgttgtcgtatattcttctatattgaattctggttaatttggagtaactaattctgtggctgttgtgagtcttcagcaccctcccatgtaccttatatccctctctgaaacagaacagctccaatagcaacaagctagttgttctgccagatgtttctatgtggattctgtaatgttcctccatacagttaaaacatcctaacttgtttttcaagctcactcaggcctacgccaaacgtttctgttttttttaaccatgaggtttaatttatttttgtgataggagggatatttacatattttagtggaccacattttaagttggatggtgtgctctaaaatactgaaaaacaatagcccatatacctatgtatttgtttttgatgggttgtttactctgaaataaaatgtatggttttcttaaaaggaagttttaaagtacctattttgtgtcatcctgtattgaaaagaatgtcaagcttgttaaaatgacatgtaacaaaaatgtattttgatttgtatttcagaaactaaaaaataaaatgttgaaagaa

SEQ ID NO: 436706 - DNA, 1450 bp, Homo sapiens
aagaaaagggaacgaggaaggccggtgattggtgaagctctaacggctgttttgactggcgtagccggagccggcgacgtgaggcgggcgttgctcgcgcgacaagtagttgctgggacagcgaaatggaggggtgtgtgtctaacctaatggtctgcaacctggcctacagcgggaagctggaagagttgaaggagagtattctggccgataaatccctggctactagaactgaccaggacagcagaactgcattgcactgggcatgctcagctggacatacagaaattgttgaatttttgttgcaacttggagtgccagtgaatgataaagacgatgcagcttcgaaaaacaggcatgagatcgctgtcatgttactggaaggcggggctaatccagatgctaaggaccattatgaggctacagcaatgcaccgggcagcagccaagggtaacttgaagatgattcatatccttctgtactacaaagcatccacaaacatccaagacactgagggtaacactcctctacacttagcctgtgatgaggagagagtggaagaagcaaaactgctggtgtcccaaggagcaagtatttacattgagaataaagaagaaaagacacccctgcaagtggccaaaggtggcctgggtttaatactcaagagaatggtggaaggttaaacagcttggatttattcttactttgtatgttgtgttgttgtccccagtgtcctacaaactaatgtatttgtgcacaagacatcatctatgaatgatgaagttttctcaccttcaaagtcttataaacatgttgactcttgttcctgctgagttacttgttcgaagcttacagcttgttttccaggcatcgaataactgttgagattgttctactgttgtcgtatattcttctatattgaattctggttaatttggagtaactaattctgtggctgttgtgagtcttcagcaccctcccatgtaccttatatccctctctgaaacagaacagctccaatagcaacaagctagttgttctgccagatgtttctatgtggattctgtaatgttcctccatacagttaaaacatcctaacttgtttttcaagctcactcaggcctacgccaaacgtttctgttttttttaaccatgaggtttaatttatttttgtgataggagggatatttacatattttagtggaccacattttaagttggatggtgtgctctaaaatactgaaaaacaatagcccatatacctatgtatttgtttttgatgggttgtttactctgaaataaaatgtatggttttcttaaaaggaagttttaaagtacctattttgtgtcatcctgtattgaaaagaatgtcaagcttgttaaaatgacatgtaacaaaaatgtattttgatttgtatttcagaaactaaaaaataaaatgttgaaagaa

SEQ ID NO: 436707 - DNA, 1491 bp, Homo sapiens
aagaaaagggaacgaggaaggccggtgattggtgaagctctaacggctgttttgactggcgtagccggagccggcgacgtgaggcgggcgttgctcgcgcgacaagtagttgctgggacagcgaaatggaggggtgtgtgtctaacctaatggtctgcaacctggcctacagcgggaagctggaagagttgaaggagagtattctggccgataaatccctggctactagaactgaccaggacagcagaactgcattgcactgggcatgctcagctggacatacagaaattgttgaatttttgttgcaacttggagtgccagtgaatgataaagacgatgcaggttggtctcctcttcatattgcggcttctgctggccgggatgagattgtaaaagcccttctgggaaaaggtgctcaagtgaatgctgtcaatcaaaatggctgtactcccttacattatgcagcttcgaaaaacaggcatgagatcgctgtcatgttactggaaggcggggctaatccagatgctaaggaccattatgaggctacagcaatgcaccgggcagcagccaagggtaacttgaagatgattcatatccttctgtactacaaagcatccacaaacatccaagacactgagggtaacactcctctacacttagcctgtgatgaggagagagtggaagaagcaaaactgctggtgtcccaaggagcaagtatttacattgagaataaagaagaaaagacacccctgcaagtggccaaaggtggcctgggtttaatactcaagagaatggtggaaggttaaacagcttggatttattcttactttgtatgttgtgttgttgtccccagtgtcctacaaactaatgtatttgtgcacaagacatcatctatgaatgatgaagttttctcaccttcaaagtcttataaacatgttgactcttgttcctgctgagttacttgttcgaagcttacagcttgttttccaggcatcgaataactgttgagattgttctactgttgtcgtatattcttctatattgaattctggttaatttggagtaactaattctgtggctgttgtgagtcttcagcaccctcccatgtaatgttcctccatacagttaaaacatcctaacttgtttttcaagctcactcaggcctacgccaaacgtttctgttttttttaaccatgaggtttaatttatttttgtgataggagggatatttacatattttagtggaccacattttaagttggatggtgtgctctaaaatactgaaaaacaatagcccatatacctatgtatttgtttttgatgggttgtttactctgaaataaaatgtatggttttcttaaaaggaagttttaaagtacctattttgtgtcatcctgtattgaaaagaatgtcaagcttgttaaaatgacatgtaacaaaaatgtattttgatttgtatttcagaaactaaaaaataaaatgttgaaagaa

SEQ ID NO: 436708 - DNA, 1494 bp, Homo sapiens
aagaaaagggaacgaggaaggccggtgattggtgaagctctaacggctgttttgactggcgtagccggagccggcgacgtgaggcgggcgttgctcgcgcgacaagtagttgctgggacagcgaaatggaggggtgtgtgtctaacctaatggtctgcaacctggcctacagcgggaagctggaagagttgaaggagagtattctggccgataaatccctggctactagaactgaccaggacagcagaactgcattgcactgggcatgctcagctggacatacagaaattgttgaatttttgttgcaacttggagtgccagtgaatgataaagacgatgcaggttggtctcctcttcatattgcggcttctgctggccgggatgagattgtaaaagcccttctgggaaaaggtgctcaagtgaatgctgtcaatcaaaatggctgtactcccttacattatgcagcttcgaaaaacaggcatgagatcgctgtcatgttactggaaggcggggctaatccagatgctaaggaccattatgaggctacagcaatgcaccgggcagcagccaaggacacttagcctgtgatgaggagagagtggaagaagcaaaactgctggtgtcccaaggagcaagtatttacattgagaataaagaagaaaagacacccctgcaagtggccaaaggtggcctgggtttaatactcaagagaatggtggaaggttaaacagcttggatttattcttactttgtatgttgtgttgttgtccccagtgtcctacaaactaatgtatttgtgcacaagacatcatctatgaatgatgaagttttctcaccttcaaagtcttataaacatgttgactcttgttcctgctgagttacttgttcgaagcttacagcttgttttccaggcatcgaataactgttgagattgttctactgttgtcgtatattcttctatattgaattctggttaatttggagtaactaattctgtggctgttgtgagtcttcagcaccctcccatgtaccttatatccctctctgaaacagaacagctccaatagcaacaagctagttgttctgccagatgtttctatgtggattctgtaatgttcctccatacagttaaaacatcctaacttgtttttcaagctcactcaggcctacgccaaacgtttctgttttttttaaccatgaggtttaatttatttttgtgataggagggatatttacatattttagtggaccacattttaagttggatggtgtgctctaaaatactgaaaaacaatagcccatatacctatgtatttgtttttgatgggttgtttactctgaaataaaatgtatggttttcttaaaaggaagttttaaagtacctattttgtgtcatcctgtattgaaaagaatgtcaagcttgttaaaatgacatgtaacaaaaatgtattttgatttgtatttcagaaactaaaaaataaaatgttgaaagaa

SEQ ID NO: 436709 - DNA, 1634 bp, Homo sapiens
aagaaaagggaacgaggaaggccggtgattggtgaagctctaacggctgttttgactggcgtagccggagccggcgacgtgaggcgggcgttgctcgcgcgacaagtagttgctgggacagcgaaatggaggggtgtgtgtctaacctaatggtctgcaacctggcctacagcgggaagctggaagagttgaaggagagtattctggccgataaatccctggctactagaactgaccaggacagcagaactgcattgcactgggcatgctcagctggacatacagaaattgttgaatttttgttgcaacttggagtgccagtgaatgataaagacgatgcaggttggtctcctcttcatattgcggcttctgctggccgggatgagattgtaaaagcccttctgggaaaaggtgctcaagtgttgggaaaaaaaatttggggggccccccctttttggggggggctcccccccccaaaaaaaaaatgctgtcaatcaaaatggctgtactcccttacattatgcagcttcgaaaaacaggcatgagatcgctgtcatgttactggaaggcggggctaatccagatgctaaggaccattatgaggctacagcaatgcaccgggcagcagccaagggtaacttgaagatgattcatatccttctgtactacaaagcatccacaaacatccaagacactgagggtaacactcctctacacttagcctgtgatgaggagagagtggaagaagcaaaactgctggtgtcccaaggagcaagtatttacattgagaataaagaagaaaagacacccctgcaagtggccaaaggtggcctgggtttaatactcaagagaatggtggaaggttaaacagcttggatttattcttactttgtatgttgtgttgttgtccccagtgtcctacaaactaatgtatttgtgcacaagacatcatctatgaatgatgaagttttctcaccttcaaagtcttataaacatgttgactcttgttcctgctgagttacttgttcgaagcttacagcttgttttccaggcatcgaataactgttgagattgttctactgttgtcgtatattcttctatattgaattctggttaatttggagtaactaattctgtggctgttgtgagtcttcagcaccctcccatgtaccttatatccctctctgaaacagaacagctccaatagcaacaagctagttgttctgccagatgtttctatgtggattctgtaatgttcctccatacagttaaaacatcctaacttgtttttcaagctcactcaggcctacgccaaacgtttctgttttttttaaccatgaggtttaatttatttttgtgataggagggatatttacatattttagtggaccacattttaagttggatggtgtgctctaaaatactgaaaaacaatagcccatatacctatgtatttgtttttgatgggttgtttactctgaaataaaatgtatggttttcttaaaaggaagttttaaagtacctattttgtgtcatcctgtattgaaaagaatgtcaagcttgttaaaatgacatgtaacaaaaatgtattttgatttgtatttcagaaactaaaaaataaaatgttgaaagaa

SEQ ID NO: 436710 - DNA, 2539 bp, Homo sapiens
caaaagtagtttgtctttactaggccaccgtctcgtcagcgttacggagtattttgtccgcctgccgccgccgtcccagatattaatcacggagttccagggagaaggaacttgtgaaatgggggagccggctggggttgccggcaccatggagtcaccttttagcccgggactctttcacaggctggatgaagattgggattctgctctctttgctgaactcggttatttcacagacactgatgagctgcaattggaagcagcaaatgagacgtatgaaaacaattttgataatcttgattttgatttggatttgatgccttgggagtcagacatttgggacatcaacaaccaaatctgtacagttaaagatattaaggcagaaccccagccactttctccagcctcctcaagttattcagtctcgtctcctcggtcagtggactcttattcttcaactcagcatgttcctgaggagttggatttgtcttctagttctcagatgtctcccctttccttatatggtgaaaactctaatagtctctcttcagcggagccactgaaggaagataagcctgtcactggtcctaggaacaagactgaaaatggactgactccaaagaaaaaaattcaggtgaattcaaaaccttcaattcagcccaagcctttattgcttccagcagcacccaagactcaaacaaactccagtgttccagcaaaaaccatcattattcagacagtaccaacgcttatgccattggcaaagcagcaaccaattatcagtttacaacctgcacccactaaaggccagacggttttgctgtctcagcctactgtggtacaacttcaagcacctggagttctgccctctgctcagccagtccttgctgttgctgggggagtcacacagctccctaatcacgtggtgaatgtggtaccagccccttcagcgaatagcccagtgaatggaaaactttccgtgactaaacctgtcctacaaagtaccatgagaaatgtcggttcagatattgctgtgctaaggagacagcaacgtatgataaaaaatcgagaatccgcttgtcagtctcgcaagaagaagaaagaatatatgctagggttagaggcgagattaaaggctgccctctcagaaaacgagcaactgaagaaagaaaatggaacactgaagcggcagctggatgaagttgtgtcagagaaccagaggcttaaagtccctagtccaaagcgaagagttgtctgtgtgatgatagtattggcatttataatactgaactatggacctatgagcatgttggaacaggattccaggagaatgaaccctagtgtgagccctgcaaatcaaaggaggcaccttctaggattttctgctaaagaggcacaggacacatcagatggtattatccagaaaaacagctacagatatgatcattctgtttcaaatgacaaagccctgatggtgctaactgaagaaccattgctttacattcctccacctccttgtcagcccctaattaacacaacagagtctctcaggttaaatcatgaacttcgaggatgggttcatagacatgaagtagaaaggaccaagtcaagaagaatgacaaataatcaacagaaaacccgtattcttcagggtgctctggaacagggctcaaattctcagctgatggctgttcaatacacagaaaccactagtagtatcagcaggaactcagggagtgagctacaagtgtattatgcttcacccagaagttatcaagacttttttgaagccatccgcagaaggggagacacattttatgttgtgtcatttcgaagggatcacctgctgttaccagctaccacccataacaagaccacaagaccaaaaatgtcaattgtgttaccagcaataaacataaatgagaatgtgatcaatgggcaggactacgaagtgatgatgcagattgactgtcaggtgatggacaccaggatcctccatatcaaaagttcgtcggttcctccttacctccgagatcagcagaggaatcaaaccaacaccttctttggctcccctcccgcagccacagaggcaacccacgttgtcagcaccatccctgagtcattacaatagcaccctgcagctatgctggaaaactgagcgtgggaccctgccagactgaagagcaggtgagcaaaatgctgctttctgccttggtggcaggcagagaactgtctcgtactagaattcaaggaggaaagaagaagaaataaaagaagctgctccatttttcatcatctacccatctatttggaaagcactggaattcagatgcaagagaacaatgtttcttcagtggcaaatgtagccctgcatcctccagtgttacctggtgtagatttttttttctgtacctttctaaacctctcttccctctgtgatggttttgtgtttaaacagtcatcttcttttaaataatatccacctctcctttttgccatttcacttattgattcataaagtgaattttatttaaagcta

SEQ ID NO: 436711 - DNA, 2903 bp, Homo sapiens
  misc_feature (2887)..(2887): n is a, c, g, or t
caaaagtagtttgtctttactaggccaccgtctcgtcagcgttacggagtattttgtccgcctgccgccgccgtcccagatattaatcacggagttccagggagaaggaacttgtgaaatgggggagccggctggggttgccggcaccatggagtcaccttttagcccgggactctttcacaggctggatgaagattgggattctgctctctttgctgaactcggttatttcacagacactgatgagctgcaattggaagcagcaaatgagacgtatgaaaacaattttgataatcttgattttgatttggatttgatgccttgggagtcagacatttgggacatcaacaaccaaatctgtacagttaaagatattaaggcagaaccccagccactttctccagcctcctcaagttattcagtctcgtctcctcggtcagtggactcttattcttcaactcagcatgttcctgaggagttggatttgtcttctagttctcagatgtctcccctttccttatatggtgaaaactctaatagtctctcttcagcggagccactgaaggaagataagcctgtcactggtcctaggaacaagactgaaaatggactgactccaaagaaaaaaattcaggtgaattcaaaaccttcaattcagcccaagcctttattgcttccagcagcacccaagactcaaacaaactccagtgttccagcaaaaaccatcattattcagacagtaccaacgcttatgccattggcaaagcagcaaccaattatcagtttacaacctgcacccactaaaggccagacggttttgctgtctcagcctactgtggtacaacttcaagcacctggagttctgccctctgctcagccagtccttgctgttgctgggggagtcacacagctccctaatcacgtggtgaatgtggtaccagccccttcagcgaatagcccagtgaatggaaaactttccgtgactaaacctgtcctacaaagtaccatgagaaatgtcggttcagatattgctgtgctaaggagacagcaacgtatgataaaaaatcgagaatccgcttgtcagtctcgcaagaagaagaaagaatatatgctagggttagaggcgagattaaaggctgccctctcagaaaacgagcaactgaagaaagaaaatggaacactgaagcggcagctggatgaagttgtgtcagagaaccagaggcttaaagtccctagtccaaagcgaagagttgtctgtgtgatgatagtattggcatttataatactgaactatggacctatgagcatgttggaacaggattccaggagaatgaaccctagtgtgagccctgcaaatcaaaggaggcaccttctaggattttctgctaaagaggcacaggacacatcagatggtattatccagaaaaacagctacagatatgatcattctgtttcaaatgacaaagccctgatggtgctaactgaagaaccattgctttacattcctccacctccttgtcagcccctaattaacacaacagagtctctcaggttaaatcatgaacttcgaggatgggttcatagacatgaagtagaaaggaccaagtcaagaagaatgacaaataatcaacagaaaacccgtattcttcagggtgctctggaacagggctcaaattctcagctgatggctgttcaatacacagaaaccactagtagtatcagcaggaactcagggagtgagctacaagtgtattatgcttcacccagaagttatcaagacttttttgaagccatccgcagaaggggagacacattttatgttgtgtcatttcgaagggatcacctgctgttaccagctaccacccataacaagaccacaagaccaaaaatgtcaattgtgttaccagcaataaacataaatgagaatgtgatcaatgggcaggactacgaagtgatgatgcagattgactgtcaggtgatggacaccaggatcctccatatcaaaagttcgtcggttcctccttacctccgagatcagcagaggaatcaaaccaacaccttctttggctcccctcccgcagccacagaggcaacccacgttgtcagcaccatccctgagtcattacaatagcaccctgcagctatgctggaaaactgagcgtgggaccctgccagactgaagagcaggtgagcaaaatgctgctttctgccttggtggcaggcagagaactgtctcgtactagaattcaaggaggaaagaagaagaaataaaagaagctgctccatttttcatcatctacccatctatttggaaagcactggaattcagatgcaagagaacaatgtttcttcagtggcaaatgtagccctgcatcctccagtgttacctggtgtagatttttttttctgtacctttctaaacctctcttccctctgtgatggttttgtgtttaaacagtcatcttcttttaaataatatccacctctcctttttgccatttcacttattgattcataaagtgaattttatttaaagctatgccacacatgcatgttcaaatggtttccactgattcgatttttcattcatttaatgcaaacccattctggatattgtgcttatttgagaaaacacatttcaaaaccagaaaagccaaaaacactccaaaaacaagcaaaacaatttggagctttagataaaaggaaaaactcccagttggtaaagtttatctttacttaggatttgtggctcacacctaaacaaagggggtcagggagtgggtacaaatttgagaaaatagaagggtaagggatggtcttgatctcctgacctcgtgatccgcccgcctcggcctcccaaagtgctgggattacaggcgtgagccancggcccggcgtcgacg

SEQ ID NO: 436712 - DNA, 3034 bp, Homo sapiens
caaaagtagtttgtctttactaggccaccgtctcgtcagcgttacggagtattttgtccgcctgccgccgccgtcccagatattaatcacggagttccagggagaaggaacttgtgaaatgggggagccggctggggttgccggcaccatggagtcaccttttagcccgggactctttcacaggctggatgaagattgggattctgctctctttgctgaactcggttatttcacagacactgatgagctgcaattggaagcagcaaatgagacgtatgaaaacaattttgataatcttgattttgatttggatttgatgccttgggagtcagacatttgggacatcaacaaccaaatctgtacagttaaagatattaaggcagaaccccagccactttctccagcctcctcaagttattcagtctcgtctcctcggtcagtggactcttattcttcaactcagcatgttcctgaggagttggatttgtcttctagttctcagatgtctcccctttccttatatggtgaaaactctaatagtctctcttcagcggagccactgaaggaagataagcctgtcactggtcctaggaacaagactgaaaatggactgactccaaagaaaaaaattcaggtgaattcaaaaccttcaattcagcccaagcctttattgcttccagcagcacccaagactcaaacaaactccagtgttccagcaaaaaccatcattattcagacagtaccaacgcttatgccattggcaaagcagcaaccaattatcagtttacaacctgcacccactaaaggccagacggttttgctgtctcagcctactgtggtacaacttcaagcacctggagttctgccctctgctcagccagtccttgctgttgctgggggagtcacacagctccctaatcacgtggtgaatgtggtaccagccccttcagcgaatagcccagtgaatggaaaactttccgtgactaaacctgtcctacaaagtaccatgagaaatgtcggttcagatattgctgtgctaaggagacagcaacgtatgataaaaaatcgagaatccgcttgtcagtctcgcaagaagaagaaagaatatatgctagggttagaggcgagattaaaggctgccctctcagaaaacgagcaactgaagaaagaaaatggaacactgaagcggcagctggatgaagttgtgtcagagaaccagaggcttaaagtccctagtccaaagcgaagagttgtctgtgtgatgatagtattggcatttataatactgaactatggacctatgagcatgttggaacaggattccaggagaatgaaccctagtgtgagccctgcaaatcaaaggaggcaccttctaggattttctgctaaagaggcacaggacacatcagatggtattatccagaaaaacagctacagatatgatcattctgtttcaaatgacaaagccctgatggtgctaactgaagaaccattgctttacattcctccacctccttgtcagcccctaattaacacaacagagtctctcaggttaaatcatgaacttcgaggatgggttcatagacatgaagtagaaaggaccaagtcaagaagaatgacaaataatcaacagaaaacccgtattcttcagggtgctctggaacagggctcaaattctcagctgatggctgttcaatacacagaaaccactagtagtatcagcaggaactcagggagtgagctacaagtgtattatgcttcacccagaagttatcaagacttttttgaagccatccgcagaaggggagacacattttatgttgtgtcatttcgaagggatcacctgctgttaccagctaccacccataacaagaccacaagaccaaaaatgtcaattgtgttaccagcaataaacataaatgagaatgtgatcaatgggcaggactacgaagtgatgatgcagattgactgtcaggtgatggacaccaggatcctccatatcaaaagttcgtcggttcctccttacctccgagatcagcagaggaatcaaaccaacaccttctttggctcccctcccgcagccacagaggcaacccacgttgtcagcaccatccctgagtcattacaatagcaccctgcagctatgctggaaaactgagcgtgggaccctgccagactgaagagcaggtgagcaaaatgctgctttctgccttggtggcaggcagagaactgtctcgtactagaattcaaggaggaaagaagaagaaataaaagaagctgctccatttttcatcatctacccatctatttggaaagcactggaattcagatgcaagagaacaatgtttcttcagtggcaaatgtagccctgcatcctccagtgttacctggtgtagatttttttttctgtacctttctaaacctctcttccctctgtgatggttttgtgtttaaacagtcatcttcttttaaataatatccacctctcctttttgccatttcacttattgattcataaagtgaattttatttaaagctatgccacacatgcatgttcaaaaaaaaaaaaaaaaaaaaaaaaaaaacaaaaaaagaaaaaaaacaaaaaaagaaccaaaaaaaaaaaaggggggggggggaaaaaaatatgaccaggggagggacccacatcacaagcccccacacatagcgaaaaaagacgcgcccacaaaggagcgcaccaaaaataaaacacagacggacagcgaagataaaaaacccgcgcgagaaaaacacatccactgacaccctggggacgacccccatcggggggagcaacacagcgagacaccccccaccacgagtgaaaagacgcaccgggagagaaaaaaaaacacgaggagcaagaggcgggccaccaccgaccgaatagttccgccgggacgaacctggtccagccggtcataaatagccgcgcgccaagtaacagacacgacacgcccgccaccgagcaccaggcaaggcagagggcaccaggaggcggcgggctcgcagc

SEQ ID NO: 436713 - DNA, 2654 bp, Homo sapiens
caggaagacaagtgtcctgctctgtgtcatctttgggctttataaaccatgttccatctgttgtctcatttgaatctcaggaaaaccttgtgaaatatttgttatttttcatgttttacatgtgaggaattggaggcttagagaagttgaccaagtatcccagacatactcaagtgagcagtctcagagtaacatcttgaacccagatctcctgtctccaaattttgtgctcattccactatttcacattaaaacctgaagatctccctgctcttttcatcttaacgtaatttcagctttttgtgtgtggctctccaagccacagagcagcagcagcttttgaggataagaagcagtttcttttaaggataagaagcagtatggttcttacctgcatgttggaacaggattccaggagaatgaaccctagtgtgagccctgcaaatcaaaggaggcaccttctaggattttctgctaaagaggcacaggacacatcagatggtattatccagaaaaacagctacagatatgatcattctgtttcaaatgacaaagccctgatggtgctaactgaagaaccattgctttacattcctccacctccttgtcagcccctaattaacacaacagagtctctcaggttaaatcatgaacttcgaggatgggttcatagacatgaagtagaaaggaccaagtcaagaagaatgacaaataatcaacagaaaacccgtattcttcagggtgctctggaacagggctcaaattctcagctgatggctgttcaatacacagaaaccactagtagtatcagcaggaactcagggagtgagctacaagtgtattatgcttcacccagaagttatcaagacttttttgaagccatccgcagaaggggagacacattttatgttgtgtcatttcgaagggatcacctgctgttaccagctaccacccataacaagaccacaagaccaaaaatgtcaattgtgttaccagcaataaacataaatgagaatgtgatcaatgggcaggactacgaagtgatgatgcagattgactgtcaggtgatggacaccaggatcctccatatcaaaagttcgtcggttcctccttacctccgagatcagcagaggaatcaaaccaacaccttctttggctcccctcccgcagccacagaggcaacccacgttgtcagcaccatccctgagtcattacaatagcaccctgcagctatgctggaaaactgagcgtgggaccctgccagactgaagagcaggtgagcaaaatgctgctttctgccttggtggcaggcagagaactgtctcgtactagaattcaaggaggaaagaagaagaaataaaagaagctgctccatttttcatcatctacccatctatttggaaagcactggaattcagatgcaagagaacaatgtttcttcagtggcaaatgtagccctgcatcctccagtgttacctggtgtagatttttttttctgtacctttctaaacctctcttccctctgtgatggttttgtgtttaaacagtcatcttcttttaaataatatccacctctcctttttgccatttcacttattgattcataaagtgaattttatttaaagctatgccacacatgcatgttcaaatggtttccactgattcgatttttcattcatttaatgcaaacccattctggatattgtgcttatttgagaaaacacatttcaaaaccagaaaagccaaaaacactccaaaaacaagcaaaacaatttggagctttagataaaaggaaaaactcccagttggtaaagtttatctttacttaggatttgtggctcacacctaaacaaagggggtcagggagtgggtacaaatttgagaaaatagaagggtaagggaagggccagtggtggggtttggagagaggagatagctccattaatacacatgtttaaaagatggaaagttcacgcctgtaatcccagcactttgggaggccgaggcgggcggatcacgaggtcaggagatcaagaccatcccggctaaaacggtgaaaccccgtctctactaaaaatacaaaaaattagccgggcgtagtgacgggcgcctgtagtcccagctacttgggaggctgaggcaggagaatggcgtgaacccgggaggcggagcttgcagtgagccgagatcccgccactgcactccagcctgggcgacagagcgagactccgtctcaaaaaaaaaaaaaaaaaaaaaagatggaaagttcgatgtgactgcagtatgagattaaagccacaactattgtttattttggggactctaggccaccaagtattagcacacatacttatgttttctctactaatctggtccaggtcctcatggaccacaggacaaagctttcattttcattcattcttctattgaaattataccaaattcagctgaggaatatggaagtaactttagacttaaacaagacaaaagttttttcactgaagaattgacaagtatttgctccttaaaacaatgcagattagtgaacgtggattcctgctgagggagtgcatcccataatatggcaataattttcagtttctccaacgaaaagatagtgaaggaattaaatcttttgtcctcccatggttaaa

SEQ ID NO: 436714 - DNA, 3132 bp, Homo sapiens
caaaagtagtttgtctttactaggccaccgtctcgtcagcgttacggagtattttgtccgcctgccgccgccgtcccagatattaatcacggagttccagggagaaggaacttgtgaaatgggggagccggctggggttgccggcaccatggagtcaccttttagcccgggactctttcacaggctggatgaagattgggattctgctctctttgctgaactcggttatttcacagacactgatgagctgcaattggaagcagcaaatgagacgtatgaaaacaattttgataatcttgattttgatttggatttgatgccttgggagtcagacatttgggacatcaacaaccaaatctgtacagttaaagatattaaggcagaaccccagccactttctccagcctcctcaagttattcagtctcgtctcctcggtcagtggactcttattcttcaactcagcatgttcctgaggagttggatttgtcttctagttctcagatgtctcccctttccttatatggtgaaaactctaatagtctctcttcagcggagccactgaaggaagataagcctgtcactggtcctaggaacaagactgaaaatggactgactccaaagaaaaaaattcaggtgaattcaaaaccttcaattcagcccaagcctttattgcttccagcagcacccaagactcaaacaaactccagtgttccagcaaaaaccatcattattcagacagtaccaacgcttatgccattggcaaagcagcaaccaattatcagtttacaacctgcacccactaaaggccagacggttttgctgtctcagcctactgtggtacaacttcaagcacctggagttctgccctctgctcagccagtccttgctgttgctgggggagtcacacagctccctaatcacgtggtgaatgtggtaccagccccttcagcgaatagcccagtgaatggaaaactttccgtgactaaacctgtcctacaaagtaccatgagaaatgtcggttcagatattgctgtgctaaggagacagcaacgtatgataaaaaatcgagaatccgcttgtcagtctcgcaagaagaagaaagaatatatgctagggttagaggcgagattaaaggctgccctctcagaaaacgagcaactgaagaaagaaaatggaacactgaagcggcagctggatgaagttgtgtcagagaaccagaggcttaaagtccctagtccaaagcgaagagttgtctgtgtgatgatagtattggcatttataatactgaactatggacctatgagcatgttggaacaggattccaggagaatgaaccctagtgtgagccctgcaaatcaaaggaggcaccttctaggattttctgctaaagaggcacaggacacatcagatggtattatccagaaaaacagctacagatatgatcattctgtttcaaatgacaaagccctgatggtgctaactgaagaaccattgctttacattcctccacctccttgtcagcccctaattaacacaacagagtctctcaggttaaatcatgaacttcgaggatgggttcatagacatgaagtagaaaggaccaagtcaagaagaatgacaaataatcaacagaaaacccgtattcttcagggtgctctggaacagggctcaaattctcagctgatggctgttcaatacacagaaaccactagtagtatcagcaggaactcagggagtgagctacaagtgtattatgcttcacccagaagttatcaagacttttttgaagccatccgcagaaggggagacacattttatgttgtgtcatttcgaaggtagagacggggttcaccatgttggccagtctggtctcgagctcctggcctcaactgatccgcctgccttggcctcctaaagtgctgggattacaggcttgagccactgcactcggcctgaagcattttatgatgctcactaccaagtgttcataagcggtaaataaagcccttgggctaggtaatgtaagatccattgcaacctggagatgaagaactttgtaaaggggataattgttatcacccatcagagcatcagagttttaagatgatctagatttagtcccactaattatatttctcctaacttttatagacagagaaatcagtgaaaaatatgtatttctaaggattaaatcccaatccatagctcaaggctacctttatgtctaatagttgtgatataatatgttgcttagaataggttctataaatggaattcacacataggaccccagaatcgcttcttcacagggtttcagagttggaggacatataaaaggataaatcaatccataaatctctaagtattcctaaaagaagagtggtgtgtcagttattggcaccagtacatcatgaatcctgctgggctgtggagaaaggagaaactaacctgaacaagactatactctacacagctgtccctgacattctaccacctgttagcattcagtattaatttcatggatcaaatcaaggcatgcaagtgcattaaataactttttaaaaaacaactgctgattgctgacgtctatgagggaagaaaaattaggggctgttattttcctatcaaccatcactctcattaacaagaacaggaaacattacgaataaataaaactcttacatcataccagaaaaaagaacagctgaatcccctaaaggatttcatattctatcatcagacaacgaaagaaaataattccatataaatggctgcatgaatcattgaaagaaacttccctgcttttttaaaagagcaactagaagtatttactttttgaaaatagagtaaccatttgttaaaccgtatataccattgaagatgttttgggtataaaagggaatttcccataataattacatagtaatcttttatagccaaagttatgaagaagatcaggatttgggaaaattgtggtcaatatttgattttccttttctgtttgatagccttatctaaattcccctagcttgaatgtagtaaatatgagtgtgtaaaaatgtgtatctaattcacctcttgggggaggtttaatgtaactataaataaaaattctttccccaggttaaaaa

SEQ ID NO: 436715 - DNA, 1247 bp, Homo sapiens
caaaagtagtttgtctttactaggccaccgtctcgtcagcgttacggagtattttgtccgcctgccgccgccgtcccagatattaatcacggagttccagggagaaggaacttgtgaaatgggggagccggctggggttgccggcaccatggagtcaccttttagcccgggactctttcacaggctggatgaagattgggattctgctctctttgctgaactcggttatttcacagacactgatgagctgcaattggaagcagcaaatgagacgtatgaaaacaattttgataatcttgattttgatttggatttgatgccttgggagtcagacatttgggacatcaacaaccaaatctgtacagttaaagatattaaggcagaaccccagccactttctccagcctcctcaagttattcagtctcgtctcctcggtcagtggactcttattcttcaactcagcatgttcctgaggagttggatttgtcttctagttctcagatgtctcccctttccttatatggtgaaaactctaatagtctctcttcagcggagccactgaaggaagataagcctgtcactggtcctaggaacaagactgaaaatggactgactccaaagaaaaaaattcaggtgaattcaaaaccttcaattcagcccaagcctttattgcttccagcagcacccaagactcaaacaaactccagtgttccagcaaaaaccatcattattcagacagtaccaacgcttatgccattggcaaagcagcaaccaattatcagtttacaacctgcacccactaaaggttgtcagcaccatccctgagtcattacaatagcaccctgcagctatgctggaaaactgagcgtgggaccctgccagactgaagagcaggtgagcaaaatgctgctttctgccttggtggcaggcagagaactgtctcgtactagaattcaaggaggaaagaagaagaaataaaagaagctgctccatttttcatcatctacccatctatttggaaagcactggaattcagatgcaagagaacaatgtttcttcagtggcaaatgtagccctgcatcctccagtgttacctggtgtagatttttttttctgtacctttctaaacctctcttccctctgtgatggttttgtgtttaaacagtcatcttcttttaaataatatccacctctcctttttgccatttcacttattgattcataaagtgaattttatttaaagcta

SEQ ID NO: 436716 - DNA, 1745 bp, Homo sapiens
caaaagtagtttgtctttactaggccaccgtctcgtcagcgttacggagtattttgtccgcctgccgccgccgtcccagatattaatcacggagttccagggagaaggaacttgtgaaatgggggagccggctggggttgccggcaccatggagtcaccttttagcccgggactctttcacaggctggatgaagattgggattctgctctctttgctgaactcggttatttcacagacactgatgagctgcaattggaagcagcaaatgagacgtatgaaaacaattttgataatcttgattttgatttggatttgatgccttgggagtcagacatttgggacatcaacaaccaaatctgtacagttaaagatattaaggcagaaccccagccactttctccagcctcctcaagttattcagtctcgtctcctcggtcagtggactcttattcttcaactcagcatgttcctgaggagttggatttgtcttctagttctcagatgtctcccctttccttatatggtgaaaactctaatagtctctcttcagcggagccactgaaggaagataagcctgtcactggtcctaggaacaagactgaaaatggactgactccaaagaaaaaaattcaggtgaattcaaaaccttcaattcagcccaagcctttattgcttccagcagcacccaagactcaaacaaactccagtgttccagcaaaaaccatcattattcagacagtaccaacgcttatgccattggcaaagcagcaaccaattatcagtttacaacctgcacccactaaaggccagacggttttgctgtctcagcctactgtggtacaacttcaagcacctggagttctgccctctgctcagccagtccttgctgttgctgggggagtcacacagctccctaatcacgtggtgaatgtggtaccagccccttcagcgaatagcccagtgaatggaaaactttccgtgactaaacctgtcctacaaagtaccatgagaaatgtcggttcagatattgctgtgctaaggagacagcaacgtatgataaaaaatcgagaatccgcttgtcagtctcgcaagaagaagaaagaatatatgctagggttagaggcgagattaaaggctgccctctcagaaaacgagcaactgaagaaagaaaatggaacactgaagcggcagctggatgaagttgtgtcagagaaccagaggcttaaagtccctagtccaaagcgaagagttgtctgtgtgatgatagtattggcatttataatactgaactatggacctatgagcatgttggaacaggattccaggagaatgaaccctagtgtgagccctgcaaatcaaaggaggcaccttctaggattttctgctaaagaggcacaggacacatcagatggtattatccagaaaaacagctacaggtaagatggcatgcatctatcttttggcctaagtgatttaatgaagctgaaacaagagaattatctgtagtataacattgcatctaaattgttcgtgtatattttgagtagtagaacacataaattactgaaaccattaatacattttacttttaatattgtaaaattaaatttactttgaaaccttttgtagttttaaaattcctatagagatgtaatcttaaaatctcagtttgtgtgcattaatatacatattgaaatatatacatattatatataatgtctttaataattattttatctatcat

SEQ ID NO: 436717 - DNA, 957 bp, Homo sapiens
  misc_feature (68)..(68): n is a, c, g, or t
gagagagagagagagagagagagagagagagagagagagagagagagagagagagagagagagagagnagagagagcatagtgcctgacaacggtagacactctgtaaatgtgtattacattaatgaatgaatgattctaagctggtttgtagttaattaagccaacttcaaataaaaactataatttttcatcatcccaacgaaatattgacctcttagaagccctgaatttggcctgttctaggactaagccaattgttatatataacagattgttctttgttaattttaggatcacctgctgttaccagctaccacccataacaagaccacaagaccaaaaatgtcaattgtgttaccagcaataaacataaatggtaagttgaaattctgatgtatgaacaatatgagatttctttgtttaaccaggattctcttcattagttcaaagacatttaaaatgttcagttaaatgagtatatatccgtacattatttcttgaaacatttttccactgttttattatttttaagaaccattattcttttaaaaaaaattactacatccctaaaagaaaaagtagctttcttttacttacaaaattggaaaagctagcatcttgactgctctacagacttgcatctgcgacccttctagtcataaatgtagtgtaagaagcccctgctgtgttctgacagtgaatttgtaaattagatttttggaactcaaagcagtttcctgtgttacctaaatgttgatatcatcctagaccatgccacagaagcctgtttatgtttaattgataatactgatgagtttgacactgatagtattactattgcattttgttatattactagccctggacattaaacaaaatacaaataataatataatgcacagatgttaaggcataatatacctgcttatagtttagaagaaaaaaaaagacaagc

SEQ ID NO: 436718 - DNA, 771 bp, Homo sapiens
gtttctaatatacctttcctttgaagttaccctgaagtgtttttctgtttatatgtgggtctcctccttttctatgcaatttgctgcttaaggattatactcattaatttttgtttttattatgctacaggaggagttggatttgtcttctagttctcagatgtctcccctttccttatatggtgaaaactctaatagtctctcttcagcggagccactgaaggaagataagcctgtcactggtcctaggaacaagactggtattactctatctcctaacttctgttatttctatttcagattgagcttaggttccatttcttaaaagaaaatgctggattaaatttatgtttattaggctggcttgctgttttttaattggtggacctatattgtttgttgtgagtgattaccgtggagaggaaaggggagaaataatctttggttgtctctgtctttacaggtgaaagatactttaaaatagactcagaccccaccatcttcaggagagatttcaaagtttcagttaaagataactgaatggagctatgacatttgttacctcattaatctctgggtgttatcccgtgattttagcaattctcctttaccagttagtgtgtcccattcccaaaactgcagcttggttagaaaaggaggtaacagtttaagtacttttcttcagttcattcaggtatatgtactgtagctatgcttaaactccagttaaagattgttaatcgaagttaagataatgtgtagagaaaggtg

SEQ ID NO: 436719 - DNA, 420 bp, Homo sapiens
tttagttgagaaagataaataagaaagtatattaaagtatattgttaatgataactcaaagagatgaatttagttggtcacattaaaaacataacaaagtcaccataagcgtgtgctgctattgatccaatgttttaattgatggtgtccaatcccttggtgttgatcttacccattacgtctgcagaaaagacctaattataagctgcttcccctgccacagtagttgtgtaccctttgattccttttcttttttctaacgcaggccagacggttttgctgtctcagcctactgtggtacaacttcaagcacctggagttctgccctctgctcagccagtccttgctgttgctgggggagtcacacagctccctaatcacgtggtgaatgtggtaccagccccttcagcgaatagccca

SEQ ID NO: 436720 - DNA, 3565 bp, Homo sapiens
caaaagtagtttgtctttactaggccaccgtctcgtcagcgttacggagtattttgtccgcctgccgccgccgtcccagatattaatcacggagttccagggagaaggaacttgtgaaatgggggagccggctggggttgccggcaccatggagtcaccttttagcccgggactctttcacaggctggatgaagattgggattctgctctctttgctgaactcggttatttcacagacactgatgagctgcaattggaagcagcaaatgagacgtatgaaaacaattttgataatcttgattttgatttggatttgatgccttgggagtcagacatttgggacatcaacaaccaaatctgtacagttaaagatattaaggcagaaccccagccactttctccagcctcctcaagttattcagtctcgtctcctcggtcagtggactcttattcttcaactcagcatgttcctgaggagttggatttgtcttctagttctcagatgtctcccctttccttatatggtgaaaactctaatagtctctcttcagcggagccactgaaggaagataagcctgtcactggtcctaggaacaagactgaaaatggactgactccaaagaaaaaaattcaggtgaattcaaaaccttcaattcagcccaagcctttattgcttccagcagcacccaagactcaaacaaactccagtgttccagcaaaaaccatcattattcagacagtaccaacgcttatgccattggcaaagcagcaaccaattatcagtttacaacctgcacccactaaaggccagacggttttgctgtctcagcctactgtggtacaacttcaagcacctggagttctgccctctgctcagccagtccttgctgttgctgggggagtcacacagctccctaatcacgtggtgaatgtggtaccagccccttcagcgaatagcccagtgaatggaaaactttccgtgactaaacctgtcctacaaagtaccatgagaaatgtcggttcagatattgctgtgctaaggagacagcaacgtatgataaaaaatcgagaatccgcttgtcagtctcgcaagaagaagaaagaatatatgctagggttagaggcgagattaaaggctgccctctcagaaaacgagcaactgaagaaagaaaatggaacactgaagcggcagctggatgaagttgtgtcagagaaccagaggcttaaagtccctagtccaaagcgaagagttgtctgtgtgatgatagtattggcatttataatactgaactatggacctatgagcatgttggaacaggattccaggagaatgaaccctagtgtgagccctgcaaatcaaaggaggcaccttctaggattttctgctaaagaggcacaggacacatcagatggtattatccagaaaaacagctacagatatgatcattctgtttcaaatgacaaagccctgatggtgctaactgaagaaccattgctttacattcctccacctccttgtcagcccctaattaacacaacagagtctctcaggttaaatcatgaacttcgaggatgggttcatagacatgaagtagaaaggaccaagtcaagaagaatgacaaataatcaacagaaaacccgtattcttcagggtgctctggaacagggctcaaattctcagctgatggctgttcaatacacagaaaccactagtagtatcagcaggaactcagggagtgagctacaagtgtattatgcttcacccagaagttatcaagacttttttgaagccatccgcagaaggggagacacattttatgttgtgtcatttcgaagggatcacctgctgttaccagctaccacccataacaagaccacaagaccaaaaatgtcaattgtgttaccagcaataaacataaatgagaatgtgatcaatgggcaggactacgaagtgatgatgcagattgactgtcaggtgatggacaccaggatcctccatatcaaaagttcgtcggttcctccttacctccgagatcagcagaggaatcaaaccaacaccttctttggctcccctcccgcagccacagaggcaacccacgttgtcagcaccatccctgagtcattacaatagcaccctgcagctatgctggaaaactgagcgtgggaccctgccagactgaagagcaggtgagcaaaatgctgctttctgccttggtggcaggcagagaactgtctcgtactagaattcaaggaggaaagaagaagaaataaaagaagctgctccatttttcatcatctacccatctatttggaaagcactggaattcagatgcaagagaacaatgtttcttcagtggcaaatgtagccctgcatcctccagtgttacctggtgtagatttttttttctgtacctttctaaacctctcttccctctgtgatggttttgtgtttaaacagtcatcttcttttaaataatatccacctctcctttttgccatttcacttattgattcataaagtgaattttatttaaagctatgccacacatgcatgttcaaatggtttccactgattcgatttttcattcatttaatgcaaacccattctggatattgtgcttatttgagaaaacacatttcaaaaccagaaaagccaaaaacactccaaaaacaagcaaaacaatttggagctttagataaaaggaaaaactcccagttggtaaagtttatctttacttaggatttgtggctcacacctaaacaaagggggtcagggagtgggtacaaatttgagaaaatagaagggtaagggaagggccagtggtggggtttggagagaggagatagctccattaatacacatgtttaaaagatggaaagttcacgcctgtaatcccagcactttgggaggccgaggcgggcggatcacgaggtcaggagatcaagaccatcccggctaaaacggtgaaaccccgtctctactaaaaatacaaaaaattagccgggcgtagtgacgggcgcctgtagtcccagctacttgggaggctgaggcaggagaatggcgtgaacccgggaggcggagcttgcagtgagccgagatcccgccactgcactccagcctgggcgacagagcgagactccgtctcaaaaaaaaaaaaaaaaaaaaaagatggaaagttcgatgtgactgcagtatgagattaaagccacaactattgtttattttggggactctaggccaccaagtattagcacacatacttatgttttctctactaatctggtccaggtcctcatggaccacaggacaaagctttcattttcattcattcttctattgaaattataccaaattcagctgaggaatatggaagtaactttagacttaaacaagacaaaagttttttcactgaagaattgacaagtatttgctccttaaaacaatgcagattagtgaacgtggattcctgctgagggagtgcatcccataatatggcaataattttcagtttctccaacgaaaagatagtgaaggaattaaatcttttgtcctcccatggttaaa

SEQ ID NO: 436721 - DNA, 3019 bp, Homo sapiens
cgaactcgcatggctggttagtccgaacttgcatgggctgggctagtcccgaacttgcatggctggttagaccgaacctgcatggctggtgaattcaaaaccttcaattcagcccaagcctttattgcttccagcagcacccaagactcaaacaaactccagtgttccagcaaaaaccatcattattcagacagtaccaacgcttatgccattggcaaagcagcaaccaattatcagtttacaacctgcacccactaaaggccagacggttttgctgtctcagcctactgtggtacaacttcaagcacctggagttctgccctctgctcagccagtccttgctgttgctgggggagtcacacagctccctaatcacgtggtgaatgtggtaccagccccttcagcgaatagcccagtgaatggaaaactttccgtgactaaacctgtcctacaaagtaccatgagaaatgtcggttcagatattgctgtgctaaggagacagcaacgtatgataaaaaatcgagaatccgcttgtcagtctcgcaagaagaagaaagaatatatgctagggttagaggcgagattaaaggctgccctctcagaaaacgagcaactgaagaaagaaaatggaacactgaagcggcagctggatgaagttgtgtcagagaaccagaggcttaaagtccctagtccaaagcgaagagttgtctgtgtgatgatagtattggcatttataatactgaactatggacctatgagcatgttggaacaggattccaggagaatgaaccctagtgtgagccctgcaaatcaaaggaggcaccttctaggattttctgctaaagaggcacaggacacatcagatggtattatccagaaaaacagctacagatatgatcattctgtttcaaatgacaaagccctgatggtgctaactgaagaaccattgctttacattcctccacctccttgtcagcccctaattaacacaacagagtctctcaggttaaatcatgaacttcgaggatgggttcatagacatgaagtagaaaggaccaagtcaagaagaatgacaaataatcaacagaaaacccgtattcttcagggtgctctggaacagggctcaaattctcagctgatggctgttcaatacacagaaaccactagtagtatcagcaggaactcagggagtgagctacaagtgtattatgcttcacccagaagttatcaagacttttttgaagccatccgcagaaggggagacacattttatgttgtgtcatttcgaagggatcacctgctgttaccagctaccacccataacaagaccacaagaccaaaaatgtcaattgtgttaccagcaataaacataaatgagaatgtgatcaatgggcaggactacgaagtgatgatgcagattgactgtcaggtgatggacaccaggatcctccatatcaaaagttcgtcggttcctccttacctccgagatcagcagaggaatcaaaccaacaccttctttggctcccctcccgcagccacagaggcaacccacgttgtcagcaccatccctgagtcattacaatagcaccctgcagctatgctggaaaactgagcgtgggaccctgccagactgaagagcaggtgagcaaaatgctgctttctgccttggtggcaggcagagaactgtctcgtactagaattcaaggaggaaagaagaagaaataaaagaagctgctccatttttcatcatctacccatctatttggaaagcactggaattcagatgcaagagaacaatgtttcttcagtggcaaatgtagccctgcatcctccagtgttacctggtgtagatttttttttctgtacctttctaaacctctcttccctctgtgatggttttgtgtttaaacagtcatcttcttttaaataatatccacctctcctttttgccatttcacttattgattcataaagtgaattttatttaaagctatgccacacatgcatgttcaaatggtttccactgattcgatttttcattcatttaatgcaaacccattctggatattgtgcttatttgagaaaacacatttcaaaaccagaaaagccaaaaacactccaaaaacaagcaaaacaatttggagctttagataaaaggaaaaactcccagttggtaaagtttatctttacttaggatttgtggctcacacctaaacaaagggggtcagggagtgggtacaaatttgagaaaatagaagggtaagggaagggccagtggtggggtttggagagaggagatagctccattaatacacatgtttaaaagatggaaagttcacgcctgtaatcccagcactttgggaggccgaggcgggcggatcacgaggtcaggagatcaagaccatcccggctaaaacggtgaaaccccgtctctactaaaaatacaaaaaattagccgggcgtagtgacgggcgcctgtagtcccagctacttgggaggctgaggcaggagaatggcgtgaacccgggaggcggagcttgcagtgagccgagatcccgccactgcactccagcctgggcgacagagcgagactccgtctcaaaaaaaaaaaaaaaaaaaaaagatggaaagttcgatgtgactgcagtatgagattaaagccacaactattgtttattttggggactctaggccaccaagtattagcacacatacttatgttttctctactaatctggtccaggtcctcatggaccacaggacaaagctttcattttcattcattcttctattgaaattataccaaattcagctgaggaatatggaagtaactttagacttaaacaagacaaaagttttttcactgaagaattgacaagtatttgctccttaaaacaatgcagattagtgaacgtggattcctgctgagggagtgcatcccataatatggcaataattttcagtttctccaacgaaaagatagtgaaggaattaaatcttttgtcctcccatggttaaa

SEQ ID NO: 436722 - DNA, 2273 bp, Homo sapiens
caaaagtagtttgtctttactaggccaccgtctcgtcagcgttacggagtattttgtccgcctgccgccgccgtcccagatattaatcacggagttccagggagaaggaacttgtgaaatgggggagccggctggggttgccggcaccatggagtcaccttttagcccgggactctttcacaggctggatgaagattgggattctgctctctttgctgaactcggttatttcacagacactgatgagctgcaattggaagcagcaaatgagacgtatgaaaacaattttgataatcttgattttgatttggatttgatgccttgggagtcagacatttgggacatcaacaaccaaatctgtacagttaaagatattaaggcagaaccccagccactttctccagcctcctcaagttattcagtctcgtctcctcggtcagtggactcttattcttcaactcagcatgttcctgaggagttggatttgtcttctagttctcagatgtctcccctttccttatatggtgaaaactctaatagtctctcttcagcggagccactgaaggaagataagcctgtcactggtcctaggaacaagactgaaaatggactgactccaaagaaaaaaattcaggtgaattcaaaaccttcaattcagcccaagcctttattgcttccagcagcacccaagactcaaacaaactccagtgttccagcaaaaaccatcattattcagacagtaccaacgcttatgccattggcaaagcagcaaccaattatcagtttacaacctgcacccactaaaggttgtcagcaccatccctgagtcattacaatagcaccctgcagctatgctggaaaactgagcgtgggaccctgccagactgaagagcaggtgagcaaaatgctgctttctgccttggtggcaggcagagaactgtctcgtactagaattcaaggaggaaagaagaagaaataaaagaagctgctccatttttcatcatctacccatctatttggaaagcactggaattcagatgcaagagaacaatgtttcttcagtggcaaatgtagccctgcatcctccagtgttacctggtgtagatttttttttctgtacctttctaaacctctcttccctctgtgatggttttgtgtttaaacagtcatcttcttttaaataatatccacctctcctttttgccatttcacttattgattcataaagtgaattttatttaaagctatgccacacatgcatgttcaaatggtttccactgattcgatttttcattcatttaatgcaaacccattctggatattgtgcttatttgagaaaacacatttcaaaaccagaaaagccaaaaacactccaaaaacaagcaaaacaatttggagctttagataaaaggaaaaactcccagttggtaaagtttatctttacttaggatttgtggctcacacctaaacaaagggggtcagggagtgggtacaaatttgagaaaatagaagggtaagggaagggccagtggtggggtttggagagaggagatagctccattaatacacatgtttaaaagatggaaagttcacgcctgtaatcccagcactttgggaggccgaggcgggcggatcacgaggtcaggagatcaagaccatcccggctaaaacggtgaaaccccgtctctactaaaaatacaaaaaattagccgggcgtagtgacgggcgcctgtagtcccagctacttgggaggctgaggcaggagaatggcgtgaacccgggaggcggagcttgcagtgagccgagatcccgccactgcactccagcctgggcgacagagcgagactccgtctcaaaaaaaaaaaaaaaaaaaaaagatggaaagttcgatgtgactgcagtatgagattaaagccacaactattgtttattttggggactctaggccaccaagtattagcacacatacttatgttttctctactaatctggtccaggtcctcatggaccacaggacaaagctttcattttcattcattcttctattgaaattataccaaattcagctgaggaatatggaagtaactttagacttaaacaagacaaaagttttttcactgaagaattgacaagtatttgctccttaaaacaatgcagattagtgaacgtggattcctgctgagggagtgcatcccataatatggcaataattttcagtttctccaacgaaaagatagtgaaggaattaaatcttttgtcctcccatggttaaa

SEQ ID NO: 436723 - DNA, 2501 bp, Homo sapiens
caaaagtagtttgtctttactaggccaccgtctcgtcagcgttacggagtattttgtccgcctgccgccgccgtcccagatattaatcacggagttccagggagaaggaacttgtgaaatgggggagccggctggggttgccggcaccatggagtcaccttttagcccgggactctttcacaggctggatgaagattgggattctgctctctttgctgaactcggttatttcacagacactgatgagctgcaattggaagcagcaaatgagacgtatgaaaacaattttgataatcttgattttgatttggatttgatgccttgggagtcagacatttgggacatcaacaaccaaatctgtacagttaaagatattaaggcagaaccccagccactttctccagcctcctcaagttattcagtctcgtctcctcggtcagtggactcttattcttcaactcagcatgttcctgaggagttggatttgtcttctagttctcagatgtctcccctttccttatatggtgaaaactctaatagtctctcttcagcggagccactgaaggaagataagcctgtcactggtcctaggaacaagactgaaaatggactgactccaaagaaaaaaattcaggtgaattcaaaaccttcaattcagcccaagcctttattgcttccagcagcacccaagactcaaacaaactccagtgttccagcaaaaaccatcattattcagacagtaccaacgcttatgccattggcaaagcagcaaccaattatcagtttacaacctgcacccactaaaggccagacggttttgctgtctcagcctactgtggtacaacttcaagcacctggagttctgccctctgctcagccagtccttgctgttgctgggggagtcacacagctccctaatcacgtggtgaatgtggtaccagccccttcagcgaatagcccagtgaatggaaaactttccgtgactaaacctgtcctacaaagtaccatgagaaatgtcggttcagatattgctgtgctaaggagacagcaacgtatgataaaaaatcgagaatccgcttgtcagtctcgcaagaagaagaaagaatatatgctagggttagaggcgagattaaaggctgccctctcagaaaacgagcaactgaagaaagaaaatggaacactgaagcggcagctggatgaagttgtgtcagagaaccagaggcttaaagtccctagtccaaagcgaagagttgtctgtgtgatgatagtattggcatttataatactgaactatggacctatgagcatgttggaacaggattccaggagaatgaaccctagtgtgagccctgcaaatcaaaggaggcaccttctaggattttctgctaaagaggcacaggacacatcagatggtattatccagaaaaacagctacagatatgatcattctgtttcaaatgacaaagccctgatggtgctaactgaagaaccattgctttacattcctccacctccttgtcagcccctaattaacacaacagagtctctcaggttaaatcatgaacttcgaggatgggttcatagacatgaagtagaaaggaccaagtcaagaagaatgacaaataatcaacagaaaacccgtattcttcagggtgctctggaacagggctcaaattctcagctgatggctgttcaatacacagaaaccactagtagtatcagcaggaactcagggagtgagctacaagtgtattatgcttcacccagaagttatcaagacttttttgaagccatccgcagaaggggagacacattttatgttgtgtcatttcgaagggatcacctgctgttaccagctaccacccataacaagaccacaagaccaaaaatgtcaattgtgttaccagcaataaacataaatggtaagttgaaattctgatgtatgaacaatatgagatttctttgtttaaccaggattctcttcattagttcaaagacatttaaaatgttcagttaaatgagtatatatccgtacattatttcttgaaacatttttccactgttttattatttttaagaaccattattcttttaaaaaaaattactacatccctaaaagaaaaagtagctttcttttacttacaaaattggaaaagctagcatcttgactgctctacagacttgcatctgcgacccttctagtcataaatgtagtgtaagaagcccctgctgtgttctgacagtgaatttgtaaattagatttttggaactcaaagcagtttcctgtgttacctaaatgttgatatcatcctagaccatgccacagaagcctgtttatgtttaattgataatactgatgagtttgacactgatagtattactattgcattttgttatattactagccctggacattaaacaaaatacaaataataatataatgcacagatgttaaggcataatatacctgcttatagtttagaagaaaaaaaaagacaagc

SEQ ID NO: 436724 - DNA, 494 bp, Homo sapiens
ttgcagtacctcctagaggccacaggggggagagcgcggggccctcccagggaggacgctccgtcctcgctgcacagagagcttcccggagcgtgggtgggggtggaaacccgtggggagctgaagtctcctcagcccagtcactgaggcaccgggggagacgcggaggaagaaagcaccattgagaattatgcgtcacgacccgaggcctttaacaccccgttcctgaacatcgacaaattgcgatctgcgtttaaggctgatgagttcctgaactggcacgccctctttgagtctatcaaaaggaaacttcctttcctcaactgggatgcctttcctaagctgaaaggactgaggagcgcaactcctgatgcccagtgaccatgacctccactggaagagggggctagcgtgagcgctgattctcaacctaccataactctttcctgcctcaggaactccaataaaacattttccatccaacaaaacaagta

SEQ ID NO: 436725 - DNA, 392 bp, Homo sapiens
gagcaccccaaacttgacgccatgaagatcccggtccttcctgccgtggtgctcctctccctcctggtgctccactctgcccagggagccaccctgggtggtcctgaggaagaaagcaccattgagaattatgcgtcacgacccgaggcgtttaaggctgatgagttcctgaactggcacgccctctttgagtctatcaaaaggaaacttcctttcctcaactgggatgcctttcctaagctgaaaggactgaggagcgcaactcctgatgcccagtgaccatgacctccactggaagagggggctagcgtgagcgctgattctcaacctaccataactctttcctgcctcaggaactccaataaaacattttccatccaacaaaacaagta

SEQ ID NO: 436726 - DNA, 319 bp, Homo sapiens
acagggaaaggaggatcagccttctcaccaaactgaagggaggtcttagctactacatatagaggagaacgggaactcacaccgaggcagaaattcctttccatccatgccatcctatactgggcacccacgggttccccatctaaccctgacccctctccctctagctgaaaggactgaggagcgcaactcctgatgcccagtgaccatgacctccactggaagagggggctagcgtgagcgctgattctcaacctaccataactctttcctgcctcaggaactccaataaaacattttccatccaacaaaacaagta

SEQ ID NO: 436727 - DNA, 434 bp, Homo sapiens
gagcaccccaaacttgacgccatgaagatcccggtccttcctgccgtggtgctcctctccctcctggtgctccactctgcccagggagccaccctgggtggtcctgaggaagaaagcaccattgagaattatgcgtcacgacccgaggcctttaacaccccgttcctgaacatcgacaaattgcgatctgcgtttaaggctgatgagttcctgaactggcacgccctctttgagtctatcaaaaggaaacttcctttcctcaactgggatgcctttcctaagctgaaaggactgaggagcgcaactcctgatgcccagtgaccatgacctccactggaagagggggctagcgtgagcgctgattctcaacctaccataactctttcctgcctcaggaactccaataaaacattttccatccaacaaaacaagta

SEQ ID NO: 436728 - DNA, 4353 bp, Homo sapiens
ggcagagggtgggccttaggacgggtctcccttaaactgggcgatcaggcagcgaccctagaggcgtctgtagggtaaagctgggggttctgtagccggaggcggcggcgagtccagaacgtcctggccttacagggagaaggcgtcactcgcggttacaagtgcctgaccctcactccagttggcggaggaggagaaggaaggggccgggccgggtcccctcccctcgcgccccggatggatgtgcccggcccggtgtctcggcgggcggcggcggcggcggccactgtgctcctgcggaccgctcgggtccgtcgcgaatgctggttcttgccgaccgcgctgctctgcgcctacggcttcttcgccagcctcaggccgtccgagcccttcctgaccccgtacctgctggggccggacaagaacctgaccgagagggaggtcttcaatgaaatttatccagtatggacttactcttacctggtgctactgtttcctgtgttccttgccacagactacctccgttataaacctgttgttctactgcaggggctcagccttattgttacatggtttatgctgctctatgcccagggactgctggccattcaatttctagaatttttttatggcatcgccacagccactgaaattgcctattactcttatatctacagtgtggtggacctgggcatgtaccagaaagtcacaagttactgtcgaagtgccactttggtgggctttacagtgggctctgtcctagggcaaatccttgtctcagtggcaggctggtcgctgttcagcctgaatgtcatctctcttacctgtgtttcagtggcttttgctgtggcctggtttttacctatgccacagaagagcctcttctttcaccacattccttctacctgccagagagtgaatggcatcaaggtacaaaatggtggcattgttactgacaccccagcttctaaccaccttcctggctgggaggacattgagtcaaaaatccctctaaatatggaggagcctcccgtggaggaaccggaacccaagccagaccgtctccttgtattgaaagtactatggaatgatttcctgatgtgctactcctctcgccctcttctctgctggtctgtgtggtgggccctctctacctgtggctattttcaagttgtgaactacacacagggcctgtgggagaaagtgatgccttctcgctatgctgctatctataatggtggcgtggaggccgtttcaaccttactgggtgctgttgctgtgtttgcagttggttatataaaaatatcctggtcaacttggggagaaatgacattatctctcttttctctcctgattgctgctgcagtgtatatcatggacactgtgggtaacatttgggtgtgctatgcatcctatgttgtcttcagaatcatctacatgttactcatcacgatagcaacttttcaaattgctgcaaacctcagcatggaacgctatgccctagtatttggtgtaaataccttcattgccctggcactgcagacgctgctcactctaattgtggtagatgccagtggccttggattagaaattaccactcagtttttgatctatgccagttattttgcactcatcgctgtggttttcctggccagtggtgcagtcagtgttatgaagaaatgtagaaagctggaagatccacaatcaagttctcaagtaaccacttcataatatactgctgaagggcttcttcttatagcaagaactctgcacagcaactgcctggatgtatttgattttttaaagcgtagacatatatttatgaatgtgcatttcttgacttcacagcagccacttgactaataccttgtgttccgggaataacatgatactattcagaggagccagaagtaaagtttatttcatggattatttatgagagctaatttaaggatgactttttttctgattcaaaagtgaacttgattttaaaaaccagtcaagagcaatcaaagcagcacatggtgttgtatacttcattagcaagtgagtttggtgttttataggtcacatatgtctgtatctacttagccagatgcttggcctggtgggaccagggctccacagaggccacaaaatgttgcaagtcatgatggatggaaatatgttctaacagcatctgcctctattcaatttaattcttatttctgtgttactcatgtacattggtctttctacatagttattctatcactggcaatatttgttctggtttagtgttctgtattttaaggtgtacgtatcatttctaattttaagttattttaaaaaaattcatcatatgaatgttcttggttcccattgtgacgattatttatttctgtaaaatttgtttagaagtacgtttttgcattattcatatgcttcccagagaagctcatttagttagaaaataaggcaagttttgaagcctgctaaatgaagagacttaagaaagcttaaggtacgcttgcttgtctttaaatcttcaatatgaaggactattaattccaagattaaaagttcatatataggctaaagatgtaactaggccatttgtatttgtattcccttttatttccaaaataaaatgaaaaatctttttttaataatttcatccctatttatagtttttatattaatttgtttttcttatccaagtaaagatgtcaataggaattgcattagtccaaggcctttttcataaactgagcctcttttcaattatttcaatgggacaggaactaggatagatgtgattcctgcatttttttaccttaaatctgcctttgtttctaaaggtagatcatcttgaatatttgcttaaaattgctagtgatttcattaccaagttacttgaaaaaatgttctatatgcatttaattctgaaatcagtctaccaaggggctgctagtatatgtcagacatgaaaactattttaaagctgactttgttgccttatcttgaaaagaatctagataggtgcttttaactggggtattaacttttttagaatgacacagctgaacagtgttaataatagtgtgtcaagattgcaaagtcgacatactcatttggtttaagcaggaatcctagaagcaaatggatggggataagaataggtcattttctattcaccatcctttactattaagggaaaggaaaagaacactagctaaggaagggaaagggaagtgatatcataaaagtagcaaccttcattttacattctgtctgtttttctttttttgctttgttttgtttgtgctaatttgggaattgtgtactccgaaacaagtagaaaagtgctgtttgagggattttattaaatctttttttaatggaatgtggtacaaattgttcatgttaccaaagcaatatttccctggaatttaattcaaagtttgtggcatacaacctgagccttttcttatataagacaagaatatgttcacatcttggtatgtggccatatttatagaatgctgaactcaatgtgcaagttgtactgtatgcagttttgtaaataagtgaaaataatttgttgtactttttattcaattctgtatagattataaaattatttttattaaataaatattttacagtatattttctctttttaatcaaaattgttttaaatttatcttctatttcagtaggagctttagattatatctttaaatattttaataatttatcctaggacaaatttcatattaagtcttcccctggtctaacttgcctagttaaccttttgttatctttttaattattccattgctttgtgatttttacctttgactcttcccccttatttcagatgttttcccccttttttttggcaccccgttgcactgtttttttttttttttttggttttcatgttggcactgctcttatctctttttaaagcattcttccttaaaaaaaaaaaaagacactctctttgatgttaactgaatttttacaataaaggaaattaaagcaagagcagaaaataccaccttgttctgaaacttcatagcctctttgttccacctcaaattattctgatacccagggaggaatcttcttgccatgagttgagaatcatttgtccattatatcccagaaacctaatcagtattttcttacagtatccaaatgagtaccattttttaatataccatttcaaaatctacttaaggcattgatttcgctgcttatcaccaaagtcctggaaatttttcatgcaaaaataaattttttttttttgagacagtcttgcactgttgcccaggctgcagtgcagtggcaatctcggctcactgc

SEQ ID NO: 436729 - DNA, 3987 bp, Homo sapiens
ggcagagggtgggccttaggacgggtctcccttaaactgggcgatcaggcagcgaccctagaggcgtctgtagggtaaagctgggggttctgtagccggaggcggcggcgagtccagaacgtcctggccttacagggagaaggcgtcactcgcggttacaagtgcctgaccctcactccagttggcggaggaggagaaggaaggggccgggccgggtcccctcccctcgcgccccggatggatgtgcccggcccggtgtctcggcgggcggcggcggcggcggccactgtgctcctgcggaccgctcgggtccgtcgcgaatgctggttcttgccgaccgcgctgctctgcgcctacggcttcttcgccagcctcaggccgtccgagcccttcctgaccccgtacctgctggggccggacaagaacctgaccgagagggaggtcttcaatgaaatttatccagtatggacttactcttacctggtgctactgtttcctgtgttccttgccacagactacctccgttataaacctgttgttctactgcaggggctcagccttattgttacatggtttatgctgctctatgcccagggactgctggccattcaatttctagaatttttttatggcatcgccacagccactgaaattgcctattactcttatatctacagtgtggtggacctgggcatgtaccagaaagtcacaagttactgtcgaagtgccactttggtgggctttacagtgggctctgtcctagggcaaatccttgtctcagtggcaggctggtcgctgttcagcctgaatgtcatctctcttacctgtgtttcagtggcttttgctgtggcctggtttttacctatgccacagaagagcctcttctttcaccacattccttctacctgccagagagtgaatggcatcaaggtacaaaatggtggcattgttactgacaccccagcttctaaccaccttcctggctgggaggacattgagtcaaaaatccctctaaatatggaggagcctcccgtggaggaaccggaacccaagccagaccgtctccttgtattgaaagtactatggaatgatttcctgatgtgctactcctctcgccctcttctctgctggtctgtgtggtgggccctctctacctgtggctattttcaagttgtgaactacacacagggcctgtgggagaaagtgatgccttctcgctatgctgctatctataatggtggcgtggaggccgtttcaaccttactgggtgctgttgctgtgtttgcagttggttatataaaaatatcctggtcaacttggggagaaatgacattatctctcttttctctcctgattgctgctgcagtgtatatcatggacactgtgggtaacatttgggtgtgctatgcatcctatgttgtcttcagaatcatctacatgttactcatcacgatagcaacgtatgtattttggctcatagaagccttaggaaaaattgtaacaggataaattttttggtttctttacaaaccatgtgcattatcagtttttctcctgaggaagcatttaggcaagttttgtttattcccatgtttgtatgttcctactgttttcagatgtttgcatgagatttatatcatttagttgcagaatgttttcatttggttggaaaggcaattgacagtagaaagaaggactcttcatgtttaaagataaatgtttacttttatttagaataaatattataagtactccagaagtaattcttatttattcactcttttatttttttttaagttttcaaattgctgcaaacctcagcatggaacgctatgccctagtatttggtgtaaataccttcattgccctggcactgcagacgctgctcactctaattgtggtagatgccagtggccttggattagaaattaccactcagtttttgatctatgccagttattttgcactcatcgctgtggttttcctggccagtggtgcagtcagtgttatgaagaaatgtagaaagctggaagatccacaatcaagttctcaagtaaccacttcataatatactgctgaagggcttcttcttatagcaagaactctgcacagcaactgcctggatgtatttgattttttaaagcgtagacatatatttatgaatgtgcatttcttgacttcacagcagccacttgactaataccttgtgttccgggaataacatgatactattcagaggagccagaagtaaagtttatttcatggattatttatgagagctaatttaaggatgactttttttctgattcaaaagtgaacttgattttaaaaaccagtcaagagcaatcaaagcagcacatggtgttgtatacttcattagcaagtgagtttggtgttttataggtcacatatgtctgtatctacttagccagatgcttggcctggtgggaccagggctccacagaggccacaaaatgttgcaagtcatgatggatggaaatatgttctaacagcatctgcctctattcaatttaattcttatttctgtgttactcatgtacattggtctttctacatagttattctatcactggcaatatttgttctggtttagtgttctgtattttaaggtgtacgtatcatttctaattttaagttattttaaaaaaattcatcatatgaatgttcttggttcccattgtgacgattatttatttctgtaaaatttgtttagaagtacgtttttgcattattcatatgcttcccagagaagctcatttagttagaaaataaggcaagttttgaagcctgctaaatgaagagacttaagaaagcttaaggtacgcttgcttgtctttaaatcttcaatatgaaggactattaattccaagattaaaagttcatatataggctaaagatgtaactaggccatttgtatttgtattcccttttatttccaaaataaaatgaaaaatctttttttaataatttcatccctatttatagtttttatattaatttgtttttcttatccaagtaaagatgtcaataggaattgcattagtccaaggcctttttcataaactgagcctcttttcaattatttcaatgggacaggaactaggatagatgtgattcctgcatttttttaccttaaatctgcctttgtttctaaaggtagatcatcttgaatatttgcttaaaattgctagtgatttcattaccaagttacttgaaaaaatgttctatatgcatttaattctgaaatcagtctaccaaggggctgctagtatatgtcagacatgaaaactattttaaagctgactttgttgccttatcttgaaaagaatctagataggtgcttttaactggggtattaacttttttagaatgacacagctgaacagtgttaataatagtgtgtcaagattgcaaagtcgacatactcatttggtttaagcaggaatcctagaagcaaatggatggggataagaataggtcattttctattcaccatcctttactattaagggaaaggaaaagaacactagctaaggaagggaaagggaagtgatatcataaaagtagcaaccttcattttacattctgtctgtttttctttttttgctttgttttgtttgtgctaatttgggaattgtgtactccgaaacaagtagaaaagtgctgtttgagggattttattaaatctttttttaatggaatgtggtacaaattgttcatgttaccaaagcaatatttccctggaatttaattcaaagtttgtggcatacaacctgagccttttcttatataagacaagaatatgttcacatcttggtatgtggccatatttatagaatgctgaactcaatgtgcaagttgtactgtatgcagttttgtaaataagtgaaaataatttgttgtactttttattcaattctgtatagattataaaattatttttattaaataaatattttacagtat

SEQ ID NO: 436730 - DNA, 3384 bp, Homo sapiens
ggcagagggtgggccttaggacgggtctcccttaaactgggcgatcaggcagcgaccctagaggcgtctgtagggtaaagctgggggttctgtagccggaggcggcggcgagtccagaacgtcctggccttacagggagaaggcgtcactcgcggttacaagtgcctgaccctcactccagttggcggaggaggagaaggaaggggccgggccgggtcccctcccctcgcgccccggatggatgtgcccggcccggtgtctcggcgggcggcggcggcggcggccactgtgctcctgcggaccgctcgggtccgtcgcgaatgctggttcttgccgaccgcgctgctctgcgcctacggcttcttcgccagcctcaggccgtccgagcccttcctgaccccgtacctgctggggccggacaagaacctgaccgagagggaggaacccaagccagaccgtctccttgtattgaaagtactatggaatgatttcctgatgtgctactcctctcgccctcttctctgctggtctgtgtggtgggccctctctacctgtggctattttcaagttgtgaactacacacagggcctgtgggagaaagtgatgccttctcgctatgctgctatctataatggtggcgtggaggccgtttcaaccttactgggtgctgttgctgtgtttgcagttggttatataaaaatatcctggtcaacttggggagaaatgacattatctctcttttctctcctgattgctgctgcagtgtatatcatggacactgtgggtaacatttgggtgtgctatgcatcctatgttgtcttcagaatcatctacatgttactcatcacgatagcaacgtatgtattttggctcatagaagccttaggaaaaattgtaacaggataaattttttggtttctttacaaaccatgtgcattatcagtttttctcctgaggaagcatttaggcaagttttgtttattcccatgtttgtatgttcctactgttttcagatgtttgcatgagatttatatcatttagttgcagaatgttttcatttggttggaaaggcaattgacagtagaaagaaggactcttcatgtttaaagataaatgtttacttttatttagaataaatattataagtactccagaagtaattcttatttattcactcttttatttttttttaagttttcaaattgctgcaaacctcagcatggaacgctatgccctagtatttggtgtaaataccttcattgccctggcactgcagacgctgctcactctaattgtggtagatgccagtggccttggattagaaattaccactcagtttttgatctatgccagttattttgcactcatcgctgtggttttcctggccagtggtgcagtcagtgttatgaagaaatgtagaaagctggaagatccacaatcaagttctcaagtaaccacttcataatatactgctgaagggcttcttcttatagcaagaactctgcacagcaactgcctggatgtatttgattttttaaagcgtagacatatatttatgaatgtgcatttcttgacttcacagcagccacttgactaataccttgtgttccgggaataacatgatactattcagaggagccagaagtaaagtttatttcatggattatttatgagagctaatttaaggatgactttttttctgattcaaaagtgaacttgattttaaaaaccagtcaagagcaatcaaagcagcacatggtgttgtatacttcattagcaagtgagtttggtgttttataggtcacatatgtctgtatctacttagccagatgcttggcctggtgggaccagggctccacagaggccacaaaatgttgcaagtcatgatggatggaaatatgttctaacagcatctgcctctattcaatttaattcttatttctgtgttactcatgtacattggtctttctacatagttattctatcactggcaatatttgttctggtttagtgttctgtattttaaggtgtacgtatcatttctaattttaagttattttaaaaaaattcatcatatgaatgttcttggttcccattgtgacgattatttatttctgtaaaatttgtttagaagtacgtttttgcattattcatatgcttcccagagaagctcatttagttagaaaataaggcaagttttgaagcctgctaaatgaagagacttaagaaagcttaaggtacgcttgcttgtctttaaatcttcaatatgaaggactattaattccaagattaaaagttcatatataggctaaagatgtaactaggccatttgtatttgtattcccttttatttccaaaataaaatgaaaaatctttttttaataatttcatccctatttatagtttttatattaatttgtttttcttatccaagtaaagatgtcaataggaattgcattagtccaaggcctttttcataaactgagcctcttttcaattatttcaatgggacaggaactaggatagatgtgattcctgcatttttttaccttaaatctgcctttgtttctaaaggtagatcatcttgaatatttgcttaaaattgctagtgatttcattaccaagttacttgaaaaaatgttctatatgcatttaattctgaaatcagtctaccaaggggctgctagtatatgtcagacatgaaaactattttaaagctgactttgttgccttatcttgaaaagaatctagataggtgcttttaactggggtattaacttttttagaatgacacagctgaacagtgttaataatagtgtgtcaagattgcaaagtcgacatactcatttggtttaagcaggaatcctagaagcaaatggatggggataagaataggtcattttctattcaccatcctttactattaagggaaaggaaaagaacactagctaaggaagggaaagggaagtgatatcataaaagtagcaaccttcattttacattctgtctgtttttctttttttgctttgttttgtttgtgctaatttgggaattgtgtactccgaaacaagtagaaaagtgctgtttgagggattttattaaatctttttttaatggaatgtggtacaaattgttcatgttaccaaagcaatatttccctggaatttaattcaaagtttgtggcatacaacctgagccttttcttatataagacaagaatatgttcacatcttggtatgtggccatatttatagaatgctgaactcaatgtgcaagttgtactgtatgcagttttgtaaataagtgaaaataatttgttgtactttttattcaattctgtatagattataaaattatttttattaaataaatattttacagtat

SEQ ID NO: 436731 - DNA, 1764 bp, Homo sapiens
gagagagagagagagagagagagagagagagagagagagagagagagagagagagagagagagagagagagagagagagagagagagagagagagcttgattttaaaaaccagtcaagagcaatcaaagcagcacatggtgttgtatacttcattagcaagtgagtttggtgttttataggtcacatatgtctgtatctacttagccagatgcttggcctggtgggaccagggctccacagaggccacaaaatgttgcaagtcatgatggatggaaatatgttctaacagcatctgcctctattcaatttaattcttatttctgtgttactcatgtacattggtctttctacatagttattctatcactggcaatatttgttctggtttagtgttctgtattttaaggtgtacgtatcatttctaattttaagttattttaaaaaaattcatcatatgaatgttcttggttcccattgtgacgattatttatttctgtaaaatttgtttagaagtacgtttttgcattattcatatgcttcccagagaagctcatttagttagaaaataaggcaagttttgaagcctgctaaatgaagagacttaagaaagcttaaggtacgcttgcttgtctttaaatcttcaatatgaaggactattaattccaagattaaaagttcatatataggctaaagatgtaactaggccatttgtatttgtattcccttttatttccaaaataaaatgaaaaatctttttttaataatttcatccctatttatagtttttatattaatttgtttttcttatccaagtaaagatgtcaataggaattgcattagtccaaggcctttttcataaactgagcctcttttcaattatttcaatgggacaggaactaggatagatgtgattcctgcatttttttaccttaaatctgcctttgtttctaaaggtagatcatcttgaatatttgcttaaaattgctagtgatttcattaccaagttacttgaaaaaatgttctatatgcatttaattctgaaatcagtctaccaaggggctgctagtatatgtcagacatgaaaactattttaaagctgactttgttgccttatcttgaaaagaatctagataggtgcttttaactggggtattaacttttttagaatgacacagctgaacagtgttaataatagtgtgtcaagattgcaaagtcgacatactcatttggtttaagcaggaatcctagaagcaaatggatggggataagaataggtcattttctattcaccatcctttactattaagggaaaggaaaagaacactagctaaggaagggaaagggaagtgatatcataaaagtagcaaccttcattttacattctgtctgtttttctttttttgctttgttttgtttgtgctaatttgggaattgtgtactccgaaacaagtagaaaagtgctgtttgagggattttattaaatctttttttaatggaatgtggtacaaattgttcatgttaccaaagcaatatttccctggaatttaattcaaagtttgtggcatacaacctgagccttttcttatataagacaagaatatgttcacatcttggtatgtggccatatttatagaatgctgaactcaatgtgcaagttgtactgtatgcagttttgtaaataagtgaaaataatttgttgtactttttattcaattctgtatagattataaaattatttttattaaataaatattttacagtat

SEQ ID NO: 436732 - DNA, 2537 bp, Homo sapiens
ggcagagggtgggccttaggacgggtctcccttaaactgggcgatcaggcagcgaccctagaggcgtctgtagggtaaagctgggggttctgtagccggaggcggcggcgagtccagaacgtcctggccttacagggagaaggcgtcactcgcggttacaagtgcctgaccctcactccagttggcggaggaggagaaggaaggggccgggccgggtcccctcccctcgcgccccggatggatgtgcccggcccggtgtctcggcgggcggcggcggcggcggccactgtgctcctgcggaccgctcgggtccgtcgcgaatgctggttcttgccgaccgcgctgctctgcgcctacggcttcttcgccagcctcaggccgtccgagcccttcctgaccccgtacctgctggggccggacaagaacctgaccgagagggaggtcttcaatgaaatttatccagtatggacttactcttacctggtgctactgtttcctgtgttccttgccacagactacctccgttataaacctgttgttctactgcaggggctcagccttattgttacatggtttatgctgctctatgcccagggactgctggccattcaatttctagaatttttttatggcatcgccacagccactgaaattgcctattactcttatatctacagtgtggtggacctgggcatgtaccagaaagtcacaagttactgtcgaagtgccactttggtgggctttacagtgggctctgtcctagggcaaatccttgtctcagtggcaggctggtcgctgttcagcctgaatgtcatctctcttacctgtgtttcagtggcttttgctgtggcctggtttttacctatgccacagaagagcctcttctttcaccacattccttctacctgccagagagtgaatggcatcaaggtacaaaatggtggcattgttactgacaccccagcttctaaccaccttcctggctgggaggacattgagtcaaaaatccctctaaatatggaggagcctcccgtggaggaaccggaacccaagccagaccgtctccttgtattgaaagtactatggaatgatttcctgatgtgctactcctctcgccctcttctctgctggtctgtgtggtgggccctctctacctgtggctattttcaagttgtgaactacacacagggcctgtgggagaaagtgatgccttctcgctatgctgctatctataatggtggcgtggaggccgtttcaaccttactgggtgctgttgctgtgtttgcagttggttatataaaaatatcctggtcaacttggggagaaatgacattatctctcttttctctcctgattgctgctgcagtgtatatcatggacactgtgggtaacatttgggtgtgctatgcatcctatgttgtcttcagaatcatctacatgttactcatcacgatagcaacgtatgtattttggctcatagaagccttaggaaaaattgtaacaggataaattttttggtttctttacaaaccatgtgcattatcagtttttctcctgaggaagcatttaggcaagttttgtttattcccatgtttgtatgttcctactgttttcagatgtttgcatgagatttatatcatttagttgcagaatgttttcatttggttggaaaggcaattgacagtagaaagaaggactcttcatgtttaaagataaatgtttacttttatttagaataaatattataagtactccagaagtaattcttatttattcactcttttatttttttttaagttttcaaattgctgcaaacctcagcatggaacgctatgccctagtatttggtgtaaataccttcattgccctggcactgcagacgctgctcactctaattgtggtagatgccagtggccttggattagaaattaccactcaggtaagatctctcctttggcatcgaaggtagtatgtgtgacttgatcagggtgacagaagtatatgtatgcttaatgcaaatccaaacaatagggaacagatgtaaagtgcataccctccttccttcattcaacatcttctcccctatccttaggtgtttctcctgggagggtgttgggattgtcaggtcttagaacattcccgagtgtctcatcagcccaatggggctgtttcagctgagaggtaatattgattccttacagaccaagaccttctgcttcctcatccattatttccctctatacttaaatctatgcttggaatactgtatcccatgtttgagattccctgcttcatctcacaactctttaagtctcctcccttctttatttaaaacacccctcacccaaataccacggtaatgcctcgctgctgatgaacaacattatgatttgtaacttatgactattgagaaacttgcaccaacacccaacaacaatgtgaatactttttacgttcaggaattgtatagttgtatatgccttcatgcattgtgagttttaagtatatcttgttttgtactttggtaaaatgggcaa

SEQ ID NO: 436733 - DNA, 452 bp, Homo sapiens
ctgcagtgtatatcatggacactgtgggtaacatttgggtgtgctatgcatcctatgttgtcttcagaatcatctacatgttactcatcacgatagcaacgtatgtattttggctcatagaagccttaggaaaaattgtaacaggataaattttttggtttctttacaaaccaaaatattcaagtttctagttaaatgaggcaaatgggaggaagcattgtattatatgtgcattatcagtttttctcctgaggaagcatttaggcaagttttgtttattcccatgtttgtatgttcctactgttttcagatgtttgcatgagatttatatcatttagttgcagaatgttttcatttggttggaaaggcaattgacagtagaaagaaggactcttcatgtttaaagataaatgtttacttttatttagaataaatattataagtactccaga

SEQ ID NO: 436734 - DNA, 3650 bp, Homo sapiens
ggcagagggtgggccttaggacgggtctcccttaaactgggcgatcaggcagcgaccctagaggcgtctgtagggtaaagctgggggttctgtagccggaggcggcggcgagtccagaacgtcctggccttacagggagaaggcgtcactcgcggttacaagtgcctgaccctcactccagttggcggaggaggagaaggaaggggccgggccgggtcccctcccctcgcgccccggatggatgtgcccggcccggtgtctcggcgggcggcggcggcggcggccactgtgctcctgcggaccgctcgggtccgtcgcgaatgctggttcttgccgaccgcgctgctctgcgcctacggcttcttcgccagcctcaggccgtccgagcccttcctgaccccgtacctgctggggccggacaagaacctgaccgagagggaggtcttcaatgaaatttatccagtatggacttactcttacctggtgctactgtttcctgtgttccttgccacagactacctccgttataaacctgttgttctactgcaggggctcagccttattgttacatggtttatgctgctctatgcccagggactgctggccattcaatttctagaatttttttatggcatcgccacagccactgaaattgcctattactcttatatctacagtgtggtggacctgggcatgtaccagaaagtcacaagttactgtcgaagtgccactttggtgggctttacagtgggctctgtcctagggcaaatccttgtctcagtggcaggctggtcgctgttcagcctgaatgtcatctctcttacctgtgtttcagtggcttttgctgtggcctggtttttacctatgccacagaagagcctcttctttcaccacattccttctacctgccagagagtgaatggcatcaaggtacaaaatggtggcattgttactgacaccccagcttctaaccaccttcctggctgggaggacattgagtcaaaaatccctctaaatatggaggagcctcccgtggaggaaccggaacccaagccagaccgtctccttgtattgaaagtactatggaatgatttcctgatgtgctactcctctcgccctcttctctgctggtctgtgtggtgggccctctctacctgtggctattttcaagttgtgaactacacacagggcctgtgggagaaagtgatgccttctcgctatgctgctatctataatggtggcgtggaggccgtttcaaccttactgggtgctgttgctgtgtttgcagttggttatataaaaatatcctggtcaacttggggagaaatgacattatctctcttttctctcctgattgctgctgcagtgtatatcatggacactgtgggtaacatttgggtgtgctatgcatcctatgttgtcttcagaatcatctacatgttactcatcacgatagcaacttttcaaattgctgcaaacctcagcatggaacgctatgccctagtatttggtgtaaataccttcattgccctggcactgcagacgctgctcactctaattgtggtagatgccagtggccttggattagaaattaccactcagtttttgatctatgccagttattttgcactcatcgctgtggttttcctggccagtggtgcagtcagtgttatgaagaaatgtagaaagctggaagatccacaatcaagttctcaagtaaccacttcataatatactgctgaagggcttcttcttatagcaagaactctgcacagcaactgcctggatgtatttgattttttaaagcgtagacatatatttatgaatgtgcatttcttgacttcacagcagccacttgactaataccttgtgttccgggaataacatgatactattcagaggagccagaagtaaagtttatttcatggattatttatgagagctaatttaaggatgactttttttctgattcaaaagtgaacttgattttaaaaaccagtcaagagcaatcaaagcagcacatggtgttgtatacttcattagcaagtgagtttggtgttttataggtcacatatgtctgtatctacttagccagatgcttggcctggtgggaccagggctccacagaggccacaaaatgttgcaagtcatgatggatggaaatatgttctaacagcatctgcctctattcaatttaattcttatttctgtgttactcatgtacattggtctttctacatagttattctatcactggcaatatttgttctggtttagtgttctgtattttaaggtgtacgtatcatttctaattttaagttattttaaaaaaattcatcatatgaatgttcttggttcccattgtgacgattatttatttctgtaaaatttgtttagaagtacgtttttgcattattcatatgcttcccagagaagctcatttagttagaaaataaggcaagttttgaagcctgctaaatgaagagacttaagaaagcttaaggtacgcttgcttgtctttaaatcttcaatatgaaggactattaattccaagattaaaagttcatatataggctaaagatgtaactaggccatttgtatttgtattcccttttatttccaaaataaaatgaaaaatctttttttaataatttcatccctatttatagtttttatattaatttgtttttcttatccaagtaaagatgtcaataggaattgcattagtccaaggcctttttcataaactgagcctcttttcaattatttcaatgggacaggaactaggatagatgtgattcctgcatttttttaccttaaatctgcctttgtttctaaaggtagatcatcttgaatatttgcttaaaattgctagtgatttcattaccaagttacttgaaaaaatgttctatatgcatttaattctgaaatcagtctaccaaggggctgctagtatatgtcagacatgaaaactattttaaagctgactttgttgccttatcttgaaaagaatctagataggtgcttttaactggggtattaacttttttagaatgacacagctgaacagtgttaataatagtgtgtcaagattgcaaagtcgacatactcatttggtttaagcaggaatcctagaagcaaatggatggggataagaataggtcattttctattcaccatcctttactattaagggaaaggaaaagaacactagctaaggaagggaaagggaagtgatatcataaaagtagcaaccttcattttacattctgtctgtttttctttttttgctttgttttgtttgtgctaatttgggaattgtgtactccgaaacaagtagaaaagtgctgtttgagggattttattaaatctttttttaatggaatgtggtacaaattgttcatgttaccaaagcaatatttccctggaatttaattcaaagtttgtggcatacaacctgagccttttcttatataagacaagaatatgttcacatcttggtatgtggccatatttatagaatgctgaactcaatgtgcaagttgtactgtatgcagttttgtaaataagtgaaaataatttgttgtactttttattcaattctgtatagattataaaattatttttattaaataaatattttacagtat

SEQ ID NO: 436735 - DNA, 950 bp, Homo sapiens
ggtttttgtcgttcacgctcacggtgttatatctctgatgtgtgtcccgtcgctgtcgcttgcgtgtagtagtggttgatgttgtcggcgtttgggtgttgtcgtttctcggtgtgttgttctggtcctggtctcgatggttgtgccgctgcccgttgctggtctggtcgctcgggtgctgctcctgctgagtctgttcttgccgtcgggctggcctgtgtaggcgtgctctcccggtgtattttggtgaggcccgggccttaggagggttcacgaaaggcccgagggcgatttttcagccccccgcacattacgcgggggggtaaccccgatgacgcccccaagttttattgttcccccgggcccgttaatattctcgtgggaggtgggggtccccacatgtggtgccccccccccgcgagtggggtcctccctcccccgcgtgtgtccccccggcgcgctttttccccccccccccgtgtgttgtattaacgccgcgcggcgcctgcctcttgcgcttttattaacgcgccctccctcttgggggccccctttgttaaaaaaaacggggtgggcggtaatgggcgcccccccggggggtgattttttggccggcgcccccctttttttttttttttttttttttttttttttttttttttttttttttttttttttaatggaatgtggtacaaattgttcatgttaccaaagcaatatttccctggaatttaattcaaagtttgtggcatacaacctgagccttttcttatataagacaagaatatgttcacatcttggtatgtggccatatttatagaatgctgaactcaatgtgcaagttgtactgtatgcagttttgtaaataagtgaaaataatttgttgtactttttattcaattctgtatagattataaaattatttttattaaataaatattttacagtat

SEQ ID NO: 436736 - DNA, 2485 bp, Homo sapiens
ggcagagggtgggccttaggacgggtctcccttaaactgggcgatcaggcagcgaccctagaggcgtctgtagggtaaagctgggggttctgtagccggaggcggcggcgagtccagaacgtcctggccttacagggagaaggcgtcactcgcggttacaagtgcctgaccctcactccagttggcggaggaggagaaggaaggggccgggccgggtcccctcccctcgcgccccggatggatgtgcccggcccggtgtctcggcgggcggcggcggcggcggccactgtgctcctgcggaccgctcgggtccgtcgcgaatgctggttcttgccgaccgcgctgctctgcgcctacggcttcttcgccagcctcaggccgtccgagcccttcctgaccccgtacctgctggggccggacaagaacctgaccgagagggaggtcttcaatgaaatttatccagtatggacttactcttacctggtgctactgtttcctgtgttccttgccacagactacctccgttataaacctgttgttctactgcaggggctcagccttattgttacatggtttatgctgctctatgcccagggactgctggccattcaatttctagaatttttttatggcatcgccacagccactgaaattgcctattactcttatatctacagtgtggtggacctgggcatgtaccagaaagtcacaagttactgtcgaagtgccactttggtgggctttacagtgggctctgtcctagggcaaatccttgtctcagtggcaggctggtcgctgttcagcctgaatgtcatctctcttacctgtgtttcagtggcttttgctgtggcctggtttttacctatgccacagaagagcctcttctttcaccacattccttctacctgccagagagtgaatggcatcaaggtacaaaatggtggcattgttactgacaccccagcttctaaccaccttcctggctgggaggacattgagtcaaaaatccctctaaatatggaggagcctcccgtggaggaaccggaacccaagccagaccgtctccttgtattgaaagtactatggaatgatttcctgatgtgctactcctctcgccctcttctctgctggtctgtgtggtgggccctctctacctgtggctattttcaagttgtgaactacacacagggcctgtgggagaaagtgatgccttctcgctatgctgctatctataatggtggcgtggaggccgtttcaaccttactgggtgctgttgctgtgtttgcagttggttatataaaaatatcctggtcaacttggggagaaatgacattatctctcttttctctcctgattgctgctgcagtgtatatcatggacactgtgggtaacatttgggtgtgctatgcatcctatgttgtcttcagaatcatctacatgttactcatcacgatagcaacgtatgtattttggctcatagaagccttaggaaaaattgtaacaggataaattttttggtttctttacaaaccatgtgcattatcagtttttctcctgaggaagcatttaggcaagttttgtttattcccatgtttgtatgttcctactgttttcagatgtttgcatgagatttatatcatttagttgcagaatgttttcatttggttggaaaggcaattgacagtagaaagaaggactcttcatgtttaaagataaatgtttacttttatttagaataaatattataagtactccagaagtaattcttatttattcactcttttatttttttttaagttttcaaattgctgcaaacctcagcatggaacgctatgccctagtatttggtgtaaataccttcattgccctggcactgcagacgctgctcactctaattgtggtagatgccagtggccttggattagaaattaccactcaggtaagatctctcctttggcatcgaaggtagtatgtgtgacttgatcagggtgacagaagtatatgtatgcttaatgcaaatccaaacaatagggaacagatgtgtttctcctgggagggtgttgggattgtcaggtcttagaacattcccgagtgtctcatcagcccaatggggctgtttcagctgagaggtaatattgattccttacagaccaagaccttctgcttcctcatccattatttccctctatacttaaatctatgcttggaatactgtatcccatgtttgagattccctgcttcatctcacaactctttaagtctcctcccttctttatttaaaacacccctcacccaaataccacggtaatgcctcgctgctgatgaacaacattatgatttgtaacttatgactattgagaaacttgcaccaacacccaacaacaatgtgaatactttttacgttcaggaattgtatagttgtatatgccttcatgcattgtgagttttaagtatatcttgttttgtactttggtaaaatgggcaa

SEQ ID NO: 436737 - DNA, 1938 bp, Homo sapiens
  misc_feature (1822)..(1822): n is a, c, g, or t
ggcagagggtgggccttaggacgggtctcccttaaactgggcgatcaggcagcgaccctagaggcgtctgtagggtaaagctgggggttctgtagccggaggcggcggcgagtccagaacgtcctggccttacagggagaaggcgtcactcgcggttacaagtgcctgaccctcactccagttggcggaggaggagaaggaaggggccgggccgggtcccctcccctcgcgccccggatggatgtgcccggcccggtgtctcggcgggcggcggcggcggcggccactgtgctcctgcggaccgctcgggtccgtcgcgaatgctggttcttgccgaccgcgctgctctgcgcctacggcttcttcgccagcctcaggccgtccgagcccttcctgaccccgtacctgctggggccggacaagaacctgaccgagagggaggtcttcaatgaaatttatccagtatggacttactcttacctggtgctactgtttcctgtgttccttgccacagactacctccgttataaacctgttgttctactgcaggggctcagccttattgttacatggtttatgctgctctatgcccagggactgctggccattcaatttctagaatttttttatggcatcgccacagccactgaaattgcctattactcttatatctacagtgtggtggacctgggcatgtaccagaaagtcacaagttactgtcgaagtgccactttggtgggctttacagtgggctctgtcctagggcaaatccttgtctcagtggcaggctggtcgctgttcagcctgaatgtcatctctcttacctgtgtttcagtggcttttgctgtggcctggtttttacctatgccacagaagagcctcttctttcaccacattccttctacctgccagagagtgaatggcatcaaggtacaaaatggtggcattgttactgacaccccagcttctaaccaccttcctggctgggaggacattgagtcaaaaatccctctaaatatggaggagcctcccgtggaggaaccggaacccaagccagaccgtctccttgtattgaaagtactatggaatgatttcctgatgtgctactcctctcgccctcttctctgctggtctgtgtggtgggccctctctacctgtggctattttcaagttgtgaactacacacagggcctgtgggagaaagtgatgccttctcgctatgctgctatctataatggtggcgtggaggccgtttcaaccttactgggtgctgttgctgtgtttgcagttggttatataaaaatatcctggtcaacttggggagaaatgacattatctctcttttctctcctgattgctgctgcagtgtatatcatggacactgtgggtaacatttgggtgtgctatgcatcctatgttgtcttcagaatcatctacatgttactcatcacgatagcaacgtatgtattttggctcatagaagccttaggaaaaattgtaacaggataaattttttggtttctttacaaaccatgtgcattatcagtttttctcctgaggaagcatttaggcaagttttgtttattcccatgtttgtatgttcctactgttttcagatgtttgcatgagatttatatcatttagttgcagaatgttttcatttggttggaaaggcaattgacagtagaaagaaggactcttcatgtttaaagataaatgtttacttttatttagaataaatattataagtactccagagtatctattatcactcttattgtctaagttcaatagtgcaactagatgacgcttgctagattgngatactcatgcctgatgaacctgtactctatggcaatgcaggctgataaatccctcagaacctcttgatcagtgttgggactgccggccagattgtctatgacatcacaagacgta

SEQ ID NO: 436738 - DNA, 524 bp, Homo sapiens
gacaaatgatctatcctttgtctctataaaagaacgtaatcactaataataagcttttctacctacagagtctctctgagaaatcaaggaaagtattccgaatatttcggcagtgggaatctctgtgctcatgctgaagatactccagcgccttcctggagatagctggaatgagagtgactttttgaaaaattaaggctgagttcctttcggtcagctgacactaagtttttcctgttctgggttaatcataaggagccccctgccatagcaaaggcagtgagtgtcaactatctgcatctggctgagagagacccgtttcctttcagggatgtggacagggtaagggcagcaagcatggttctgttaaaggagtgtggggttaacagactagaaggaagactaaggacctgaccacccatttcagcatcttcaatgtggagcagtgttctgaggactcttctatcctaggactatgacagtgtgtattaataaaatatttgctaagattctcaaaaaaagaa

SEQ ID NO: 436739 - DNA, 2647 bp, Homo sapiens
  misc_feature (211)..(211): n is a, c, g, or t
gtaacagcagcacttctgcccacaattctttgcattgttagcaaccagattttggtccctcattttagtctactgtgattaaaaggatcaggctctttggagagttgctgattccatgtcttggggcaaggacaataaatcaacttggatccagaatatcctgttgttgctagaaagcaagaatgctttcaagaatgctacagacaggccnggcgtgagccactgtgcccggcctcaaaatcaactttcacaggacgataaattagaagacacctactttgatagagatgtggagaaggcatttatgaaggctagctctgaactcttcagtcagaaaacaaaggcatctttacttgtatcaaatcaaaatggaaatatgtacacatcttcagtatatggttcccttgcatctgttctagcacagtactcacctcagcaattagcagggaagagaattggagtgttttcttatggttctggtttggctgccactctgtactctcttaaagtcacacaagatgctacaccggggtctgctcttgataaaataacagcaagtttatgtgatcttaaatcaaggcttgattcaagaactggtgtggcaccagatgtcttcgctgaaaacatgaagctcagagaggacacccatcatttggtcaactatattccccagggttcaatagattcactctttgaaggaacgtggtacttagttagggtggatgaaaagcacagaagaacttacgctcggcgtcccactccaaatgatgacactttggatgaaggagtaggacttgtgcattcaaacatagcaactgagcatattccaagccctgccaagaaagtaccaagactccctgccacagcagcagaacctgaagcagctgtcattagtaatggggaacattaagatactctgtgaggtgcaagacttcagggtggggtgggcatggggtgggggtatgggaacagttggaggaatgggatatctggggataattttaaaggattacatgttatgtaaatttttatgtgactgacatggagcctggatgactatcgtgtacttgggaaagtctctttgctctatttgctgacatgcttcctgttgtggtctggccaatgccaaatgtactcgaatgatgttaagggctctgtaaaacttcatacctctttggccatttgtatgcatgatgtttggtttttaaacatggtataatgaattgtgtacttctgtcagaagaaagcagaggtactaatctccaattaaaaaattttttaacatgtaagaattttgtactttgaacaacaagattacagaaagtacctgtggtttttggaaaacatttctagcttggggaatgtgacaacattccccagtgtggtaaaattggggtaaaatgtggtaaaatgtgatacgcacaaaccctttgaaaatagcaaaacaaacatgccctttttctaaaattgataaatcctaaagaggaagaaaagagctgggacaataaaacactggctctggaatctggaatgttaagtccaggccagcagtgacaaaagttattgtaatgacctctgaacagagaaacactgccattgaagaggcttctggtatagaaaacatggtacattcaggagctgtgaatatagctctaggtgtgctcctgaatcagttcatggtagattatgctgaacaacagtgagatgttattggaggtgtggatgagggagtttgttgttgcagtccttctttgcaccttattttaaagaataaatgaaacatttttctggttacttttttaaaaatttaaaatggaagggaagaataggggcagggcattattaggctatttctgatgcttcagtgttataaattcaacatagaggctgacaacctaaattcatggtgtaacacagctcttttccttttcctttttttttttttttttggtatctgttcaatgaaaataaggtatgacccaagtttttacctagtctgactagaagtattccacttcaaggtctgaagtaggacttttaccttaaaaaacaacaacaaacaaaactatcacacaggatagataagaagattggttaaacagttttgtgtagatctttttggtgctgaactatgacatgagccttatagattgtaaaatagggatagttggaactaatgtacagaactaaattttttaaactttatttgctgttaaattctgtgaagtttcagttatctaaaataaatatacacaaatatgaaatataatgtttcagattgcaaggtaatatgtaatagtagtgtttgtaagatactcttgtctaatattaactagtagtattttgatttgtacagtcataatttgttaaaatgacttcatttaacattcactgatgtagattaataatgtaagttctgatttaaagaatggtggcaaaatggtgcatgtaatacttttgcaagtgttggggagatcggtatgttttgaaaagagtaatttaacttttgggtgccaggaaatgggttttctcaaagtccattgccggcaatgggcaggcctgcaaatactggcacagagcattaatcatacaccttattaacggtgaggtgaataactttgaaataaagttttagagaaatgtttcc

SEQ ID NO: 436740 - DNA, 416 bp, Homo sapiens
aaggtttaccaacagttttgccactttatattaggaaggacacgtctgccacatcccagtcagttaatggatcaccccaagcggaacaaccttcattggaatctacaagcaaagaagccttctttagcagagtggaaacattttctatatccttttttagttcatgtgaattgcactttctgcctgcttctagaattcctccaaggtattacaccacttactgtgatgctttaaacttaagaataaaaccttggtaaggaaattatatagggaaagtcaggcatcctaatatgttatcactcagaggggacagttgaggttatctaaccttttctttttacagaagaaaaaactaagagcctgaggaaaagaagaaataataactaatacttgtatatagtatgtttttgtatata

SEQ ID NO: 436741 - DNA, 562 bp, Homo sapiens
acttgtcttcatggagtacccatagggtgattaaatggaacagtaaatattcagtttcaaagtacagattgactagagcatttttttttttttttagagggaatcttgttctgttgcccaggctggagtgcaatggcgtggtctcggctcactgcaacctccacctcccaggttcaagcaattctcctgcctcagcctcccgagtagctaggattacaggcacccaccaccatgcctggctaatttttgtatttttagtagagacagtgtttcaccatgttggccaggctggtcttgaactgctgacctcgtgatccgcccacctcggcctcccaaagtgttgggattacaggcgtgagccactgtgcccggcctcaaaatcaactttcacaggacgattggacagagatttctttaaatgcctgaacaaataagtcccccagtcttgccaaggagctctgtgtgtggtggggggagcacaccttcagtagtcaagcaggcagtttgcagttctgtgttagccttcacttcctgcttgtgcagaacctcagcatcagccaga

SEQ ID NO: 436742 - DNA, 494 bp, Homo sapiens
cagtgcagtggcacaatcatagctcactgcagctttgaattcctgggcttaagcaatcctcctgcctcagcctcctgagtaactatgactacaggcgtatgccaccacatccagctaatttttttttttttggtagagatggggtctcactatattgcccaggctgatctcaaactcctggcttcaagtgatcctcctacctcagcctcccaaaatgttaggattacagtcatgagcaactgtacctggcctcaaattcatgtttcttgtctcaatctgtgtaggatgtcttcagtggggatggtggaggaagggcatctgaaaatcttctatgagagcaaaaagaacacttacaaaaattatcaaaatcaacttactttttttttttttttagagggaatcttgttctgttgcccaggctggagttgcagtgagccgtgatcgcgccattgcactgcagcctgggcgacagagcaaaaactctgtctcggaaa

SEQ ID NO: 436743 - DNA, 1768 bp, Homo sapiens
gcctcaagaggcggatattaacctcccaggacggaagttccggagccttcaaactctcggggaagcaactcggcagcggaccaagatggcggcgccctgtgagggacaagcgtttgccgtaggggttgaaaagaattggggtgcagtagttcgctccccagaagggaccccccagaaaatccggcagctgatagatgaggggattgccccggaagagggaggcgtggacgcgaaggacacgtctgccacatcccagtcagttaatggatcaccccaagcggaacaaccttcattggaatctacaagcaaagaagccttctttagcagagtggaaacattttcttctttgaaatgggcaggtaagccctttgagctgtctccactcgtctgtgcaaaatatggctgggtcacagtggaatgtgatatgctcaagtgctctagctgtcaagcttttctctgtgccagtttacaaccagcttttgactttgacagatataagcaacgatgtgctgagctgaagaaagccttgtgtactgcccatgagaagttctgtttctggccagacagcccatccccagaccgatttgggatgttgcccctggatgagcctgctattcttgttagtgaattcctagatcgttttcaaagcctttgtcacttggacctccagcttccttccctaaggccggaggacttgaaaactatgtgcttgacagaagacaagatcagtcttctcctacacttgcttgaagatgaacttgatcaccgaactgatgagagaaaaactacaatcaaattaggctcagacatccaagtccacgtcactgcctgtattctctctgtgtgtggctgggcgtgtagttcctctttggaatccatgcagctctccctgatagcatgttcgcaatgtatgaggaaggtggggctctggggcttccagcagattgaatcgtccatgactgacctggatgcatcctttggcctgaccagctccccaatcccaggccttgaggggcgaccagagcgcttacctctggtgcctgaatctcctcggaggatgatgacccggagccaggatgccactttctccccaggctcagagcaggacacatcttcccgaagcttctttgatcccacctctcagcatagagactggtgcccttgggtgaatatcacacttggcaaagaaagcagggagaatggtggaactgaaccagatgccagcgccccagcagagccaggctggaaagcagtgctgaccatcctcttggcgcacaaacagtctagccagccagctgaaacggactccatgagtctctctgagaaatcaaggaaagtattccgaatatttcggcagtgggaatctctgtgctcatgctgaagatactccagcgccttcctggagatagctggaatgagagtgactttttgaaaaattaaggctgagttcctttcggtcagctgacactaagtttttcctgttctgggttaatcataaggagccccctgccatagcaaaggcagtgagtgtcaactatctgcatctggctgagagagacccgtttcctttcagggatgtggacagggtaagggcagcaagcatggttctgttaaaggagtgtggggttaacagactagaaggaagactaaggacctgaccacccatttcagcatcttcaatgtggagcagtgttctgaggactcttctatcctaggactatgacagtgtgtattaataaaatatttgctaagattctcaaaaaaagaa

SEQ ID NO: 436744 - DNA, 1737 bp, Homo sapiens
gcctcaagaggcggatattaacctcccaggacggaagttccggagccttcaaactctcggggaagcaactcggcagcggaccaagatggcggcgccctgtgagggacaagcgtttgccgtaggggttgaaaagaattggggtgcagtagttcgctccccagaagggaccccccagaaaatccggcagctgatagatgaggggattgccccggaagagggaggcgtggacgcgaaggacacgtctgccacatcccagtcagttaatggatcaccccaagcggaacaaccttcattggaatctacaagcaaagaagccttctttagcagagtggaaacattttcttctttgaaatgggcaggtaagccctttgagctgtctccactcgtctgtgcaaaatatggctgggtcacagtggaatgtgatatgctcaagtgctctagctgtcaagcttttctctgtgccagtttacaaccagcttttgactttgacagatataagcaacgatgtgctgagctgaagaaagccttgtgtactgcccatgagaagttctgtttctggccagacagcccatccccagaccgatttgggatgttgcccctggatgagcctgctattcttgttagtgaattcctagatcgttttcaaagcctttgtcacttggacctccagcttccttccctaaggccggaggacttgaaaactatgtgcttgacagaagacaagatcagtcttctcctacacttgcttgaagatgaacttgatcaccgaactgatgagagaaaaactacaatcaaattaggctcagacatccaagtccacgtcactgcctgtattctctctgtgtgtggctgggcgtgtaggctgaaaagagccctggtcccattgtctctcgaactcggagctgggactcttccagtcctgttgaccgtcctgagccagaggctgctagccccaccaccagaactcgcccagtgacccgaagcatgggaacaggagacacccctggcctggaggtaccatctagccctctgcggaaagccaagcgagctcgcctctgctcctccagcagttcggacacatcttcccgaagcttctttgatcccacctctcagcatagagactggtgcccttgggtgaatatcacacttggcaaagaaagcagggagaatggtggaactgaaccagatgccagcgccccagcagagccaggctggaaagcagtgctgaccatcctcttggcgcacaaacagtctagccagccagctgaaacggactccatgagtctctctgagaaatcaaggaaagtattccgaatatttcggcagtgggaatctctgtgctcatgctgaagatactccagcgccttcctggagatagctggaatgagagtgactttttgaaaaattaaggctgagttcctttcggtcagctgacactaagtttttcctgttctgggttaatcataaggagccccctgccatagcaaaggcagtgagtgtcaactatctgcatctggctgagagagacccgtttcctttcagggatgtggacagggtaagggcagcaagcatggttctgttaaaggagtgtggggttaacagactagaaggaagactaaggacctgaccacccatttcagcatcttcaatgtggagcagtgttctgaggactcttctatcctaggactatgacagtgtgtattaataaaatatttgctaagattctcaaaaaaagaa

SEQ ID NO: 436745 - DNA, 1889 bp, Homo sapiens
gcctcaagaggcggatattaacctcccaggacggaagttccggagccttcaaactctcggggaagcaactcggcagcggaccaagatggcggcgccctgtgagggacaagcgtttgccgtaggggttgaaaagaattggggtgcagtagttcgctccccagaagggaccccccagaaaatccggcagctgatagatgaggggattgccccggaagagggaggcgtggacgcgaaggacacgtctgccacatcccagtcagttaatggatcaccccaagcggaacaaccttcattggaatctacaagcaaagaagccttctttagcagagtggaaacattttctatatccttttttagttcatgtgaattgcactttctgcctgcttctagaattcctccaagataagcaacgatgtgctgagctgaagaaagccttgtgtactgcccatgagaagttctgtttctggccagacagcccatccccagaccgatttgggatgttgcccctggatgagcctgctattcttgttagtgaattcctagatcgttttcaaagcctttgtcacttggacctccagcttccttccctaaggccggaggacttgaaaactatgtgcttgacagaagacaagatcagtcttctcctacacttgcttgaagatgaacttgatcaccgaactgatgagagaaaaactacaatcaaattaggctcagacatccaagtccacgtcactgcctgtattctctctgtgtgtggctgggcgtgtagttcctctttggaatccatgcagctctccctgatagcatgttcgcaatgtatgaggaaggtggggctctggggcttccagcagattgaatcgtccatgactgacctggatgcatcctttggcctgaccagctccccaatcccaggccttgaggggcgaccagagcgcttacctctggtgcctgaatctcctcggaggatgatgacccggagccaggatgccactttctccccaggctcagagcaggctgaaaagagccctggtcccattgtctctcgaactcggagctgggactcttccagtcctgttgaccgtcctgagccagaggctgctagccccaccaccagaactcgcccagtgacccgaagcatgggaacaggagacacccctggcctggaggtaccatctagccctctgcggaaagccaagcgagctcgcctctgctcctccagcagttcggacacatcttcccgaagcttctttgatcccacctctcagcatagagactggtgcccttgggtgaatatcacacttggcaaagaaagcagggagaatggtggaactgaaccagatgccagcgccccagcagagccaggctggaaagcagtgctgaccatcctcttggcgcacaaacagtctagccagccagctgaaacggactccatgagtctctctgagaaatcaaggaaagtattccgaatatttcggcagtgggaatctctgtgctcatgctgaagatactccagcgccttcctggagatagctggaatgagagtgactttttgaaaaattaaggctgagttcctttcggtcagctgacactaagtttttcctgttctgggttaatcataaggagccccctgccatagcaaaggcagtgagtgtcaactatctgcatctggctgagagagacccgtttcctttcagggatgtggacagggtaagggcagcaagcatggttctgttaaaggagtgtggggttaacagactagaaggaagactaaggacctgaccacccatttcagcatcttcaatgtggagcagtgttctgaggactcttctatcctaggactatgacagtgtgtattaataaaatatttgctaagattctcaaaaaaagaa

SEQ ID NO: 436746 - DNA, 1566 bp, Homo sapiens
ctctgctcttagaggccattcattggattttgaatctatatagtgttttttaaggtgttgctgtttatgtggatttcagataagcaacgatgtgctgagctgaagaaagccttgtgtactgcccatgagaagttctgtttctggccagacagcccatccccagaccgatttgggatgttgcccctggatgagcctgctattcttgttagtgaattcctagatcgttttcaaagcctttgtcacttggacctccagcttccttccctaaggccggaggacttgaaaactatgtgcttgacagaagacaagatcagtcttctcctacacttgcttgaagatgaacttgatcaccgaactgatgagagaaaaactacaatcaaattaggctcagacatccaagtccacgtcactgcctgtattctctctgtgtgtggctgggcgtgtagttcctctttggaatccatgcagctctccctgatagcatgttcgcaatgtatgaggaaggtggggctctggggcttccagcagattgaatcgtccatgactgacctggatgcatcctttggcctgaccagctccccaatcccaggccttgaggggcgaccagagcgcttacctctggtgcctgaatctcctcggaggatgatgacccggagccaggatgccactttctccccaggctcagagcaggctgaaaagagccctggtcccattgtctctcgaactcggagctgggactcttccagtcctgttgaccgtcctgagccagaggctgctagccccaccaccagaactcgcccagtgacccgaagcatgggaacaggagacacccctggcctggaggtaccatctagccctctgcggaaagccaagcgagctcgcctctgctcctccagcagttcggacacatcttcccgaagcttctttgatcccacctctcagcatagagactggtgcccttgggtgaatatcacacttggcaaagaaagcagggagaatggtggaactgaaccagatgccagcgccccagcagagccaggctggaaagcagtgctgaccatcctcttggcgcacaaacagtctagccagccagctgaaacggactccatgagtctctctgagaaatcaaggaaagtattccgaatatttcggcagtgggaatctctgtgctcatgctgaagatactccagcgccttcctggagatagctggaatgagagtgactttttgaaaaattaaggctgagttcctttcggtcagctgacactaagtttttcctgttctgggttaatcataaggagccccctgccatagcaaaggcagtgagtgtcaactatctgcatctggctgagagagacccgtttcctttcagggatgtggacagggtaagggcagcaagcatggttctgttaaaggagtgtggggttaacagactagaaggaagactaaggacctgaccacccatttcagcatcttcaatgtggagcagtgttctgaggactcttctatcctaggactatgacagtgtgtattaataaaatatttgctaagattctcaaaaaaagaa

SEQ ID NO: 436747 - DNA, 1110 bp, Homo sapiens
gcctcaagaggcggatattaacctcccaggacggaagttccggagccttcaaactctcggggaagcaactcggcagcggaccaagatggcggcgccctgtgagggacaagcgtttgccgtaggggttgaaaagaattggggtgcagtagttcgctccccagaagggaccccccagaaaatccggcagctgatagatgaggggattgccccggaagagggaggcgtggacgcgaaggacacgtctgccacatcccagtcagttaatggatcaccccaagcggaacaaccttcattggaatctacaagcaaagaagccttctttagcagagtggaaacattttcttctttgaaatgggcaggtaagccctttgagctgtctccactcgtctgtgcaaaatatggctgggtcacagtggaatgtgatatgctcaagtgctctagctgtcaagcttttctctgtgccagtttacaaccagcttttgactttgacagatataagcaacgatgtgctgagctgaagaaagccttgtgtactgcccatgagaagttctgtttctggccagacagcccatccccagaccgatttgggatgttgcccctggatgagcctgctattcttgttagtgaattcctagatcgttttcaaagcctttgtcacttggacctccagcttccttccctaaggccggaggacttgaaaactatgtgcttgacagaagacaagatcagtcttctcctacacttgcttgaagatgaacttgatcaccgaactgatgagagaaaaactacaatcaaattaggctcagacatccaagtccacgtcactgcctgtattctctctgtgtgtggctgggcgtgtaggtgagtcagcagattttgcctggagacatgaaccatgacaacagcattacacccatatatatcagtcactaatcgtatttagaaatcacatggtgtttcccgtgagaaaaagagacaaagaaaaactgggtgggggatggtgcgaggagaatggataataagaattagtaacaaaaccagaattggaattcaggaattcttggtgttcacaactgaactttgtttcttgtactgttgcttcttaactgg

SEQ ID NO: 436748 - DNA, 1053 bp, Homo sapiens
gcctcaagaggcggatattaacctcccaggacggaagttccggagccttcaaactctcggggaagcaactcggcagcggaccaagatggcggcgccctgtgagggacaagcgtttgccgtaggggttgaaaagaattggggtgcagtagttcgctccccagaagggaccccccagaaaatccggcagctgatagatgaggggattgccccggaagagggaggcgtggacgcgaaggacacgtctgccacatcccagtcagttaatggatcaccccaagcggaacaaccttcattggaatctacaagcaaagaagccttctttagcagagtggaaacattttcttctttgaaatgggcaggtaagccctttgagctgtctccactcgtctgtgcaaaatatggctgggtcacagtggaatgtgatatgctcaagtgctctagctgtcaagcttttctctgtgccagtttacaaccagcttttgactttgacagatataagcaacgatgtgctgagctgaagaaagccttgtgtactgcccatgagaagttctgtttctggccagacagcccatccccaggtacctggaactcaatgtgtataaaactgaactcttcatcttatacctaaaactttctccatcttggcaaatggcactgacgtcccatccagttgtcctagccagaaacctgaaagtcactttagatgctcttctctatggtcacccactttgacctatccattctacctcctacatggatcttagatataacctttcaattatatgatcccttggtttggttctttaacattcaaaggacatttgtgtggataaaagaacactcagttatttcactttatgcttaaatttattaagcaaaactaataattttgaaggtaatttttttctaacatttgccaataattataagctaaattaaatttctttaaacattttattttattttattttattttttattttgagatggagtctcactctgtcgccattgcactgcagcctgggcgacagagcaaaaactctgtctcggaaa

SEQ ID NO: 436749 - DNA, 1981 bp, Homo sapiens
gcctcaagaggcggatattaacctcccaggacggaagttccggagccttcaaactctcggggaagcaactcggcagcggaccaagatggcggcgccctgtgagggacaagcgtttgccgtaggggttgaaaagaattggggtgcagtagttcgctccccagaagggaccccccagaaaatccggcagctgatagatgaggggattgccccggaagagggaggcgtggacgcgaaggacacgtctgccacatcccagtcagttaatggatcaccccaagcggaacaaccttcattggaatctacaagcaaagaagccttctttagcagagtggaaacattttcttctttgaaatgggcaggtaagccctttgagctgtctccactcgtctgtgcaaaatatggctgggtcacagtggaatgtgatatgctcaagtgctctagctgtcaagcttttctctgtgccagtttacaaccagcttttgactttgacagatataagcaacgatgtgctgagctgaagaaagccttgtgtactgcccatgagaagttctgtttctggccagacagcccatccccagaccgatttgggatgttgcccctggatgagcctgctattcttgttagtgaattcctagatcgttttcaaagcctttgtcacttggacctccagcttccttccctaaggccggaggacttgaaaactatgtgcttgacagaagacaagatcagtcttctcctacacttgcttgaagatgaacttgatcaccgaactgatgagagaaaaactacaatcaaattaggctcagacatccaagtccacgtcactgcctgtattctctctgtgtgtggctgggcgtgtagttcctctttggaatccatgcagctctccctgatagcatgttcgcaatgtatgaggaaggtggggctctggggcttccagcagattgaatcgtccatgactgacctggatgcatcctttggcctgaccagctccccaatcccaggccttgaggggcgaccagagcgcttacctctggtgcctgaatctcctcggaggatgatgacccggagccaggatgccactttctccccaggctcagagcaggctgaaaagagccctggtcccattgtctctcgaactcggagctgggactcttccagtcctgttgaccgtcctgagccagaggctgctagccccaccaccagaactcgcccagtgacccgaagcatgggaacaggagacacccctggcctggaggtaccatctagccctctgcggaaagccaagcgagctcgcctctgctcctccagcagttcggacacatcttcccgaagcttctttgatcccacctctcagcatagagactggtgcccttgggtgaatatcacacttggcaaagaaagcagggagaatggtggaactgaaccagatgccagcgccccagcagagccaggctggaaagcagtgctgaccatcctcttggcgcacaaacagtctagccagccagctgaaacggactccatgagtctctctgagaaatcaaggaaagtattccgaatatttcggcagtgggaatctctgtgctcatgctgaagatactccagcgccttcctggagatagctggaatgagagtgactttttgaaaaattaaggctgagttcctttcggtcagctgacactaagtttttcctgttctgggttaatcataaggagccccctgccatagcaaaggcagtgagtgtcaactatctgcatctggctgagagagacccgtttcctttcagggatgtggacagggtaagggcagcaagcatggttctgttaaaggagtgtggggttaacagactagaaggaagactaaggacctgaccacccatttcagcatcttcaatgtggagcagtgttctgaggactcttctatcctaggactatgacagtgtgtattaataaaatatttgctaagattctcaaaaaaagaa

SEQ ID NO: 436750 - DNA, 2027 bp, Homo sapiens
gcctcaagaggcggatattaacctcccaggacggaagttccggagccttcaaactctcggggaagcaactcggcagcggaccaagatggcggcgccctgtgagggacaagcgtttgccgtaggggttgaaaagaattggggtgcagtagttcgctccccagaagggaccccccagaaaatccggcagctgatagatgaggggattgccccggaagagggaggcgtggacgcaaccacacccgcttgaggctctctatgaatctctgagagtcttagagaaggacacgtctgccacatcccagtcagttaatggatcaccccaagcggaacaaccttcattggaatctacaagcaaagaagccttctttagcagagtggaaacattttcttctttgaaatgggcaggtaagccctttgagctgtctccactcgtctgtgcaaaatatggctgggtcacagtggaatgtgatatgctcaagtgctctagctgtcaagcttttctctgtgccagtttacaaccagcttttgactttgacagatataagcaacgatgtgctgagctgaagaaagccttgtgtactgcccatgagaagttctgtttctggccagacagcccatccccagaccgatttgggatgttgcccctggatgagcctgctattcttgttagtgaattcctagatcgttttcaaagcctttgtcacttggacctccagcttccttccctaaggccggaggacttgaaaactatgtgcttgacagaagacaagatcagtcttctcctacacttgcttgaagatgaacttgatcaccgaactgatgagagaaaaactacaatcaaattaggctcagacatccaagtccacgtcactgcctgtattctctctgtgtgtggctgggcgtgtagttcctctttggaatccatgcagctctccctgatagcatgttcgcaatgtatgaggaaggtggggctctggggcttccagcagattgaatcgtccatgactgacctggatgcatcctttggcctgaccagctccccaatcccaggccttgaggggcgaccagagcgcttacctctggtgcctgaatctcctcggaggatgatgacccggagccaggatgccactttctccccaggctcagagcaggctgaaaagagccctggtcccattgtctctcgaactcggagctgggactcttccagtcctgttgaccgtcctgagccagaggctgctagccccaccaccagaactcgcccagtgacccgaagcatgggaacaggagacacccctggcctggaggtaccatctagccctctgcggaaagccaagcgagctcgcctctgctcctccagcagttcggacacatcttcccgaagcttctttgatcccacctctcagcatagagactggtgcccttgggtgaatatcacacttggcaaagaaagcagggagaatggtggaactgaaccagatgccagcgccccagcagagccaggctggaaagcagtgctgaccatcctcttggcgcacaaacagtctagccagccagctgaaacggactccatgagtctctctgagaaatcaaggaaagtattccgaatatttcggcagtgggaatctctgtgctcatgctgaagatactccagcgccttcctggagatagctggaatgagagtgactttttgaaaaattaaggctgagttcctttcggtcagctgacactaagtttttcctgttctgggttaatcataaggagccccctgccatagcaaaggcagtgagtgtcaactatctgcatctggctgagagagacccgtttcctttcagggatgtggacagggtaagggcagcaagcatggttctgttaaaggagtgtggggttaacagactagaaggaagactaaggacctgaccacccatttcagcatcttcaatgtggagcagtgttctgaggactcttctatcctaggactatgacagtgtgtattaataaaatatttgctaagattctcaaaaaaagaa

SEQ ID NO: 436751 - DNA, 1718 bp, Homo sapiens
gcctcaagaggcggatattaacctcccaggacggaagttccggagccttcaaactctcggggaagcaactcggcagcggaccaagatggcggcgccctgtgagggacaagcgtttgccgtaggggttgaaaagaattggggtgcagtagttcgctccccagaagggaccccccagaaaatccggcagctgatagatgaggggattgccccggaagagggaggcgtggacgcataagcaacgatgtgctgagctgaagaaagccttgtgtactgcccatgagaagttctgtttctggccagacagcccatccccagaccgatttgggatgttgcccctggatgagcctgctattcttgttagtgaattcctagatcgttttcaaagcctttgtcacttggacctccagcttccttccctaaggccggaggacttgaaaactatgtgcttgacagaagacaagatcagtcttctcctacacttgcttgaagatgaacttgatcaccgaactgatgagagaaaaactacaatcaaattaggctcagacatccaagtccacgtcactgcctgtattctctctgtgtgtggctgggcgtgtagttcctctttggaatccatgcagctctccctgatagcatgttcgcaatgtatgaggaaggtggggctctggggcttccagcagattgaatcgtccatgactgacctggatgcatcctttggcctgaccagctccccaatcccaggccttgaggggcgaccagagcgcttacctctggtgcctgaatctcctcggaggatgatgacccggagccaggatgccactttctccccaggctcagagcaggctgaaaagagccctggtcccattgtctctcgaactcggagctgggactcttccagtcctgttgaccgtcctgagccagaggctgctagccccaccaccagaactcgcccagtgacccgaagcatgggaacaggagacacccctggcctggaggtaccatctagccctctgcggaaagccaagcgagctcgcctctgctcctccagcagttcggacacatcttcccgaagcttctttgatcccacctctcagcatagagactggtgcccttgggtgaatatcacacttggcaaagaaagcagggagaatggtggaactgaaccagatgccagcgccccagcagagccaggctggaaagcagtgctgaccatcctcttggcgcacaaacagtctagccagccagctgaaacggactccatgagtctctctgagaaatcaaggaaagtattccgaatatttcggcagtgggaatctctgtgctcatgctgaagatactccagcgccttcctggagatagctggaatgagagtgactttttgaaaaattaaggctgagttcctttcggtcagctgacactaagtttttcctgttctgggttaatcataaggagccccctgccatagcaaaggcagtgagtgtcaactatctgcatctggctgagagagacccgtttcctttcagggatgtggacagggtaagggcagcaagcatggttctgttaaaggagtgtggggttaacagactagaaggaagactaaggacctgaccacccatttcagcatcttcaatgtggagcagtgttctgaggactcttctatcctaggactatgacagtgtgtattaataaaatatttgctaagattctcaaaaaaagaa

SEQ ID NO: 436752 - DNA, 2035 bp, Homo sapiens
gcctcaagaggcggatattaacctcccaggacggaagttccggagccttcaaactctcggggaagcaactcggcagcggaccaagatggcggcgccctgtgagggacaagcgtttgccgtaggggttgaaaagaattggggtgcagtagttcgctccccagaagggaccccccagaaaatccggcagctgatagatgaggggattgccccggaagagggaggcgtggacgcataagcaacgatgtgctgagctgaagaaagccttgtgtactgcccatgagaagttctgtttctggccagacagcccatccccaggtacctggaactcaatgtgtataaaactgaactcttcatcttatacctaaaactttctccatcttggcaaatggcactgacgtcccatccagttgtcctagccagaaacctgaaagtcactttagatgctcttctctatggtcacccactttgacctatccattctacctcctacatggatcttagatataacctttcaattatatgatcccttggtttggttctttaacattcaaaggacatttgtgtggataaaagaacactcagttatttcactttatgcttaaatttattaagcaaaactaataattttgaagaccgatttgggatgttgcccctggatgagcctgctattcttgttagtgaattcctagatcgttttcaaagcctttgtcacttggacctccagcttccttccctaaggccggaggacttgaaaactatgtgcttgacagaagacaagatcagtcttctcctacacttgcttgaagatgaacttgatcaccgaactgatgagagaaaaactacaatcaaattaggctcagacatccaagtccacgtcactgcctgtattctctctgtgtgtggctgggcgtgtagttcctctttggaatccatgcagctctccctgatagcatgttcgcaatgtatgaggaaggtggggctctggggcttccagcagattgaatcgtccatgactgacctggatgcatcctttggcctgaccagctccccaatcccaggccttgaggggcgaccagagcgcttacctctggtgcctgaatctcctcggaggatgatgacccggagccaggatgccactttctccccaggctcagagcaggctgaaaagagccctggtcccattgtctctcgaactcggagctgggactcttccagtcctgttgaccgtcctgagccagaggctgctagccccaccaccagaactcgcccagtgacccgaagcatgggaacaggagacacccctggcctggaggtaccatctagccctctgcggaaagccaagcgagctcgcctctgctcctccagcagttcggacacatcttcccgaagcttctttgatcccacctctcagcatagagactggtgcccttgggtgaatatcacacttggcaaagaaagcagggagaatggtggaactgaaccagatgccagcgccccagcagagccaggctggaaagcagtgctgaccatcctcttggcgcacaaacagtctagccagccagctgaaacggactccatgagtctctctgagaaatcaaggaaagtattccgaatatttcggcagtgggaatctctgtgctcatgctgaagatactccagcgccttcctggagatagctggaatgagagtgactttttgaaaaattaaggctgagttcctttcggtcagctgacactaagtttttcctgttctgggttaatcataaggagccccctgccatagcaaaggcagtgagtgtcaactatctgcatctggctgagagagacccgtttcctttcagggatgtggacagggtaagggcagcaagcatggttctgttaaaggagtgtggggttaacagactagaaggaagactaaggacctgaccacccatttcagcatcttcaatgtggagcagtgttctgaggactcttctatcctaggactatgacagtgtgtattaataaaatatttgctaagattctcaaaaaaagaa

SEQ ID NO: 436753 - DNA, 883 bp, Homo sapiens
gcctcaagaggcggatattaacctcccaggacggaagttccggagccttcaaactctcggggaagcaactcggcagcggaccaagatggcggcgccctgtgagggacaagcgtttgccgtaggggttgaaaagaattggggtgcagtagttcgctccccagaagggaccccccagaaaatccggcagctgatagatgaggggattgccccggaagagggaggcgtggacgcgaaggacacgtctgccacatcccagtcagttaatggatcaccccaagcggaacaaccttcattggaatctacaagcaaagaagccttctttagcagagtggaaacattttcttctttgaaatgggcaggtaagccctttgagctgtctccactcgtctgtgcaaaatatggctgggtcacagtggaatgtgatatgctcaagtgctctagctgtcaagcttttctctgtgccagtttacaaccagcttttgactttgacagatataagcaacgatgtgctgagctgaagaaagccttgtgtactgcccatgagaagttctgtttctggccagacagcccatccccagatggagtttcactcttgttgcccaggctggagtacagtggcgcgatcttggctcactgcaaccttcgcctcccgcgttcaagcaattctcctgcctcagcctccagagttgctaggattacaggcgtgcgccaccacgcccagctaattttgtatttttagtagagatggggtttcaccatgttggtcaatctggtctcgaactcttgacctcagatgatccgcccgtctcggcctcccaaagtgctgggattgggattacaggggtgatccactgtgcccggcctctttttctccttttctatt

SEQ ID NO: 436754 - DNA, 770 bp, Homo sapiens
gcctcaagaggcggatattaacctcccaggacggaagttccggagccttcaaactctcggggaagcaactcggcagcggaccaagatggcggcgccctgtgagggacaagcgtttgccgtaggggttgaaaagaattggggtgcagtagttcgctccccagaagggaccccccagaaaatccggcagctgatagatgaggggattgccccggaagagggaggcgtggacgcaaccacacccgcttgaggctctctatgaatctctgagagtcttagagaaggacacgtctgccacatcccagtcagttaatggatcaccccaagcggaacaaccttcattggaatctacaagcaaagaagccttctttagcagagtggaaacattttcttctttgaaatgggcaggtaagccctttgagctgtctccactcgtctgtgcaaaatatggctgggtcacagtggaatgtgatatgctcaagtgctctagctgtcaagcttttctctgtgccagtttacaaccagcttttgactttgacagatataagcaacgatgtgctgagctgaagaaagccttgtgtactgcccatgagaagttctgtttctggccagacagcccatccccagaccgatttgggatgttgcccctggatgagcctgctattcttgttagtgaattcctagatcgttttcaaagcctttgtcacttggacctccagcttccttccctaaggccggaggacttgaaaactatggtgagtttttcctgacta

SEQ ID NO: 436755 - DNA, 1547 bp, Homo sapiens
gggcttgatttaacattgtttttgtgttatttttgcttgaaacaacgcacacattttcaacaaccaaaaaatgacaatttctagtttagttaatttctacaaatcatcttatgttattagcaaggttaagacatcttttttaaaaaaattatagcttctaccaagagaaacactcaatttttctagagatttgcctctatcttcctttcctcagtcttcccagactgctatcaagctgtgtaaaaatttactttcactggaccctaaattattgtctctgctatctgactgccagtaattagtgcagaaaactaagacaggatgatacaggtttgaggggctggggagtgggaggggggagaaaaggaatgtatttaaacaatttccgatgcccatgatgagtttaaaaaccagcattgacaccatccccaaaattaaggctgtcgcttattgaatccacttgtgtccaacctcccaggattgttttatcctaatgtcacctgtatattcatttgaaaggacttggccctgttcttgggtcttcccgttacctgccccctgggtggtaagtttcctcctttctcaaccttccacgaggaggaaagaagtgtgcagtcattccacatggcctgttggaaggcctggggagggaactttgggtttgggacagatttttttttgtttttggtatcattcacagcatacgatttttactctctccatcttcaccataagacagataatttggggttgctataatgctgtcacacatctcaaagtacattcaaatcttaaaaagaaattctcgtacttttgccatgttgatactgttcagcaaacaagctaccaggaactgtgaggctttgtcatttagcattagactttaaacaagaattaaaatcatgtgctgtatttttaaaatctagccaaattaaatagtacatgagaaattcagagtattagacagttttaaggcattcaactgagaaaactttatttgtcaaagtcagaaaacattttcatcttattgagagatatgtttttaaacttttatcatcatttgtaaatgtggaagttggtggattgctgtgtttttgcatgattagcatgggagtctgttggagcaagaggaacatgcttgttttgaaaactcgagatgatgagggtggtacatgcagtgtgttctctctttattggcttctaaaccagttttgtcctttaatgcatgtcaaatatttctcccatgcttctcttagcagaaaagtttttacctataagacagggcaccttttaactctaaaactagtgatactcagtgacatagactttgtcttataaacattttttcattttttattttgaaaaattgcaaatctacagcaaaagtaaaacagtagagtgaacaccatgtaaccctcacctggtgttaacattgtaccctatttgctttaagttgtatgtatttctgaacttggcaaaattggaaattaaaatttttaaaaattacaaatatacaaagttatttatcttagcacatttaaaaaaaa

SEQ ID NO: 436756 - DNA, 2270 bp, Homo sapiens
  misc_feature (1712)..(1712): n is a, c, g, or t
ggtacaggcagcaaacaatatttaagatgctgacttgtggagcattcgggcttggaaggaaagctataggctacccattcagctcccctgtcagagactcaagctttgagaaaggctagcaaagagcaaggaaagagagaaaacaacaaagtggcgaggccctcagagtgaaagcgtaaggttcagtcagcctgctgcagctttgcagacctcagctgggcatctccagactcccctgaaggaagagccttcctcacccaaacccacaaaagatgctgaaaaagcctctctcagctgtgacctggctctgcattttcatcgtggcctttgtcagccacccagcgtggctgcagaagctctctaagcacaagacaccagcacagccacagctcaaagcggccaactgctgtgaggaggtgaaggagctcaaggcccaagttgccaaccttagcagcctgctgagtgaactgaacaagaagcaggagagggactgggtcagcgtggtcatgcaggtgatggagctggagagcaacagcaagcgcatggagtcgcggctcacagatgctgagagcaagtactccgagatgaacaaccaaattgacatcatgcagctgcaggcagcacagacggtcactcagacctccgcagatgccatctacgactgctcttccctctaccagaagaactaccgcatctctggagtgtataagcttcctcctgatgacttcctgggcagccctgaactggaggtgttctgtgacatggagacttcaggcggaggctggaccatcatccagagacgaaaaagtggccttgtctccttctaccgggactggaagcagtacaagcagggctttggcagcatccgtggggacttctggctggggaacgaacacatccaccggctctccagacagccaacccggctgcgtgtagagatggaggactgggagggcaacctgcgctacgctgagtatagccactttgttttgggcaatgaactcaacagctatcgcctcttcctggggaactacactggcaatgtggggaacgacgccctccagtatcataacaacacagccttcagcaccaaggacaaggacaatgacaactgcttggacaagtgtgcacagctccgcaaaggtggctactggtacaactgctgcacagactccaacctcaatggagtgtactaccgcctgggtgagcacaataagcacctggatggcatcacctggtatggctggcatggatctacctactccctcaaacgggtggagatgaaaatccgcccagaagacttcaagccttaaaaggaggctgccgtggagcacggatacagaaactgagacacgtggagactggatgagggcagatgaggacaggaagagagtgttagaaagggtaggactgagaaacagcctataatctccaaagaaagaataagtctccaaggagcacaaaaaaatcatatgtaccaaggatgttacagtaaacaggatgaactatttaaacccactgggtcctgccacatccttctcaaggtggtagactgagtggggtctctctgcccaagatccctgacatagcagtagcttgtcttttccacatgatttgtctgtgaaagaaaataattttgagatcgttttatctattttctctacggcttaggctatgtgagggcaaaacacaaatccctttgctaaaaaganccatattattttgattctcaaaggataggcctttgagtgttagagaaaggagtgaaggaggcaggtgggaaatggtatttctatttttaaatccagtgaaattatcttgagtctacacattatttttaaaacacaaaaattgttcggctggaactgacccaggctggacttgcggggaggaaactccagggcactgcatctggcgatcagactctgagcactgcccctgctcgccttggtcatgtacagcactgaaaggaatgaagcaccagcaggaggtggacagagtctctcatggatgccggcacaaaactgccttaaaatattcatagttaatacaggtatatctatttttatttactttgtaagaaacaagctcaaggagcttccttttaaattttgtctgtaggaaatggttgaaaactgaaggtagatggtgttatagttaataataaatgctgtaaataagcatctcactttgtaaaaataaaatattgtggttttgttttaaacattcaacgtttcttttccttctacaataaacactttcaaaatgtg

SEQ ID NO: 436757 - DNA, 2390 bp, Homo sapiens
  misc_feature (1712)..(1712): n is a, c, g, or t
ggtacaggcagcaaacaatatttaagatgctgacttgtggagcattcgggcttggaaggaaagctataggctacccattcagctcccctgtcagagactcaagctttgagaaaggctagcaaagagcaaggaaagagagaaaacaacaaagtggcgaggccctcagagtgaaagcgtaaggttcagtcagcctgctgcagctttgcagacctcagctgggcatctccagactcccctgaaggaagagccttcctcacccaaacccacaaaagatgctgaaaaagcctctctcagctgtgacctggctctgcattttcatcgtggcctttgtcagccacccagcgtggctgcagaagctctctaagcacaagacaccagcacagccacagctcaaagcggccaactgctgtgaggaggtgaaggagctcaaggcccaagttgccaaccttagcagcctgctgagtgaactgaacaagaagcaggagagggactgggtcagcgtggtcatgcaggtgatggagctggagagcaacagcaagcgcatggagtcgcggctcacagatgctgagagcaagtactccgagatgaacaaccaaattgacatcatgcagctgcaggcagcacagacggtcactcagacctccgcagatgccatctacgactgctcttccctctaccagaagaactaccgcatctctggagtgtataagcttcctcctgatgacttcctgggcagccctgaactggaggtgttctgtgacatggagacttcaggcggaggctggaccatcatccagagacgaaaaagtggccttgtctccttctaccgggactggaagcagtacaagcagggctttggcagcatccgtggggacttctggctggggaacgaacacatccaccggctctccagacagccaacccggctgcgtgtagagatggaggactgggagggcaacctgcgctacgctgagtatagccactttgttttgggcaatgaactcaacagctatcgcctcttcctggggaactacactggcaatgtggggaacgacgccctccagtatcataacaacacagccttcagcaccaaggacaaggacaatgacaactgcttggacaagtgtgcacagctccgcaaaggtggctactggtacaactgctgcacagactccaacctcaatggagtgtactaccgcctgggtgagcacaataagcacctggatggcatcacctggtatggctggcatggatctacctactccctcaaacgggtggagatgaaaatccgcccagaagacttcaagccttaaaaggaggctgccgtggagcacggatacagaaactgagacacgtggagactggatgagggcagatgaggacaggaagagagtgttagaaagggtaggactgagaaacagcctataatctccaaagaaagaataagtctccaaggagcacaaaaaaatcatatgtaccaaggatgttacagtaaacaggatgaactatttaaacccactgggtcctgccacatccttctcaaggtggtagactgagtggggtctctctgcccaagatccctgacatagcagtagcttgtcttttccacatgatttgtctgtgaaagaaaataattttgagatcgttttatctattttctctacggcttaggctatgtgagggcaaaacacaaatccctttgctaaaaaganccatattattttgattctcaaaggataggcctttgagtgttagagaaaggagtgaaggaggcaggtgggaaatggtatttctatttttaaatccagtgaaattatcttgagtctacacattatttttaaaacacaaaaattgttcggctggaactgacccaggctggacttgcggggaggaaactccagggcactgcatctggcgatcagactctgagcactgcccctgctcgccttggtcatgtacagcactgaaaggaatgaagcaccagcaggaggtggacagagtctctcatggatgccggcacaaaactgccttaaaatattcatagttaatacaggtatatctatttttatttactttgtaagaaacaagctcaaggagcttccttttaaattttgtctgtaggaaatggttgaaaactgaaggtagatggtgttatagttaataataaatgctgtaaataagcatctcactttgtaaaaataaaatattgtggttttgttttaaacattcaacgtttcttttccttctacaataaacactttcaaaatgtgagtatcttctttttaaattcttaccatcaccacttacagcaggataaaaagttaaagttaaatcagagggtgagcagtgacagaggcccggggtttgttttggtgttcagggcaaccaag

SEQ ID NO: 436758 - DNA, 356 bp, Homo sapiens
ctcacacatagtaagtgttcagtaagtaggaactgttgttattctcatcatcattatttaatggaattgtagataaaaagtatacatcaggccagcatggtaaccgaggcaggtggatagcttgaggccaggagtttgagacagcctgggcaacatagcaagacctcatctctacaaagaaaattttttttaaattagcaaggcatggtggcacacacctgtattcccagctactcaagaggctgaggaaggaggatcacttgagcccaggtgtttgaggctgcagtgagctatgatcatgccactatactccagcctgagcaacagagcaaggccctgtctctgtttaaaaaaaa

SEQ ID NO: 436759 - DNA, 1030 bp, Homo sapiens
  misc_feature (69)..(69): n is a, c, g, or t
  misc_feature (172)..(172): n is a, c, g, or t
  misc_feature (190)..(190): n is a, c, g, or t
  misc_feature (207)..(208): n is a, c, g, or t
  misc_feature (250)..(250): n is a, c, g, or t
  misc_feature (270)..(270): n is a, c, g, or t
  misc_feature (294)..(294): n is a, c, g, or t
  misc_feature (347)..(347): n is a, c, g, or t
  misc_feature (358)..(358): n is a, c, g, or t
  misc_feature (373)..(373): n is a, c, g, or t
  misc_feature (385)..(385): n is a, c, g, or t
  misc_feature (410)..(410): n is a, c, g, or t
  misc_feature (489)..(489): n is a, c, g, or t
tatttgtcacgcgtttaatctatcgtcaggttgaggcattgcctttacaagccacctccgctctggtcncggtaatatgttcccgtaagggccctcgcctctgggttgcctacagttcacgtcacgaccctcgcctctgggtcaggtataatgttccagtcacgggccatcncctctgggttcgcgtacnggttcacatcacagacnntcgcctcttgggtcgggtgataatggttcacgtcagcggccntcagctcttgggtatgcgtnacggttcaacgtcacgacccctcngctctttgagtcggaaggtggttccatctcagccgccctctgcctcttgggtntgcgtggtttntctgcctcagcctcntgagtagctaanggaggtgtcttgagattatcatcgnctaagggtgaaagcggccccgcagacgctcggcaaggtgtcttgatattatcatctgctgagggtggagctgagggtgnaaggggagtgagctgacgctcggaaggtgtcttgagattatcatccgctgagggtgaaagctcgtgccgaattcggcacgaggaacagtgtgaggagcgaatagaagaggtcaccaaaaaggggaatgaagctgtagcttccagagacctgagtgaaaacaacgaccagagacagcagcatctagctggtgcgctggcacccctggcctcacacagactcccgagtagctgggactacaggcacacagtcactgaagcaggccctgtttgcaattcacgttgccacctccaacttaaacattcttcatatgtgatgtccttagtcactaaggttaaactttcccacccagaaaaggcaacttagataaaatcttagagtactttcatactcttctaagtcctcttccagcctcactttgagtcctccttggggttgataggaattttctcttgctttctcaataaagtctctattcatctcatgtttaatttgtacgcatagaattgctgagaaataaaatgttctgttcaacttaaaaaa

SEQ ID NO: 436760 - DNA, 2970 bp, Homo sapiens
gggggcggggccttgccgctgcggaggccggagacgcggcggcgctggacgcggaggcgctgggcgcacggcgcggagccggccggagctcgaggccggcggcggcgggagagcgacccgggcggcctcgtagcggggccccggatccccgagtggcggccggagcctcgaaaagagattctcagcgctgattttgagatgatgggcttgggaaacgggcgtcgcagcatgaagtcgccgcccctcgtgctggccgccctggtggcctgcatcatcgtcttgggcttcaactactggattgcgagctcccggagcgtggacctccagacacggatcatggagctggaaggcagggtccgcagggcggctgcagagagaggcgccgtggagctgaagaagaacgagttccagggagagctggagaagcagcgggagcagcttgacaaaatccagtccagccacaacttccagctggagagcgtcaacaagctgtaccaggacgaaaaggcggttttggtgaataacatcaccacaggtgagaggctcatccgagtgctgcaagaccagttaaagaccctgcagaggaattacggcaggctgcagcaggatgtcctccagtttcagaagaaccagaccaacctggagaggaagttctcctacgacctgagccagtgcatcaatcagatgaaggaggtgaaggaacagtgtgaggagcgaatagaagaggtcaccaaaaaggggaatgaagctgtagcttccagagacctgagtgaaaacaacgaccagagacagcagctccaagccctcagtgagcctcagcccaggctgcaggcagcaggcctgccacacacagaggtgccacaagggaagggaaacgtgcttggtaacagcaagtcccagacaccagcccccagttccgaagtggttttggattcaaagagacaagttgagaaagaggaaaccaatgagatccaggtggtgaatgaggagcctcagagctgccctgtcagtgagccaggaaaatccagagatggagggccctgagcgagaccagcttgtcatccccgacggacaggaggaggagcaggaagctgccggggaagggagaaaccagcagaaactgagaggagaagatgactacaacatggatgaaaatgaagcagaatctgagacagacaagcaagcagccctggcagggaatgacagaaacatagatgtttttaatgttgaagatcagaaaagagacaccataaatttacttgatcagcgtgaaaagcggaatcatacactctgaattgaactggaatcacatatttcacaacagggccgaagagatgactataaaatgttcatgagggactgaatactgaaaactgtgaaatgtactaaataaaatgtacatctgaagatgattattgtgaaattttagtatgcactttgtgtaggaaaaaatggaatggtcttttaaacagcttttggggggtactttggaagtgtctaataaggtgtcacaatttttggtagtaggtatttcgtgagaagttcaacaccaaaactggaacatagttctccttcaagtgttggcgacagcggggcttcctgattctggaatataactttgtgtaaattaacagccacctatagaagagtccatctgctgtgaaggagagacagagaactctgggttccgtcgtcctgtccacgtgctgtaccaagtgctggtgccagcctgttacctgttctcactgaaaagtctggctaatgctcttgtgtagtcacttctgattctgacaatcaatcaatcaatggcctagagcactgactgttaacacaaacgtcactagcaaagtagcaacagctttaagtctaaatacaaagctgttctgtgtgagaattttttaaaaggctacttgtataataacccttgtcatttttaatgtacaaaacgctattaagtggcttagaatttgaacatttgtggtctttatttactttgcttcgtgtgtgggcaaagcaacatcttccctaaatatatattaccaagaaaagcaagaagcagattaggtttttgacaaaacaaacaggccaaaagggggctgacctggagcagagcatggtgagaggcaaggcatgagagggcaagtttgttgtggacagatctgtgcctactttattactggagtaaaagaaaacaaagttcattgatgtcgaaggatatatacagtgttagaaattaggactgtttagaaaaacaggaatacaatggttgtttttatcatagtgtacacatttagcttgtggtaaatgactcacaaaactgattttaaaatcaagttaatgtgaattttgaaaattactacttaatcctaattcacaataacaatggcattaaggtttgacttgagttggttcttagtattatttatggtaaataggctcttaccacttgcaaataactggccacatcattaatgactgacttcccagtaaggctctctaaggggtaagtaggaggatccacaggatttgagatgctaaggccccagagatcgtttgatccaaccctcttattttcagaggggaaaatggggcctagaagttacagagcatctagctggtgcgctggcacccctggcctcacacagactcccgagtagctgggactacaggcacacagtcactgaagcaggccctgtttgcaattcacgttgccacctccaacttaaacattcttcatatgtgatgtccttagtcactaaggttaaactttcccacccagaaaaggcaacttagataaaatcttagagtactttcatactcttctaagtcctcttccagcctcactttgagtcctccttggggttgataggaattttctcttgctttctcaataaagtctctattcatctcatgtttaatttgtacgcatagaattgctgagaaataaaatgttctgttcaacttaaaaaa

SEQ ID NO: 436761 - DNA, 3132 bp, Homo sapiens
gggggcggggccttgccgctgcggaggccggagacgcggcggcgctggacgcggaggcgctgggcgcacggcgcggagccggccggagctcgaggccggcggcggcgggagagcgacccgggcggcctcgtagcggggccccggatccccgagtggcggccggagcctcgaaaagagattctcagcgctgattttgagatgatgggcttgggaaacgggcgtcgcagcatgaagtcgccgcccctcgtgctggccgccctggtggcctgcatcatcgtcttgggcttcaactactggattgcgagctcccggagcgtggacctccagacacggatcatggagctggaaggcagggtccgcagggcggctgcagagagaggcgccgtggagctgaagaagaacgagttccagggagagctggagaagcagcgggagcagcttgacaaaatccagtccagccacaacttccagctggagagcgtcaacaagctgtaccaggacgaaaaggcggttttggtgaataacatcaccacaggtgagaggctcatccgagtgctgcaagaccagttaaagaccctgcagaggaattacggcaggctgcagcaggatgtcctccagtttcagaagaaccagaccaacctggagaggaagttctcctacgacctgagccagtgcatcaatcagatgaaggaggtgaaggaacagtgtgaggagcgaatagaagaggtcaccaaaaaggggaatgaagctgtagcttccagagacctgagtgaaaacaacgaccagagacagcagctccaagccctcagtgagcctcagcccaggctgcaggcagcaggcctgccacacacagaggtgccacaagggaagggaaacgtgcttggtaacagcaagtcccagacaccagcccccagttccgaagtggttttggattcaaagagacaagttgagaaagaggaaaccaatgagatccaggtggtgaatgaggagcctcagagggacaggctgccgcaggagccaggccgggagcaggtggtggaagacagacctgtaggtggaagaggcttcgggggagccggagaactgggccagaccccacaggtgcaggctgccctgtcagtgagccaggaaaatccagagatggagggccctgagcgagaccagcttgtcatccccgacggacaggaggaggagcaggaagctgccggggaagggagaaaccagcagaaactgagaggagaagatgactacaacatggatgaaaatgaagcagaatctgagacagacaagcaagcagccctggcagggaatgacagaaacatagatgtttttaatgttgaagatcagaaaagagacaccataaatttacttgatcagcgtgaaaagcggaatcatacactctgaattgaactggaatcacatatttcacaacagggccgaagagatgactataaaatgttcatgagggactgaatactgaaaactgtgaaatgtactaaataaaatgtacatctgaagatgattattgtgaaattttagtatgcactttgtgtaggaaaaaatggaatggtcttttaaacagcttttggggggtactttggaagtgtctaataaggtgtcacaatttttggtagtaggtatttcgtgagaagttcaacaccaaaactggaacatagttctccttcaagtgttggcgacagcggggcttcctgattctggaatataactttgtgtaaattaacagccacctatagaagagtccatctgctgtgaaggagagacagagaactctgggttccgtcgtcctgtccacgtgctgtaccaagtgctggtgccagcctgttacctgttctcactgaaaagtctggctaatgctcttgtgtagtcacttctgattctgacaatcaatcaatcaatggcctagagcactgactgttaacacaaacgtcactagcaaagtagcaacagctttaagtctaaatacaaagctgttctgtgtgagaattttttaaaaggctacttgtataataacccttgtcatttttaatgtacaaaacgctattaagtggcttagaatttgaacatttgtggtctttatttactttgcttcgtgtgtgggcaaagcaacatcttccctaaatatatattaccaagaaaagcaagaagcagattaggtttttgacaaaacaaacaggccaaaagggggctgacctggagcagagcatggtgagaggcaaggcatgagagggcaagtttgttgtggacagatctgtgcctactttattactggagtaaaagaaaacaaagttcattgatgtcgaaggatatatacagtgttagaaattaggactgtttagaaaaacaggaatacaatggttgtttttatcatagtgtacacatttagcttgtggtaaatgactcacaaaactgattttaaaatcaagttaatgtgaattttgaaaattactacttaatcctaattcacaataacaatggcattaaggtttgacttgagttggttcttagtattatttatggtaaataggctcttaccacttgcaaataactggccacatcattaatgactgacttcccagtaaggctctctaaggggtaagtaggaggatccacaggatttgagatgctaaggccccagagatcgtttgatccaaccctcttattttcagaggggaaaatggggcctagaagttacagagcatctagctggtgcgctggcacccctggcctcacacagactcccgagtagctgggactacaggcacacagtcactgaagcaggccctgtttgcaattcacgttgccacctccaacttaaacattcttcatatgtgatgtccttagtcactaaggttaaactttcccacccagaaaaggcaacttagataaaatcttagagtactttcatactcttctaagtcctcttccagcctcactttgagtcctccttggggttgataggaattttctcttgctttctcaataaagtctctattcatctcatgtttaatttgtacgcatagaattgctgagaaataaaatgttctgttcaacttaaaaaaaacatcctgcaaactaactcatctaacaacctccacacaacacacaagagcg

SEQ ID NO: 436762 - DNA, 3026 bp, Homo sapiens
gggggcggggccttgccgctgcggaggccggagacgcggcggcgctggacgcggaggcgctgggcgcacggcgcggagccggccggagctcgaggccggcggcggcgggagagcgacccgggcggcctcgtagcggggccccggatccccgagtggcggccggagcctcgaaaagagattctcagcgctgattttgagatgatgggcttgggaaacgggcgtcgcagcatgaagtcgccgcccctcgtgctggccgccctggtggcctgcatcatcgtcttgggcttcaactactggattgcgagctcccggagcgtggacctccagacacggatcatggagctggaaggcagggtccgcagggcggctgcagagagaggcgccgtggagctgaagaagaacgagttccagggagagctggagaagcagcgggagcagcttgacaaaatccagtccagccacaacttccagctggagagcgtcaacaagctgtaccaggacgaaaaggcggttttggtgaataacatcaccacaggtgagaggctcatccgagtgctgcaagaccagttaaagaccctgcagaggaattacggcaggctgcagcaggatgtcctccagtttcagaagaaccagaccaacctggagaggaagttctcctacgacctgagccagtgcatcaatcagatgaaggaggtgaaggaacagtgtgaggagcgaatagaagaggtcaccaaaaaggggaatgaagctgtagcttccagagacctgagtgaaaacaacgaccagagacagcagctccaagccctcagtgagcctcagcccaggctgcaggcagcaggcctgccacacacagaggtgccacaagggaagggaaacgtgcttggtaacagcaagtcccagacaccagcccccagttccgaagtggttttggattcaaagagacaagttgagaaagaggaaaccaatgagatccaggtggtgaatgaggagcctcagagggacaggctgccgcaggagccaggccgggagcaggtggtggaagacagacctgtaggtggaagaggcttcgggggagccggagaactgggccagaccccacaggtgcaggctgccctgtcagtgagccaggaaaatccagagatggagggccctgagcgagaccagcttgtcatccccgacggacaggaggaggagcaggaagctgccggggaagggagaaaccagcagaaactgagaggagaagatgactacaacatggatgaaaatgaagcagaatctgagacagacaagcaagcagccctggcagggaatgacagaaacatagatgtttttaatgttgaagatcagaaaagagacaccataaatttacttgatcagcgtgaaaagcggaatcatacactctgaattgaactggaatcacatatttcacaacagggccgaagagatgactataaaatgttcatgagggactgaatactgaaaactgtgaaatgtactaaataaaatgtacatctgaagatgattattgtgaaattttagtatgcactttgtgtaggaaaaaatggaatggtcttttaaacagcttttggggggtactttggaagtgtctaataaggtgtcacaatttttggtagtaggtatttcgtgagaagttcaacaccaaaactggaacatagttctccttcaagtgttggcgacagcggggcttcctgattctggaatataactttgtgtaaattaacagccacctatagaagagtccatctgctgtgaaggagagacagagaactctgggttccgtcgtcctgtccacgtgctgtaccaagtgctggtgccagcctgttacctgttctcactgaaaagtctggctaatgctcttgtgtagtcacttctgattctgacaatcaatcaatcaatggcctagagcactgactgttaacacaaacgtcactagcaaagtagcaacagctttaagtctaaatacaaagctgttctgtgtgagaattttttaaaaggctacttgtataataacccttgtcatttttaatgtacaaaacgctattaagtggcttagaatttgaacatttgtggtctttatttactttgcttcgtgtgtgggcaaagcaacatcttccctaaatatatattaccaagaaaagcaagaagcagattaggtttttgacaaaacaaacaggccaaaagggggctgacctggagcagagcatggtgagaggcaaggcatgagagggcaagtttgttgtggacagatctgtgcctactttattactggagtaaaagaaaacaaagttcattgatgtcgaaggatatatacagtgttagaaattaggactgtttagaaaaacaggaatacaatggttgtttttatcatagtgtacacatttagcttgtggtaaatgactcacaaaactgattttaaaatcaagttaatgtgaattttgagttggttcttagtattatttatggtaaataggctcttaccacttgcaaataactggccacatcattaatgactgacttcccagtaaggctctctaaggggtaagtaggaggatccacaggatttgagatgctaaggccccagagatcgtttgatccaaccctcttattttcagaggggaaaatggggcctagaagttacagagcatctagctggtgcgctggcacccctggcctcacacagactcccgagtagctgggactacaggcacacagtcactgaagcaggccctgtttgcaattcacgttgccacctccaacttaaacattcttcatatgtgatgtccttagtcactaaggttaaactttcccacccagaaaaggcaacttagataaaatcttagagtactttcatactcttctaagtcctcttccagcctcactttgagtcctccttggggttgataggaattttctcttgctttctcaataaagtctctattcatctcatgtttaatttgtacgcatagaattgctgagaaataaaatgttctgttcaacttaaaaaa

SEQ ID NO: 436763 - DNA, 1789 bp, Homo sapiens
  misc_feature (28)..(28): n is a, c, g, or t
  misc_feature (35)..(35): n is a, c, g, or t
  misc_feature (37)..(37): n is a, c, g, or t
ggcgggacgccgggccggcaagtaggtntttggcngngttcggttttaatgcgagttcagaaaacaccataaatttacttgatcagcgtgaaaagcggaatcatacactctgaattgaactggaatcacatatttcacaacagggccgaagagatgactataaaatgttcatgagggactgaatactgaaaactgtgaaatgtactaaataaaatgtacatctgaagatgattattgtgaaattttagtatgcactttgtgtaggaaaaaatggaatggtcttttaaacagcttttggggggtactttggaagtgtctaataaggtgtcacaatttttggtagtaggtatttcgtgagaagttcaacaccaaaactggaacatagttctccttcaagtgttggcgacagcggggcttcctgattctggaatataactttgtgtaaattaacagccacctatagaagagtccatctgctgtgaaggagagacagagaactctgggttccgtcgtcctgtccacgtgctgtaccaagtgctggtgccagcctgttacctgttctcactgaaaagtctggctaatgctcttgtgtagtcacttctgattctgacaatcaatcaatcaatggcctagagcactgactgttaacacaaacgtcactagcaaagtagcaacagctttaagtctaaatacaaagctgttctgtgtgagaattttttaaaaggctacttgtataataacccttgtcatttttaatgtacaaaacgctattaagtggcttagaatttgaacatttgtggtctttatttactttgcttcgtgtgtgggcaaagcaacatcttccctaaatatatattaccaagaaaagcaagaagcagattaggtttttgacaaaacaaacaggccaaaagggggctgacctggagcagagcatggtgagaggcaaggcatgagagggcaagtttgttgtggacagatctgtgcctactttattactggagtaaaagaaaacaaagttcattgatgtcgaaggatatatacagtgttagaaattaggactgtttagaaaaacaggaatacaatggttgtttttatcatagtgtacacatttagcttgtggtaaatgactcacaaaactgattttaaaatcaagttaatgtgaattttgaaaattactacttaatcctaattcacaataacaatggcattaaggtttgacttgagttggttcttagtattatttatggtaaataggctcttaccacttgcaaataactggccacatcattaatgactgacttcccagtaaggctctctaaggggtaagtaggaggatccacaggatttgagatgctaaggccccagagatcgtttgatccaaccctcttattttcagaggggaaaatggggcctagaagttacagagcatctagctggtgcgctggcacccctggcctcacacagactcccgagtagctgggactacaggcacacagtcactgaagcaggccctgtttgcaattcacgttgccacctccaacttaaacattcttcatatgtgatgtccttagtcactaaggttaaactttcccacccagaaaaggcaacttagataaaatcttagagtactttcatactcttctaagtcctcttccagcctcactttgagtcctccttggggttgataggaattttctcttgctttctcaataaagtctctattcatctcatgtttaatttgtacgcatagaattgctgagaaataaaatgttctgttcaacttaaaaaa

SEQ ID NO: 436764 - DNA, 2279 bp, Homo sapiens
gggggcggggccttgccgctgcggaggccggagacgcggcggcgctggacgcggaggcgctgggcgcacggcgcggagccggccggagctcgaggccggcggcggcgggagagcgacccgggcggcctcgtagcggggccccggatccccgagtggcggccggagcctcgaaaagagattctcagcgctgattttgagatgatgggcttgggaaacgggcgtcgcagcatgaagtcgccgcccctcgtgctggccgccctggtggcctgcatcatcgtcttgggcttcaactactggattgcgagctcccggagcgtggacctccagacacggatcatggagctggaaggcagggtccgcagggcggctgcagagagaggcgccgtggagctgaagaagaacgagttccagggagagctggagaagcagcgggagcagcttgacaaaatccagtccagccacaacttccagctggagagcgtcaacaagctgtaccaggacgaaaaggcggttttggtgaataacatcaccacaggtgagaggctcatccgagtgctgcaagaccagttaaagaccctgcagaggaattacggcaggctgcagcaggatgtcctccagtttcagaagaaccagaccaacctggagaggaagttctcctacgacctgagccagtgcatcaatcagatgaaggaggtgaaggaacagtgtgaggagcgaatagaagaggtcaccaaaaaggggaatgaagctgtagcttccagagacctgagtgaaaacaacgaccagagacagcagctccaagccctcagtgagcctcagcccaggctgcaggcagcaggcctgccacacacagaggtgccacaagggaagggaaacgtgcttggtaacagcaagtcccagacaccagcccccagttccgaagtggttttggattcaaagagacaagttgagaaagaggaaaccaatgagatccaggtggtgaatgaggagcctcagagggacaggctgccgcaggagccaggccgggagcaggtggtggaagacagacctgtaggtggaagaggcttcgggggagccggagaactgggccagaccccacaggtgcaggctgccctgtcagtgagccaggaaaatccagagatggagggccctgagcgagaccagcttgtcatccccgacggacaggaggaggagcaggaagctgccggggaagggagaaaccagcagaaactgagaggagaagatgactacaacatggatgaaaatgaagcagaatctgagacagacaagcaagcagccctggcagggaatgacagaaacatagatgatcttccctaaatatatattaccaagaaaagcaagaagcagattaggtttttgacaaaacaaacaggccaaaagggggctgacctggagcagagcatggtgagaggcaaggcatgagagggcaagtttgttgtggacagatctgtgcctactttattactggagtaaaagaaaacaaagttcattgatgtcgaaggatatatacagtgttagaaattaggactgtttagaaaaacaggaatacaatggttgtttttatcatagtgtacacatttagcttgtggtaaatgactcacaaaactgattttaaaatcaagttaatgtgaattttgaaaattactacttaatcctaattcacaataacaatggcattaaggtttgacttgagttggttcttagtattatttatggtaaataggctcttaccacttgcaaataactggccacatcattaatgactgacttcccagtaaggctctctaaggggtaagtaggaggatccacaggatttgagatgctaaggccccagagatcgtttgatccaaccctcttattttcagaggggaaaatggggcctagaagttacagagcatctagctggtgcgctggcacccctggcctcacacagactcccgagtagctgggactacaggcacacagtcactgaagcaggccctgtttgcaattcacgttgccacctccaacttaaacattcttcatatgtgatgtccttagtcactaaggttaaactttcccacccagaaaaggcaacttagataaaatcttagagtactttcatactcttctaagtcctcttccagcctcactttgagtcctccttggggttgataggaattttctcttgctttctcaataaagtctctattcatctcatgtttaatttgtacgcatagaattgctgagaaataaaatgttctgttcaacttaaaaaa

SEQ ID NO: 436765 - DNA, 2654 bp, Homo sapiens
gggggcggggccttgccgctgcggaggccggagacgcggcggcgctggacgcggaggcgctgggcgcacggcgcggagccggccggagctcgaggccggcggcggcgggagagcgacccgggcggcctcgtagcggggccccggatccccgagtggcggccggagcctcgaaaagagattctcagcgctgattttgagatgatgggcttgggaaacgggcgtcgcagcatgaagtcgccgcccctcgtgctggccgccctggtggcctgcatcatcgtcttgggcttcaactactggattgcgagctcccggagcgtggacctccagacacggatcatggagctggaaggcagggtccgcagggcggctgcagagagaggcgccgtggagctgaagaagaacgagttccagggagagctggagaagcagcgggagcagcttgacaaaatccagtccagccacaacttccagctggagagcgtcaacaagctgtaccaggacgaaaaggcggttttggtgaataacatcaccacaggtgagaggctcatccgagtgctgcaagaccagttaaagaccctgcagaggaattacggcaggctgcagcaggatgtcctccagtttcagaagaaccagaccaacctggagaggaagttctcctacgacctgagccagtgcatcaatcagatgaaggaggtgaaggaacagtgtgaggagcgaatagaagaggtcaccaaaaaggggaatgaagctgtagcttccagagacctgagtgaaaacaacgaccagagacagcagctccaagccctcagtgagcctcagcccaggctgcaggcagcaggcctgccacacacagaggtgccacaagggaagggaaacgtgcttggtaacagcaagtcccagacaccagcccccagttccgaagtggttttggattcaaagagacaagttgagaaagaggaaaccaatgagatccaggtggtgaatgaggagcctcagagggacaggctgccgcaggagccaggccgggagcaggtggtggaagacagacctgtaggtggaagaggcttcgggggagccggagaactgggccagaccccacaggtgcaggctgccctgtcagtgagccaggaaaatccagagatggagggccctgagcgagaccagcttgtcatccccgacggacaggaggaggagcaggaagctgccggggaagggagaaaccagcagaaactgagaggagaagatgactacaacatggatgaaaatgaagcagaatctgagacagacaagcaagcagccctggcagggaatgacagaaacatagatgtttttaatgttgaagatcagaaaagagacaccataaatttacttgatcagcgtgaaaagcggaatcatacactctgaattgaactggaatcacatatttcacaacagggccgaagagatgactataaaatgttcatgagggactgaatactgaaaactgtgaaatgtactaaataaaatgtacatctgaagatgattattgtgaaattttagtatgcactttgtgtaggaaaaaatggaatggtcttttaaacagcttttggggggtactttggaagtgtctaataaggtgtcacaatttttggtagtaggtatttcgtgagaagttcaacaccaaaactggaacatagttctccttcaagtgttggcgacagcggggcttcctgattctggaatataactttgtgtaaattaacagccacccacctccaacttaaacattcttcatatgtgatgtccttagtcactaaggttaaactttcccacccagaaaaggcaacttagataaaatcttagagtactttcatactcttctaagtcctcttccagcctcactttgagtcctccttggggttgataggaattttctcttgctttctcaataaagtctctattcatctcatgtttaatttgtacgcatagaattgctgagaaataaaatgttctgttcaacttaaaaaacttgtcacagctctgtttttttgcttttccccttcatcctctattagatccttaaagaatccaccctcaaactgtggactaaggatggcagtttgccttaaaccttctgtggaatgagatgggctgtcaggacgtcttcaacccacagtaccccgaaagctttgtgctcaccacgtgtgcactctgcatgctttctccaggctgccctagggatcacgacagattcagccaacaatggagagggctgtgggctgttccaacaaaatagaacagtcacctctggtgacacgcatctgtagtcctagcctcccaagtagctgggactacagatgcatgtcaccatgcccggctaattttttgtatttttagtagaaatggggtttcactttgttagccaggatggtctcaatctcctgatttcgtgatcagtgtaaagactcagagagctgttgcataataacttcatgtgagtctccaaaatttgatactaaaggcttggtggtctcagggggccaatgtggctgcagcctgaggggccaaatggagagggcagaaacgaagtaggagaggcagaaggggtcaaactggcattctgggtaaagactaggtcattcattagagaacagtggattttaagtagagttgtc

SEQ ID NO: 436766 - DNA, 1380 bp, Homo sapiens
gggggcggggccttgccgctgcggaggccggagacgcggcggcgctggacgcggaggcgctgggcgcacggcgcggagccggccggagctcgaggccggcggcggcgggagagcgacccgggcggcctcgtagcggggccccggatccccgagtggcggccggagcctcgaaaagagattctcagcgctgattttgagatgatgggcttgggaaacgggcgtcgcagcatgaagtcgccgcccctcgtgctggccgccctggtggcctgcatcatcgtcttgggcttcaactactggattgcgagctcccggagcgtggacctccagacacggatcatggagctggaaggcagggtccgcagggcggctgcagagagaggcgccgtggagctgaagaagaacgagttccagggagagctggagaagcagcgggagcagcttgacaaaatccagtccagccacaacttccagctggagagcgtcaacaagctgtaccaggacgaaaaggcggttttggtgaataacatcaccacaggtgagaggctcatccgagtgctgcaagaccagttaaagaccctgcagaggaattacggcaggctgcagcaggatgtcctccagtttcagaagaaccagaccaacctggagaggaagttctcctacgacctgagccagtgcatcaatcagatgaaggaggtgaaggaacagtgtgaggagcgaatagaagaggtcaccaaaaaggggaatgaagctgtagcttccagagacctgagtgaaaacaacgaccagagacagcagctccaagccctcagtgagcctcagcccaggctgcaggcagcaggcctgccacacacagaggtgccacaagggaagggaaacgtgcttggtaacagcaagtcccagacaccagcccccagttccgaagtggttttggattcaaagagacaagttgagaaagaggaaaccaatgagatccaggtggtgaatgaggagcctcagagggacaggctgccgcaggagccaggccgggagcaggtggtggaagacagacctgtaggtggaagaggcttcgggggagccggagaactgggccagaccccacaggtgcaggctgccctgtcagtgagccaggaaaatccagagatggagggccctgagcgagaccagcttgtcatccccgacggacaggaggaggagcaggaagctgccggggaagggagaaaccagcagaaactgagaggagaagatgactacaacatggatgaaaatgaagcagaatctgagacagacaagcaagcagccctggcagggaatgacagaaacatagatggatcttgggaagtgccactgaagactgggaaaatccttcacgtggcattcgat

SEQ ID NO: 436767 - DNA, 1243 bp, Homo sapiens
gggggcggggccttgccgctgcggaggccggagacgcggcggcgctggacgcggaggcgctgggcgcacggcgcggagccggccggagctcgaggccggcggcggcgggagagcgacccgggcggcctcgtagcggggccccggatccccgagtggcggccggagcctcgaaaagagattctcagcgctgattttgagatgatgggcttgggaaacgggcgtcgcagcatgaagtcgccgcccctcgtgctggccgccctggtggcctgcatcatcgtcttgggcttcaactactggattgcgagctcccggagcgtggacctccagacacggatcatggagctggaaggcagggtccgcagggcggctgcagagagaggcgccgtggagctgaagaagaacgagttccagggagagctggagaagcagcgggagcagcttgacaaaatccagtccagccacaacttccagctggagagcgtcaacaagctgtaccaggacgaaaaggcggttttggtgaataacatcaccacaggtgagaggctcatccgagtgctgcaagaccagttaaagaccctgcagaggaattacggcaggctgcagcaggatgtcctccagtttcagaagaaccagaccaacctggagaggaagttctcctacgacctgagccagtgcatcaatcagatgaaggaggtgaaggaacagtgtgaggagcgaatagaagaggtcaccaaaaaggggaatgaagctgtagcttccagagacctgagtgaaaacaacgaccagagacagcagctccaagccctcagtgagcctcagcccaggctgcaggcagcaggcctgccacacacagaggtgccacaagggaagggaaacgtgcttggtaacagcaagtcccagacaccagcccccagttccgaagtggttttggattcaaagagacaagttgagaaagaggaaaccaatgagatccaggtggtgaatgaggagcctcagagggacaggctgccgcaggagccaggccgggagcaggtggtggaagacagacctgtaggtggaagaggcttcgggggagccggagaactgggccagaccccacaggtgcaggctgccctgtcagtgagccaggaaaatccagagatggagggccctgagcgagaccagcttgtcatccccgacggacaggaggaggagcaggaagctgccggggaaggtgggtgtgaagtttcgggggccgctgtgg

SEQ ID NO: 436768 - DNA, 1196 bp, Homo sapiens
gggggcggggccttgccgctgcggaggccggagacgcggcggcgctggacgcggaggcgctgggcgcacggcgcggagccggccggagctcgaggccggcggcggcgggagagcgacccgggcggcctcgtagcggggccccggatccccgagtggcggccggagcctcgaaaagagattctcagcgctgattttgagatgatgggcttgggaaacgggcgtcgcagcatgaagtcgccgcccctcgtgctggccgccctggtggcctgcatcatcgtcttgggcttcaactactggattgcgagctcccggagcgtggacctccagacacggatcatggagctggaaggcagggtccgcagggcggctgcagagagaggcgccgtggagctgaagaagaacgagttccagggagagctggagaagcagcgggagcagcttgacaaaatccagtccagccacaacttccagctggagagcgtcaacaagctgtaccaggacgaaaaggcggttttggtgaataacatcaccacaggtgagaggctcatccgagtgctgcaagaccagttaaagaccctgcagaggaattacggcaggctgcagcaggatgtcctccagtttcagaagaaccagaccaacctggagaggaagttctcctacgacctgagccagtgcatcaatcagatgaaggaggtgaaggaacagtgtgaggagcgaatagaagaggtcaccaaaaaggggaatgaagctgtagcttccagagacctgagtgaaaacaacgaccagagacagcagctccaagccctcagtgagcctcagcccaggctgcaggcagcaggcctgccacacacagaggtgccacaagggaagggaaacgtgcttggtaacagcaagtcccagacaccagcccccagttccgaagtggttttggattcaaccacctccaacttaaacattcttcatatgtgatgtccttagtcactaaggttaaactttcccacccagaaaaggcaacttagataaaatcttagagtactttcatactcttctaagtcctcttccagcctcactttgagtcctccttggggttgataggaattttctcttgctttctcaataaagtctctattcatctcatgtttaatttgtacgcatagaattgctgagaaataaaatgttctgttcaacttaaaaaa

SEQ ID NO: 436769 - DNA, 3080 bp, Homo sapiens
gggggcggggccttgccgctgcggaggccggagacgcggcggcgctggacgcggaggcgctgggcgcacggcgcggagccggccggagctcgaggccggcggcggcgggagagcgacccgggcggcctcgtagcggggccccggatccccgagtggcggccggagcctcgaaaagagattctcagcgctgattttgagatgatgggcttgggaaacgggcgtcgcagcatgaagtcgccgcccctcgtgctggccgccctggtggcctgcatcatcgtcttgggcttcaactactggattgcgagctcccggagcgtggacctccagacacggatcatggagctggaaggcagggtccgcagggcggctgcagagagaggcgccgtggagctgaagaagaacgagttccagggagagctggagaagcagcgggagcagcttgacaaaatccagtccagccacaacttccagctggagagcgtcaacaagctgtaccaggacgaaaaggcggttttggtgaataacatcaccacaggtgagaggctcatccgagtgctgcaagaccagttaaagaccctgcagaggaattacggcaggctgcagcaggatgtcctccagtttcagaagaaccagaccaacctggagaggaagttctcctacgacctgagccagtgcatcaatcagatgaaggaggtgaaggaacagtgtgaggagcgaatagaagaggtcaccaaaaaggggaatgaagctgtagcttccagagacctgagtgaaaacaacgaccagagacagcagctccaagccctcagtgagcctcagcccaggctgcaggcagcaggcctgccacacacagaggtgccacaagggaagggaaacgtgcttggtaacagcaagtcccagacaccagcccccagttccgaagtggttttggattcaaagagacaagttgagaaagaggaaaccaatgagatccaggtggtgaatgaggagcctcagagggacaggctgccgcaggagccaggccgggagcaggtggtggaagacagacctgtaggtggaagaggcttcgggggagccggagaactgggccagaccccacaggtgcaggctgccctgtcagtgagccaggaaaatccagagatggagggccctgagcgagaccagcttgtcatccccgacggacaggaggaggagcaggaagctgccggggaagggagaaaccagcagaaactgagaggagaagatgactacaacatggatgaaaatgaagcagaatctgagacagacaagcaagcagccctggcagggaatgacagaaacatagatgtttttaatgttgaagatcagaaaagagacaccataaatttacttgatcagcgtgaaaagcggaatcatacactctgaattgaactggaatcacatatttcacaacagggccgaagagatgactataaaatgttcatgagggactgaatactgaaaactgtgaaatgtactaaataaaatgtacatctgaagatgattattgtgaaattttagtatgcactttgtgtaggaaaaaatggaatggtcttttaaacagcttttggggggtactttggaagtgtctaataaggtgtcacaatttttggtagtaggtatttcgtgagaagttcaacaccaaaactggaacatagttctccttcaagtgttggcgacagcggggcttcctgattctggaatataactttgtgtaaattaacagccacctatagaagagtccatctgctgtgaaggagagacagagaactctgggttccgtcgtcctgtccacgtgctgtaccaagtgctggtgccagcctgttacctgttctcactgaaaagtctggctaatgctcttgtgtagtcacttctgattctgacaatcaatcaatcaatggcctagagcactgactgttaacacaaacgtcactagcaaagtagcaacagctttaagtctaaatacaaagctgttctgtgtgagaattttttaaaaggctacttgtataataacccttgtcatttttaatgtacaaaacgctattaagtggcttagaatttgaacatttgtggtctttatttactttgcttcgtgtgtgggcaaagcaacatcttccctaaatatatattaccaagaaaagcaagaagcagattaggtttttgacaaaacaaacaggccaaaagggggctgacctggagcagagcatggtgagaggcaaggcatgagagggcaagtttgttgtggacagatctgtgcctactttattactggagtaaaagaaaacaaagttcattgatgtcgaaggatatatacagtgttagaaattaggactgtttagaaaaacaggaatacaatggttgtttttatcatagtgtacacatttagcttgtggtaaatgactcacaaaactgattttaaaatcaagttaatgtgaattttgaaaattactacttaatcctaattcacaataacaatggcattaaggtttgacttgagttggttcttagtattatttatggtaaataggctcttaccacttgcaaataactggccacatcattaatgactgacttcccagtaaggctctctaaggggtaagtaggaggatccacaggatttgagatgctaaggccccagagatcgtttgatccaaccctcttattttcagaggggaaaatggggcctagaagttacagagcatctagctggtgcgctggcacccctggcctcacacagactcccgagtagctgggactacaggcacacagtcactgaagcaggccctgtttgcaattcacgttgccacctccaacttaaacattcttcatatgtgatgtccttagtcactaaggttaaactttcccacccagaaaaggcaacttagataaaatcttagagtactttcatactcttctaagtcctcttccagcctcactttgagtcctccttggggttgataggaattttctcttgctttctcaataaagtctctattcatctcatgtttaatttgtacgcatagaattgctgagaaataaaatgttctgttcaacttaaaaaa

SEQ ID NO: 436770 - DNA, 3028 bp, Homo sapiens
atcttcactttttccgttgctagcagtggaagggtcacagaccaaacactaaggcctgagcggtgacaaccgaggcgagatgatggtcaacagggaatgcctcgtgggagaaaaaagacaattttattctcagcgctgattttgagatgatgggcttgggaaacgggcgtcgcagcatgaagtcgccgcccctcgtgctggccgccctggtggcctgcatcatcgtcttgggcttcaactactggattgcgagctcccggagcgtggacctccagacacggatcatggagctggaaggcagggtccgcagggcggctgcagagagaggcgccgtggagctgaagaagaacgagttccagggagagctggagaagcagcgggagcagcttgacaaaatccagtccagccacaacttccagctggagagcgtcaacaagctgtaccaggacgaaaaggcggttttggtgaataacatcaccacaggtgagaggctcatccgagtgctgcaagaccagttaaagaccctgcagaggaattacggcaggctgcagcaggatgtcctccagtttcagaagaaccagaccaacctggagaggaagttctcctacgacctgagccagtgcatcaatcagatgaaggaggtgaaggaacagtgtgaggagcgaatagaagaggtcaccaaaaaggggaatgaagctgtagcttccagagacctgagtgaaaacaacgaccagagacagcagctccaagccctcagtgagcctcagcccaggctgcaggcagcaggcctgccacacacagaggtgccacaagggaagggaaacgtgcttggtaacagcaagtcccagacaccagcccccagttccgaagtggttttggattcaaagagacaagttgagaaagaggaaaccaatgagatccaggtggtgaatgaggagcctcagagggacaggctgccgcaggagccaggccgggagcaggtggtggaagacagacctgtaggtggaagaggcttcgggggagccggagaactgggccagaccccacaggtgcaggctgccctgtcagtgagccaggaaaatccagagatggagggccctgagcgagaccagcttgtcatccccgacggacaggaggaggagcaggaagctgccggggaagggagaaaccagcagaaactgagaggagaagatgactacaacatggatgaaaatgaagcagaatctgagacagacaagcaagcagccctggcagggaatgacagaaacatagatgtttttaatgttgaagatcagaaaagagacaccataaatttacttgatcagcgtgaaaagcggaatcatacactctgaattgaactggaatcacatatttcacaacagggccgaagagatgactataaaatgttcatgagggactgaatactgaaaactgtgaaatgtactaaataaaatgtacatctgaagatgattattgtgaaattttagtatgcactttgtgtaggaaaaaatggaatggtcttttaaacagcttttggggggtactttggaagtgtctaataaggtgtcacaatttttggtagtaggtatttcgtgagaagttcaacaccaaaactggaacatagttctccttcaagtgttggcgacagcggggcttcctgattctggaatataactttgtgtaaattaacagccacctatagaagagtccatctgctgtgaaggagagacagagaactctgggttccgtcgtcctgtccacgtgctgtaccaagtgctggtgccagcctgttacctgttctcactgaaaagtctggctaatgctcttgtgtagtcacttctgattctgacaatcaatcaatcaatggcctagagcactgactgttaacacaaacgtcactagcaaagtagcaacagctttaagtctaaatacaaagctgttctgtgtgagaattttttaaaaggctacttgtataataacccttgtcatttttaatgtacaaaacgctattaagtggcttagaatttgaacatttgtggtctttatttactttgcttcgtgtgtgggcaaagcaacatcttccctaaatatatattaccaagaaaagcaagaagcagattaggtttttgacaaaacaaacaggccaaaagggggctgacctggagcagagcatggtgagaggcaaggcatgagagggcaagtttgttgtggacagatctgtgcctactttattactggagtaaaagaaaacaaagttcattgatgtcgaaggatatatacagtgttagaaattaggactgtttagaaaaacaggaatacaatggttgtttttatcatagtgtacacatttagcttgtggtaaatgactcacaaaactgattttaaaatcaagttaatgtgaattttgaaaattactacttaatcctaattcacaataacaatggcattaaggtttgacttgagttggttcttagtattatttatggtaaataggctcttaccacttgcaaataactggccacatcattaatgactgacttcccagtaaggctctctaaggggtaagtaggaggatccacaggatttgagatgctaaggccccagagatcgtttgatccaaccctcttattttcagaggggaaaatggggcctagaagttacagagcatctagctggtgcgctggcacccctggcctcacacagactcccgagtagctgggactacaggcacacagtcactgaagcaggccctgtttgcaattcacgttgccacctccaacttaaacattcttcatatgtgatgtccttagtcactaaggttaaactttcccacccagaaaaggcaacttagataaaatcttagagtactttcatactcttctaagtcctcttccagcctcactttgagtcctccttggggttgataggaattttctcttgctttctcaataaagtctctattcatctcatgtttaatttgtacgcatagaattgctgagaaataaaatgttctgttcaacttaaaaaa

SEQ ID NO: 436771 - DNA, 2193 bp, Homo sapiens
ttttttttttttttttttttttaaatcaaatgctggcaaggtcacagctaactgtgttctgtgcacagaggaaaccaatgagatccaggtggtgaatgaggagcctcagagggacaggctgccgcaggagccaggccgggagcaggtggtggaagacagacctgtaggtggaagaggcttcgggggagccggagaactgggccagaccccacaggtgcaggctgccctgtcagtgagccaggaaaatccagagatggagggccctgagcgagaccagcttgtcatccccgacggacaggaggaggagcaggaagctgccggggaagggagaaaccagcagaaactgagaggagaagatgactacaacatggatgaaaatgaagcagaatctgagacagacaagcaagcagccctggcagggaatgacagaaacatagatgtttttaatgttgaagatcagaaaagagacaccataaatttacttgatcagcgtgaaaagcggaatcatacactctgaattgaactggaatcacatatttcacaacagggccgaagagatgactataaaatgttcatgagggactgaatactgaaaactgtgaaatgtactaaataaaatgtacatctgaagatgattattgtgaaattttagtatgcactttgtgtaggaaaaaatggaatggtcttttaaacagcttttggggggtactttggaagtgtctaataaggtgtcacaatttttggtagtaggtatttcgtgagaagttcaacaccaaaactggaacatagttctccttcaagtgttggcgacagcggggcttcctgattctggaatataactttgtgtaaattaacagccacctatagaagagtccatctgctgtgaaggagagacagagaactctgggttccgtcgtcctgtccacgtgctgtaccaagtgctggtgccagcctgttacctgttctcactgaaaagtctggctaatgctcttgtgtagtcacttctgattctgacaatcaatcaatcaatggcctagagcactgactgttaacacaaacgtcactagcaaagtagcaacagctttaagtctaaatacaaagctgttctgtgtgagaattttttaaaaggctacttgtataataacccttgtcatttttaatgtacaaaacgctattaagtggcttagaatttgaacatttgtggtctttatttactttgcttcgtgtgtgggcaaagcaacatcttccctaaatatatattaccaagaaaagcaagaagcagattaggtttttgacaaaacaaacaggccaaaagggggctgacctggagcagagcatggtgagaggcaaggcatgagagggcaagtttgttgtggacagatctgtgcctactttattactggagtaaaagaaaacaaagttcattgatgtcgaaggatatatacagtgttagaaattaggactgtttagaaaaacaggaatacaatggttgtttttatcatagtgtacacatttagcttgtggtaaatgactcacaaaactgattttaaaatcaagttaatgtgaattttgaaaattactacttaatcctaattcacaataacaatggcattaaggtttgacttgagttggttcttagtattatttatggtaaataggctcttaccacttgcaaataactggccacatcattaatgactgacttcccagtaaggctctctaaggggtaagtaggaggatccacaggatttgagatgctaaggccccagagatcgtttgatccaaccctcttattttcagaggggaaaatggggcctagaagttacagagcatctagctggtgcgctggcacccctggcctcacacagactcccgagtagctgggactacaggcacacagtcactgaagcaggccctgtttgcaattcacgttgccacctccaacttaaacattcttcatatgtgatgtccttagtcactaaggttaaactttcccacccagaaaaggcaacttagataaaatcttagagtactttcatactcttctaagtcctcttccagcctcactttgagtcctccttggggttgataggaattttctcttgctttctcaataaagtctctattcatctcatgtttaatttgtacgcatagaattgctgagaaataaaatgttctgttcaacttaaaaaa

SEQ ID NO: 436772 - DNA, 3727 bp, Homo sapiens
gggggcggggccttgccgctgcggaggccggagacgcggcggcgctggacgcggaggcgctgggcgcacggcgcggagccggccggagctcgaggccggcggcggcgggagagcgacccgggcggcctcgtagcggggccccggatccccgagtggcggccggagcctcgaaaagagattctcagcgctgattttgagatgatgggcttgggaaacgggcgtcgcagcatgaagtcgccgcccctcgtgctggccgccctggtggcctgcatcatcgtcttgggcttcaactactggattgcgagctcccggagcgtggacctccagacacggatcatggagctggaaggcagggtccgcagggcggctgcagagagaggcgccgtggagctgaagaagaacgagttccagggagagctggagaagcagcgggagcagcttgacaaaatccagtccagccacaacttccagctggagagcgtcaacaagctgtaccaggacgaaaaggcggttttggtgaataacatcaccacaggtgagaggctcatccgagtgctgcaagaccagttaaagaccctgcagaggaattacggcaggctgcagcaggatgtcctccagtttcagaagaaccagaccaacctggagaggaagttctcctacgacctgagccagtgcatcaatcagatgaaggaggtgaaggaacagtgtgaggagcgaatagaagaggtcaccaaaaaggggaatgaagctgtagcttccagagacctgagtgaaaacaacgaccagagacagcagctccaagccctcagtgagcctcagcccaggctgcaggcagcaggcctgccacacacagaggtgccacaagggaagggaaacgtgcttggtaacagcaagtcccagacaccagcccccagttccgaagtggttttggattcaaagagacaagttgagaaagaggaaaccaatgagatccaggtggtgaatgaggagcctcagagggacaggctgccgcaggagccaggccgggagcaggtggtggaagacagacctgtaggtggaagaggcttcgggggagccggagaactgggccagaccccacaggtgcaggctgccctgtcagtgagccaggaaaatccagagatggagggccctgagcgagaccagcttgtcatccccgacggacaggaggaggagcaggaagctgccggggaagggagaaaccagcagaaactgagaggagaagatgactacaacatggatgaaaatgaagcagaatctgagacagacaagcaagcagccctggcagggaatgacagaaacatagatgtttttaatgttgaagatcagaaaagagacaccataaatttacttgatcagcgtgaaaagcggaatcatacactctgaattgaactggaatcacatatttcacaacagggccgaagagatgactataaaatgttcatgagggactgaatactgaaaactgtgaaatgtactaaataaaatgtacatctgaagatgattattgtgaaattttagtatgcactttgtgtaggaaaaaatggaatggtcttttaaacagcttttggggggtactttggaagtgtctaataaggtgtcacaatttttggtagtaggtatttcgtgagaagttcaacaccaaaactggaacatagttctccttcaagtgttggcgacagcggggcttcctgattctggaatataactttgtgtaaattaacagccacctatagaagagtccatctgctgtgaaggagagacagagaactctgggttccgtcgtcctgtccacgtgctgtaccaagtgctggtgccagcctgttacctgttctcactgaaaagtctggctaatgctcttgtgtagtcacttctgattctgacaatcaatcaatcaatggcctagagcactgactgttaacacaaacgtcactagcaaagtagcaacagctttaagtctaaatacaaagctgttctgtgtgagaattttttaaaaggctacttgtataataacccttgtcatttttaatgtacaaaacgctattaagtggcttagaatttgaacatttgtggtctttatttactttgcttcgtgtgtgggcaaagcaacatcttccctaaatatatattaccaagaaaagcaagaagcagattaggtttttgacaaaacaaacaggccaaaagggggctgacctggagcagagcatggtgagaggcaaggcatgagagggcaagtttgttgtggacagatctgtgcctactttattactggagtaaaagaaaacaaagttcattgatgtcgaaggatatatacagtgttagaaattaggactgtttagaaaaacaggaatacaatggttgtttttatcatagtgtacacatttagcttgtggtaaatgactcacaaaactgattttaaaatcaagttaatgtgaattttgaaaattactacttaatcctaattcacaataacaatggcattaaggtttgacttgagttggttcttagtattatttatggtaaataggctcttaccacttgcaaataactggccacatcattaatgactgacttcccagtaaggctctctaaggggtaagtaggaggatccacaggatttgagatgctaaggccccagagatcgtttgatccaaccctcttattttcagaggggaaaatggggcctagaagttacagagcatctagctggtgcgctggcacccctggcctcacacagactcccgagtagctgggactacaggcacacagtcactgaagcaggccctgtttgcaattcacgttgccacctccaacttaaacattcttcatatgtgatgtccttagtcactaaggttaaactttcccacccagaaaaggcaacttagataaaatcttagagtactttcatactcttctaagtcctcttccagcctcactttgagtcctccttggggttgataggaattttctcttgctttctcaataaagtctctattcatctcatgtttaatttgtacgcatagaattgctgagaaataaaatgttctgttcaacttaaaaaacttgtcacagctctgtttttttgcttttccccttcatcctctattagatccttaaagaatccaccctcaaactgtggactaaggatggcagtttgccttaaaccttctgtggaatgagatgggctgtcaggacgtcttcaacccacagtaccccgaaagctttgtgctcaccacgtgtgcactctgcatgctttctccaggctgccctagggatcacgacagattcagccaacaatggagagggctgtgggctgttccaacaaaatagaacagtcacctctggtgacacgcatctgtagtcctagcctcccaagtagctgggactacagatgcatgtcaccatgcccggctaattttttgtatttttagtagaaatggggtttcactttgttagccaggatggtctcaatctcctgatttcgtgatcagtgtaaagactcagagagctgttgcataataacttcatgtgagtctccaaaatttgatactaaaggcttggtggtctcagggggccaatgtggctgcagcctgaggggccaaatggagagggcagaaacgaagtaggagaggcagaaggggtcaaactggcattctgggtaaagactaggtcattcattagagaacagtggattttaagtagagttgtc

SEQ ID NO: 436773 - DNA, 2007 bp, Homo sapiens
gggggcggggccttgccgctgcggaggccggagacgcggcggcgctggacgcggaggcgctgggcgcacggcgcggagccggccggagctcgaggccggcggcggcgggagagcgacccgggcggcctcgtagcggggccccggatccccgagtggcggccggagcctcgaaaagagattctcagcgctgattttgagatgatgggcttgggaaacgggcgtcgcagcatgaagtcgccgcccctcgtgctggccgccctggtggcctgcatcatcgtcttgggcttcaactactggattgcgagctcccggagcgtggacctccagacacggatcatggagctggaaggcagggtccgcagggcggctgcagagagaggcgccgtggagctgaagaagaacgagttccagggagagctggagaagcagcgggagcagcttgacaaaatccagtccagccacaacttccagctggagagcgtcaacaagctgtaccaggacgaaaaggcggttttggtgaataacatcaccacaggtgagaggctcatccgagtgctgcaagaccagttaaagaccctgcagaggaattacggcaggctgcagcaggatgtcctccagtttcagaagaaccagaccaacctggagaggaagttctcctacgacctgagccagtgcatcaatcagatgaaggaggtgaaggaacagtgtgaggagcgaatagaagaggtcaccaaaaaggggaatgaagctgtagcttccagagacctgagtgaaaacaacgaccagagacagcagctccaagccctcagtgagcctcagcccaggctgcaggcagcaggcctgccacacacagaggtgccacaagggaagggaaacgtgcttggtaacagcaagtcccagacaccagcccccagttccgaagtggttttggattcaaagagacaagttgagaaagaggaaaccaatgagatccaggtggtgaatgaggagcctcagagggacaggctgccgcaggagccaggccgggagcaggtggtggaagacagacctgtaggtggaagaggcttcgggggagccggagaactgggccagaccccacaggtgcaggctgccctgtcagtgagccaggaaaatccagagatggagggccctgagcgagaccagcttgtcatccccgacggacaggaggaggagcaggaagctgccggggaagggagaaaccagcagaaactgagaggagaagatgactacaacatggatgaaaatgaagcagaatctgagacagacaagcaagcagccctggcagggaatgacagaaacatagatgtttttaatgttgaagatcagaaaagagacaccataaatttacttgatcagcgtgaaaagcggaatcatacactctgaattgaactggaatcacatatttcacaacagggccgaagagatgactataaaatgttcatgagggactgaatactgaaaactgtgaaatgtactaaataaaatgtacatctgaagatgattattgtgaaattttagtatgcactttgtgtaggaaaaaatggaatggtcttttaaacagcttttggggggtactttggaagtgtctaataaggtgtcacaatttttggtagtaggtatttcgtgagaagttcaacaccaaaactggaacatagttctccttcaagtgttggcgacagcggggcttcctgattctggaatataactttgtgtaaattaacagccacccacctccaacttaaacattcttcatatgtgatgtccttagtcactaaggttaaactttcccacccagaaaaggcaacttagataaaatcttagagtactttcatactcttctaagtcctcttccagcctcactttgagtcctccttggggttgataggaattttctcttgctttctcaataaagtctctattcatctcatgtttaatttgtacgcatagaattgctgagaaataaaatgttctgttcaacttaaaaaa

SEQ ID NO: 436774 - DNA, 1650 bp, Homo sapiens
gggggcggggccttgccgctgcggaggccggagacgcggcggcgctggacgcggaggcgctgggcgcacggcgcggagccggccggagctcgaggccggcggcggcgggagagcgacccgggcggcctcgtagcggggccccggatccccgagtggcggccggagcctcgaaaagagattctcagcgctgattttgagatgatgggcttgggaaacgggcgtcgcagcatgaagtcgccgcccctcgtgctggccgccctggtggcctgcatcatcgtcttgggcttcaactactggattgcgagctcccggagcgtggacctccagacacggatcatggagctggaaggcagggtccgcagggcggctgcagagagaggcgccgtggagctgaagaagaacgagttccagggagagctggagaagcagcgggagcagcttgacaaaatccagtccagccacaacttccagctggagagcgtcaacaagctgtaccaggacgaaaaggcggttttggtgaataacatcaccacaggtgagaggctcatccgagtgctgcaagaccagttaaagaccctgcagaggaattacggcaggctgcagcaggatgtcctccagtttcagaagaaccagaccaacctggagaggaagttctcctacgacctgagccagtgcatcaatcagatgaaggaggtgaaggaacagtgtgaggagcgaatagaagaggtcaccaaaaaggggaatgaagctgtagcttccagagacctgagtgaaaacaacgaccagagacagcagctccaagccctcagtgagcctcagcccaggctgcaggcagcaggcctgccacacacagaggtgccacaagggaagggaaacgtgcttggtaacagcaagtcccagacaccagcccccagttccgaagtggttttggattcaaagagacaagttgagaaagaggaaaccaatgagatccaggtggtgaatgaggagcctcagagggacaggctgccgcaggagccaggccgggagcaggtggtggaagacagacctgtaggtggaagaggcttcgggggagccggagaactgggccagaccccacaggtgcaggctgccctgtcagtgagccaggaaaatccagagatggagggccctgagcgagaccagcttgtcatccccgacggacaggaggaggagcaggaagctgccggggaagggagaaaccagcagaaactgagaggagaagatgactacaacatggatgaaaatgaagcagaatctgagacagacaagcaagcagccctggcagggaatgacagaaacatagatggacacatgagtgaaggggacaactaagatgcagccttttcttctcaaatatcaggtttattttgtccgcaagtgaaagggaagaactactctgccgaagatcatcttttatcaactccaaagctcctgaagtgaatcctcagcaccacggtttgaaacagttatgctcccagtgatcaccttggtcatgatttcttccaagaagacagacctcattccaatttgatgtttaactgtcaagtacatccacagctagtgccaccaaattcagggcaaaatgtgttaatttttctccataggagcaaataaatgatcttcaattaa

SEQ ID NO: 436775 - DNA, 1375 bp, Homo sapiens
gggggcggggccttgccgctgcggaggccggagacgcggcggcgctggacgcggaggcgctgggcgcacggcgcggagccggccggagctcgaggccggcggcggcgggagagcgacccgggcggcctcgtagcggggccccggatccccgagtggcggccggagcctcgaaaagagattctcagcgctgattttgagatgatgggcttgggaaacgggcgtcgcagcatgaagtcgccgcccctcgtgctggccgccctggtggcctgcatcatcgtcttgggcttcaactactggattgcgagctcccggagcgtggacctccagacacggatcatggagctggaaggcagggtccgcagggcggctgcagagagaggcgccgtggagctgaagaagaacgagttccagggagagctggagaagcagcgggagcagcttgacaaaatccagtccagccacaacttccagctggagagcgtcaacaagctgtaccaggacgaaaaggcggttttggtgaataacatcaccacaggtgagaggctcatccgagtgctgcaagaccagttaaagaccctgcagaggaattacggcaggctgcagcaggatgtcctccagtttcagaagaaccagaccaacctggagaggaagttctcctacgacctgagccagtgcatcaatcagatgaaggaggtgaaggaacagtgtgaggagcgaatagaagaggtcaccaaaaaggggaatgaagctgtagcttccagagacctgagtgaaaacaacgaccagagacagcagctccaagccctcagtgagcctcagcccaggctgcaggcagcaggcctgccacacacagaggtgccacaagggaagggaaacgtgcttggtaacagcaagtcccagacaccagcccccagttccgaagtggttttggattcaaagagacaagttgagaaagaggaaaccaatgagatccaggtggtgaatgaggagcctcagagggacaggctgccgcaggagccaggccgggagcaggtggtggaagacagacctgtaggtggaagaggcttcgggggagccggagaactgggccagaccccacaggtgcaggctgccctgtcagtgagccaggaaaatccagagatggagggccctgagcgagaccagcttgtcatccccgacggacaggaggaggagcaggaagctgccggggaagggacgggaggaaagatgaggcagaggtgaaagcacatggaacacaacaggggggactggctaaccttggcacaaaagcagcacagcaggcccggggaaagggtgggggcaggaagcagccggcctccctctgaccctccctgtcgccttggcagggcgctga

SEQ ID NO: 436776 - DNA, 676 bp, Homo sapiens
ggggaaaaatgctaatacaagtataaaaccaaattgctatttatgaaggtaaagtttggtgctgcctcactgtcaactctttccttatactctaactatagtcttgataaagtactcaatattccctctacatggaatagtctatttgcccagtacacaaacacaaacacaaactaatacacacatacatgcacacaccattgccttccttctagctaatttctacatatcttttaagtcttagcttatatgttatttcttccaggaaacttactgaaacatccccaagaccatattaggtgccctctctaattccctgaacaataacaatatgggtcactctgtacagtaattacctgttcatccgtttgctttgttcgttaaactctaagttccttttggcagggaatagctttgccttcattattgtttcattcttaggatttagcataatttctgccataaagtatataggtgcttgatataaatctgttaaaggaacgtatacattttgcaatacagaaagcaatttttttcatcattattccaatgtgtgttcttttccaaaatatattttctagagtaaaacgagttctaattatttcaaagagcagttaatttggatatgcagatattattgcttgcccactgtggtaacctttagggctgcttgcaa

SEQ ID NO: 436777 - DNA, 2941 bp, Homo sapiens
atgccggctgagctgctgctgctgctgattgttgccttcgccagccccagctgccaggtgctctcatcactgcgcatggctgcaatcctggatgatcagacagtgtgtggccgcggtgagcgtctggccttggccttggcccgggagcagatcaacgggatcatcgaggtcccagccaaggcccgagtggaagtagacatctttgagctgcagcgggacagccagtacgagaccacggacaccatgtgtcagatcttacccaaaggggttgtgtctgtccttgggccctcctctagcccagcatctgcctccaccgtgagccatatctgtggagagaaggagatcccccacatcaaggtgggtcccgaggagacaccccgccttcagtaccttcgcttcgcgtctgtcagcctgtaccccagtaacgaggacgtcagcttggcggtctcccgaatcctcaagtccttcaactacccctcggccagcctcatctgcgccaaggctgagtgcctgctgcgattggaggaactggtgcgtggcttcctcatctccaaggagacgctgtcagtgaggatgttggacgacagccgggaccccacaccactgctcaaggagatccgtgatgacaaggtgtccaccatcatcatcgacgccaacgcctccatctcccacctcatcctccgtaaggcctcggaactgggaatgacctcagcgttttacaagtacatcctcaccaccatggacttccccatcctgcatctggacggtattgtggaggactcctccaacatcctgggcttctccatgttcaacacgtcccaccccttctaccctgagtttgtccgcagcctcaacatgtcctggagggagaactgtgaagccagcacctacctgggccctgcgctgtcagccgccctgatgtttgacgccgtgcacgtggtggtgagcgctgtccgagagctgaaccgcagccaggagatcggtgtgaagcctctggcctgtacatcggccaacatttggccccacgggaccagcctcatgaactacctgcgcatggtagagtatgatgggctgaccgggcgggtcgagttcaacagcaaagggcagagaaccaactacaccctgcgcatcctagaaaagtcccggcagggccaccgtgagattggggtgtggtactctaaccgcaccctggccatgaatgccaccaccctggacatcaacctgtcgcagacactggccaacaagaccctggtggtcacaaccatcctggagaacccatacgtcatgcgccggcccaacttccaggccctgtcggggaacgaacgcttcgagggcttctgcgtggacatgctgcgggagctggccgagctgctgcgcttccgctaccgcctgcggttggtggaggatgggctgtacggggcgcccgagcccaacggctcctggacgggcatggttggcgagctcatcaaccggaaggcagacctggctgtggccgccttcaccatcacagctgagcgggagaaggtcatcgacttttccaagccctttatgaccctggggatcagcatcctctaccgagtgcacatgggccgcaagcctggctacttctccttcctggaccccttctcccctgctgtgtggctcttcatgcttcttgcctacctggctgtcagctgcgtcctgtttctggctgccaggctgagccctatgagtggtataacccacacccatgcctgcgggcacgcccccacatcctggagaaccagtacacgctgggcaacagcctgtggtttcccgtggggggcttcatgcagcagggctcggagatcatgccccgggcgctgtccacgcgctgtgtcagcggagtctggtgggccttcaccttgatcatcatctcctcctacacggccaacctggccccttcctcaccgtgcagcgcatggaggtgcctgtggagtcggccgatgacctggcagatcagaccaacatcgagtatggcaccatccacgccggctccaccatgaccttcttccagaattcacggtaccaaacgtaccagcgcatgtggaactacatgcagtcgaagcagcccagcgtgttcgtcaagagcacagaagagggcattgcccgcgtcctcaactcccgctacgccttcctgctcgagtccaccatgaacgaataccaccggcgcctcaactgcaacctcacccagatcgggggactcctcgacaccaagggctacggcattggcatgccgctgggctccccgttccgggatgagatcacactggccatcctgcagcttcaggagaacaaccggctggagatcctgaagcgcaagtggtgggaggggggccggtgccccaaggaggaggaccatcgagctaaaggtttgggcatggagaacattggtggcatttttatcgtgctcatctgtggcctcatcattgctgtcttcgtggcggtcatggaattcatatggtccacacggaggtcagctgagtccgaggaggtgtcggtgtgccaggagatgctgcaggagctgcgccacgccgtttcttgccgcaagacgtcgcgttcccgccggcgccgacgcccgggcggcccgagccgggccctgctgtcactgcgcgcggtccgcgagatgcgcctcagcaacggcaagctctactcggccggcgcgggcggggatgcgggcagcgcgcacgggggcccgcagcgcctcctggacgacccggggccccccagcggagcccgacccgccgcccccaccccctgcacccacgtgcgcgtctgccaggagtgccggcgcatccaggcgctgcgggcctcgggggccggcgcgcctccgcgtggcctgggcgtccccgccgaagccaccagcccgccccggccgcggcctggccccgccggcccccgggagctggcggagcacgagtga

SEQ ID NO: 436778 - DNA, 3148 bp, Homo sapiens
  misc_feature (1)..(1): n is a, c, g, or t
nggcattttggcttttaaaatcatttatgtactgatgacacctgtattagttatctattactgcatagcaaattgccccagatcttagcagctttgtaggtgagtcggtgccagggaggcagtgtagcttggtgcttggaggacaggctcaggagtcacaccgacctggattcaaatcccagttccggctggccactgtggtttatgcctatgattccagtgctttgggaggccaagccggaaggatcacttgaacctaagagttttgagaccagcttgggcaatatagcaagaccctgtctttacaaaaaattaaaaaattagccaggtgtggtatgcacctgtagtctcagctacaggctgaagtaggaggatcgcttgagcccaggaagtggaggtggcagtgaacaatgatcatgccactgtatgccagcctgggtaaccaagtgagattctgtcaaaagaaaggaagaaatctcagtttcctccctgactcagtgcacagtcttaagcaagtgtatcactttcgtcattcagaaacacttgcctcaggtgggatacctgtcccacaggatcatcataagacctgaataaacccagggtctggcacacagttggtgcctggtagatattaatcactttcatctgcccgtgtctctggttctgtggtagttggtcgggaagtatcttagtcaatgaagaaataagtatagaatagggtgtgtggggtgttgaagcccaaggatggcttaagggcaggatgtgaggttggggaggagaggtggtccagggagaggtgtggatggggattcgtctggtgtccaactgcatgccaagtcccgcactggatgcagacgaaagatgataaacacatagccatataatacagtgttaggtggtgacagctgctccaaagtaaattaaagggaagacactgacagggagtggggcgcttggtgccattttaaataaagtcatcagaatagactccctggggagccagcatgtgggcagagacctggatgaagtgcggagagggacattccaggcagaggcaaaggtcctaagacaggactgtgtgtgatgaatttggggagcagccaggaggctgatgaggctggagctgagagccgtgggggtgagggtgtctgagagtggccgaggggaggagcttgcaacaggaagccatggagagtcctgagcacaggaaaggtatggcctctgactcttcctaacactgtctctctggctgctgtgttgagaggagactgggctgggggtgaggagaggctgcagggaagaccctgggcacgtggtagaggcgggggaaggccgtggtgagggcacagtttggggtttggggcggtcagggctgcagggcccgatggctggtccagcccctcgtgtgcctgcccaggctccccgttccgggatgagatcacactggccatcctgcagcttcaggagaacaaccggctggagatcctgaagcgcaagtggtgggaggggggccggtgccccaaggaggaggaccatcgagctaaaggtcagttcccgcgtatggtgtccccttcccatagccccctcccagcccccttcccacacagccccaactccctttgccccccaactcccttcgccctccaggtttgggcatggagaacattggtggcatttttatcgtgctcatctgtggcctcatcattgctgtcttcgtggcggtcatggaattcatatggtccacacggaggtcagctgagtccgaggaggtgaggaggctgggggtgggggtgggcaggaacagggacccccaggggctgaggtgcgtgaagattgtggcattgggagccatacctggagggtggtggggatcgcgagaagggggcagaggaatgcaggaggtggggaagtaagagagctgatggggccagagaatcagcgcgtgaggaagaacaggagggaaagtaggcacagggagcaatgaggatgcagggagaggaggtgagggacaggatgtggggagccacagaggcagaaaagcaagaagaaataagaagagaaacagggccaagtgcagtggctcacacctgtaatcccagcactttgggaggccgaggctggcggatcacctgaggtcaggagttcaagatcagcctggccaacatggtgaaaccccatctctactaaaaatacaaaaattagccgggcatggtggtgcacacctgtaatcccagctactcgggaggctgagatgggaggatcgcttgaacccgggaggtggagattgcagtaagctgagattgcaccactgcactccagcctgggtgacagagggaaccagaagaggacacagccctggactggtcccacactgtgttcaggagggctgcttccatgtccctgggggccgcccagccacacccctgcatttccagacccattcgtgctcttgcacccctggactgctggttccctgcttcccctctctctgtcagcctccagcccttcctccccctcctcacatccagcggctgaccttacatctactccccagaccccagctctgcatccagctgcctgccagtgttctgcacttggcccaaggactcctctgaaggagccgtccatgctgctagtaaaggtgccctccacccgtgtccaggttgccttctcaaggacatccctccggcaagtctgtcctttcctcctgcagcatcagttgtcctctctttattggattcaggccaccaacgtacaaatatgctgtcatttctccagtcttaaaccctctcctgacctcactttccctcccagccaccgcccactttcttcccttctctttacagccttggcagcagtggggggtctccctgatgcttccagtttcttctttcctcccatttcctcttgccccccactccagtctggcatcggtccctgccactccactgaagccactcttgtcaccagcaacttccatgtctgaaattcccggtctcaggcctcatgtatatgaggtagcagtgggcttcggcacagccagtcactctcaatcctcaaagccccttcttccccttctcccacttctccggtcactccttcccaggctccctcgttgggtttctctttctccccaggctctgtttgt

SEQ ID NO: 436779 - DNA, 655 bp, Homo sapiens
agctccgtgggaggctgaggtgggagaattgcttgggtccaggaggttgaggctgcagtgagctgtgttcacgcctctccaccctagagcaggaccctgtctcaaaaacaaaaccaaaccactaaatgcttcgtaaggaaatttgaaagtgaggaatatatcttttctatttacccacaaatctaccatttgaagagggtgcccttcaccccttctggtacatccacgtttctatctggtgttgtgtttcttttacctgcagaacttcctttaatatttcttgctgtgcgggtctgctggcaattaattctcccagctttggttttgtatgaaaaatgtgttagtgtgtcttctttgagggatatttttgcctgctgtggaattctaggttgacagtttgttttgatttttctttcagcatgttgcatcatctttgggcttgcacactctctgacaagaagtcgactggcactgttatctttgattctctgaatgtaatatgtttccccccttctagctgcttttaagatgtttctctttattgctggttttcagcaattgattataatgtgtcttggtgcgttttataaatatgtgtgtttagcctacctggggtttatggagcttacatctgcaagtttatggttttcatcaa

SEQ ID NO: 436780 - DNA, 450 bp, Homo sapiens
gaccgcccgcgccacccccaggtgtcggtgtgccaggagatgctgcaggagctgcgccacgccgtttcttgccgcaagacgtcgcgttcccgccggcgccgacgcccgggcggcccgagccgggccctgctgtcactgcgcgcggtccgcgagatgcgcctcagcaacggcaagctctactcggccggcgcgggcggggatgcgggcagcgcgcacgggggcccgcagcgcctcctggacgacccggggccccccagcggagcccgacccgccgcccccaccccctgcacccacgtgcgcgtctgccaggagtgccggcgcatccaggcgctgcgggcctcgggggccggcgcgcctccgcgtggcctgggcgtccccgccgaagccaccagcccgccccggccgcggcctggccccgccggcccccgggagctggcggagcacgagtga

SEQ ID NO: 436781 - DNA, 2356 bp, Homo sapiens
agtcatcttcatagctgactctagaggatacacggagggccagcgcaccgtaccatcatcatcgacgccaacgcctccatctcccacctcatcctccgtaaggcctcggaactgggaatgacctcagcgttttacaagtacatcctcaccaccatggacttccccatcctgcatctggacggtattgtggaggactcctccaacatcctgggcttctccatgttcaacacgtcccaccccttctaccctgagtttgtccgcagcctcaacatgtcctggagggagaactgtgaagccagcacctacctgggccctgcgctgtcagccgccctgatgtttgacgccgtgcacgtggtggtgagcgctgtccgagagctgaaccgcagccaggagatcggtgtgaagcctctggcctgtacatcggccaacatttggccccacgggaccagcctcatgaactacctgcgcatggtagagtatgatgggctgaccgggcgggtcgagttcaacagcaaagggcagagaaccaactacaccctgcgcatcctagaaaagtcccggcagggccaccgtgagattggggtgtggtactctaaccgcaccctggccatgaatgccaccaccctggacatcaacctgtcgcagacactggccaacaagaccctggtggtcacaaccatcctggagaacccatacgtcatgcgccggcccaacttccaggccctgtcggggaacgaacgcttcgagggcttctgcgtggacatgctgcgggagctggccgagctgctgcgcttccgctaccgcctgcggttggtggaggatgggctgtacggggcgcccgagcccaacggctcctggacgggcatggttggcgagctcatcaaccggaaggcagacctggctgtggccgccttcaccatcacagctgagcgggagaaggtcatcgacttttccaagccctttatgaccctggggatcagcatcctctaccgagtgcacatgggccgcaagcctggctacttctccttcctggaccccttctcccctgctgtgtggctcttcatgcttcttgcctacctggctgtcagctgcgtcctgtttctggctgccaggctgagccctatgagtggtataacccacacccatgcctgcgggcacgcccccacatcctggagaaccagtacacgctgggcaacagcctgtggtttcccgtggggggcttcatgcagcagggctcggagatcatgccccgggcgctgtccacgcgctgtgtcagcggagtctggtgggccttcaccttgatcatcatctcctcctacacggccaacctggccccttcctcaccgtgcagcgcatggaggtgcctgtggagtcggccgatgacctggcagatcagaccaacatcgagtatggcaccatccacgccggctccaccatgaccttcttccagaattcacggtaccaaacgtaccagcgcatgtggaactacatgcagtcgaagcagcccagcgtgttcgtcaagagcacagaagagggcattgcccgcgtcctcaactcccgctacgccttcctgctcgagtccaccatgaacgaataccaccggcgcctcaactgcaacctcacccagatcgggggactcctcgacaccaagggctacggcattggcatgccgctgggctccccgttccgggatgagatcacactggccatcctgcagcttcaggagaacaaccggctggagatcctgaagcgcaagtggtgggaggggggccggtgccccaaggaggaggaccatcgagctaaaggtttgggcatggagaacattggtggcatttttatcgtgctcatctgtggcctcatcattgctgtcttcgtggcggtcatggaattcatatggtccacacggaggtcagctgagtccgaggaggtgtcggtgtgccaggagatgctgcaggagctgcgccacgccgtttcttgccgcaagacgtcgcgttcccgccggcgccgacgcccgggcggcccgagccgggccctgctgtcactgcgcgcggtccgcgagatgcgcctcagcaacggcaagctctactcggccggcgcgggcggggatgcgggcagcgcgcacgggggcccgcagcgcctcctggacgacccggggccccccagcggagcccgacccgccgcccccaccccctgcacccacgtgcgcgtctgccaggagtgccggcgcatccaggcgctgcgggcctcgggggccggcgcgcctccgcgtggcctgggcgtccccgccgaagccaccagcccgccccggccgcggcctggccccgccggcccccgggagctggcggagcacgagtga

SEQ ID NO: 436782 - DNA, 327 bp, Homo sapiens
cacagctagctatccaggcaccctctgagagatacatggccacatacattctgggagacctactcccaccaagacatgggaagcacacacaccttccccgctgtcaattccacttcccaagaaagacaccagagccacttcctcactcctgacccacccagtttcccattcctggggagagggaagttatttgagggtttgagggtggcagctcaggggcctttggggctcctctgcctaggcagcctcttatccatcccacccccgcctctgtcccaccgcagctgtcagccgccctgatgtttgacgccgtgcacgtggtggtga

SEQ ID NO: 436783 - DNA, 2097 bp, Homo sapiens
  misc_feature (1)..(1): n is a, c, g, or t
nggcattttggcttttaaaatcatttatgtactgatgacacctgtattagttatctattactgcatagcaaattgccccagatcttagcagctttgtaggtgagtcggtgccagggaggcagtgtagcttggtgcttggaggacaggctcaggagtcacaccgacctggattcaaatcccagttccggctggccactgtggtttatgcctatgattccagtgctttgggaggccaagccggaaggatcacttgaacctaagagttttgagaccagcttgggcaatatagcaagaccctgtctttacaaaaaattaaaaaattagccaggtgtggtatgcacctgtagtctcagctacaggctgaagtaggaggatcgcttgagcccaggaagtggaggtggcagtgaacaatgatcatgccactgtatgccagcctgggtaaccaagtgagattctgtcaaaagaaaggaagaaatctcagtttcctccctgactcagtgcacagtcttaagcaagtgtatcactttcgtcattcagaaacacttgcctcaggtgggatacctgtcccacaggatcatcataagacctgaataaacccagggtctggcacacagttggtgcctggtagatattaatcactttcatctgcccgtgtctctggttctgtggtagttggtcgggaagtatcttagtcaatgaagaaataagtatagaatagggtgtgtggggtgttgaagcccaaggatggcttaagggcaggatgtgaggttggggaggagaggtggtccagggagaggtgtggatggggattcgtctggtgtccaactgcatgccaagtcccgcactggatgcagacgaaagatgataaacacatagccatataatacagtgttaggtggtgacagctgctccaaagtaaattaaagggaagacactgacagggagtggggcgcttggtgccattttaaataaagtcatcagaatagactccctggggagccagcatgtgggcagagacctggatgaagtgcggagagggacattccaggcagaggcaaaggtcctaagacaggactgtgtgtgatgaatttggggagcagccaggaggctgatgaggctggagctgagagccgtgggggtgagggtgtctgagagtggccgaggggaggagcttgcaacaggaagccatggagagtcctgagcacaggaaaggtatggcctctgactcttcctaacactgtctctctggctgctgtgttgagaggagactgggctgggggtgaggagaggctgcagggaagaccctgggcacgtggtagaggcgggggaaggccgtggtgagggcacagtttggggtttggggcggtcagggctgcagggcccgatggctggtccagcccctcgtgtgcctgcccaggctccccgttccgggatgagatcacactggccatcctgcagcttcaggagaacaaccggctggagatcctgaagcgcaagtggtgggaggggggccggtgccccaaggaggaggaccatcgagctaaaggtttgggcatggagaacattggtggcatttttatcgtgctcatctgtggcctcatcattgctgtcttcgtggcggtcatggaattcatatggtccacacggaggtcagctgagtccgaggaggtgtcggtgtgccaggagatgctgcaggagctgcgccacgccgtttcttgccgcaagacgtcgcgttcccgccggcgccgacgcccgggcggcccgagccgggccctgctgtcactgcgcgcggtccgcgagatgcgcctcagcaacggcaagctctactcggccggcgcgggcggggatgcgggcagcgcgcacgggggcccgcagcgcctcctggacgacccggggccccccagcggagcccgacccgccgcccccaccccctgcacccacgtgcgcgtctgccaggagtgccggcgcatccaggcgctgcgggcctcgggggccggcgcgcctccgcgtggcctgggcgtccccgccgaagccaccagcccgccccggccgcggcctggccccgccggcccccgggagctggcggagcacgagtga

SEQ ID NO: 436784 - DNA, 1176 bp, Homo sapiens
agtctgtagcccttttgtgtgagtgcctggcaagggtgacgtggggctgtttctgcgggcacagctgcagcaattaccggagtggaggcagggcccaggcagcactgccctccaagatcttcccttgggcttttcagcagtaaggggacatgcaccccaagggcctccacttggcctgaccttgctgcgggggctctctgtccccaggaacagtagagatggcaagcttatcgagaccctctctgcccagctgcctctgctccttcctcctcctcctcctcctccaagtgtcttccagctatgcagggcagttcagagtgataggaccaagacaccctatccgggctctggtcggggatgaagtggaattgccatgtcgcatatctcctgggaagaacgctacaggcatggaggtggggtggtaccgcccccccttctctagggtggttcatctctacagaaatggcaaggaccaagatggagaccaggcacctgaatatcggggccggacagagctgctgaaagatgctattggtgagggaaaggtgactctcaggatccggaatgtaaggttctcagatgaaggaggtttcacctgcttcttccgagatcattcttaccaagaggaggcagcaatggaattgaaagtagaagatcctttctactgggtgagccctggagtgctggttctcctcgcggtgctgcctgtgctcctcctgcagatcactgttggcctcgtcttcctctgcctgcagtacagactgagaggaaaacttcgagcagagatagagaatctccaccggacttttgagtcctttggtgttctaggaccccaggttaaggaaccaaaaaagacagggcaattccttgaagagctactcttccacctggaagccctctctggctaaggacaggcaggtgcccctctctccatcagaggacacctgtactggagagcaacacaggatggtctctgccatgaactggaggccaggaatctcctcactgaaaattacagtatggtaactttgcaaatggtggttgtttcttccaagactccagccctgattgcgcaaaactgaaaggcatgtgaagggaaggaagaggaagagtgcaaaacattgaagagagagctgagtgagctgaagagtgaggatatgagtagccccaacccaa

SEQ ID NO: 436785 - DNA, 1131 bp, Homo sapiens
agtctgtagcccttttgtgtgagtgcctggcaagggtgacgtggggctgtttctgcgggcacagctgcagcaattaccggagtggaggcagggcccaggcagcactgccctccaagatcttcccttgggcttttcagcagtaaggggacatgcaccccaagggcctccacttggcctgaccttgctgcgggggctctctgtccccaggaacagtagagatggcaagcttatcgagaccctctctgcccagctgcctctgctccttcctcctcctcctcctcctccaagtgtcttccagctatgcagggcagttcagagtgataggaccaagacaccctatccgggctctggtcggggatgaagtggaattgccatgtcgcatatctcctgggaagaacgctacaggcatggaggtggggtggtaccgcccccccttctctagggtggttcatctctacagaaatggcaaggaccaagatggagaccaggcacctgaatatcggggccggacagagctgctgaaagatgctattggtgagggaaaggtgactctcaggatccggaatgtaaggttctcagatgaaggaggtttcacctgcttcttccgagatcattcttaccaagaggaggcagcaatggaattgaaagtagaagatcctttctactgggtgagccctggagtgctggttctcctcgcggtgctgcctgtgctcctcctgcagatcactgttggcctcgtcttcctctgcctgcagtacagactgagaggaaaacttcgagcagagatagagaatctccaccggacttttgcagggcaattccttgaagagctactcttccacctggaagccctctctggctaaggacaggcaggtgcccctctctccatcagaggacacctgtactggagagcaacacaggatggtctctgccatgaactggaggccaggaatctcctcactgaaaattacagtatggtaactttgcaaatggtggttgtttcttccaagactccagccctgattgcgcaaaactgaaaggcatgtgaagggaaggaagaggaagagtgcaaaacattgaagagagagctgagtgagctgaagagtgaggatatgagtagccccaacccaa

SEQ ID NO: 436786 - DNA, 1190 bp, Homo sapiens
agtctgtagcccttttgtgtgagtgcctggcaagggtgacgtggggctgtttctgcgggcacagctgcagcaattaccggagtggaggcagggcccaggcagcactgccctccaagatcttcccttgggcttttcagcagtaaggggacatgcaccccaagggcctccacttggcctgaccttgctgcgggggctctctgtccccaggaacagtagagatggcaagcttatcgagaccctctctgcccagctgcctctgctccttcctcctcctcctcctcctccaagtgtcttccagctatgcagggcagttcagagtgataggaccaagacaccctatccgggctctggtcggggatgaagtggaattgccatgtcgcatatctcctgggaagaacgctacaggcatggaggtggggtggtaccgcccccccttctctagggtggttcatctctacagaaatggcaaggaccaagatggagaccaggcacctgaatatcggggccggacagagctgctgaaagatgctattggtgagggaaaggtgactctcaggatccggaatgtaaggttctcagatgaaggaggtttcacctgcttcttccgagatcattcttaccaagaggaggcagcaatggaattgaaagtagaagatcctttctactgggtgagccctggagtgctggttctcctcgcggtgctgcctgtgctcctcctgcagatcactgttggcctcgtcttcctctgcctgcagtacagactgagaggagggtgccctgctggaagataaccctgtttgtaattgtgccggttcttggacccttggttgccttgatcatctgctacaactggctacatcgaagactagcagggcaattccttgaagagctactcttccacctggaagccctctctggctaaggacaggcaggtgcccctctctccatcagaggacacctgtactggagagcaacacaggatggtctctgccatgaactggaggccaggaatctcctcactgaaaattacagtatggtaactttgcaaatggtggttgtttcttccaagactccagccctgattgcgcaaaactgaaaggcatgtgaagggaaggaagaggaagagtgcaaaacattgaagagagagctgagtgagctgaagagtgaggatatgagtagccccaacccaa

SEQ ID NO: 436787 - DNA, 897 bp, Homo sapiens
agtctgtagcccttttgtgtgagtgcctggcaagggtgacgtggggctgtttctgcgggcacagctgcagcaattaccggagtggaggcagggcccaggcagcactgccctccaagatcttcccttgggcttttcagcagtaaggggacatgcaccccaagggcctccacttggcctgaccttgctgcgggggctctctgtccccaggaacagtagagatggcaagcttatcgagaccctctctgcccagctgcctctgctccttcctcctcctcctcctcctccaagtgtcttccagctatgcagatcctttctactgggtgagccctggagtgctggttctcctcgcggtgctgcctgtgctcctcctgcagatcactgttggcctcgtcttcctctgcctgcagtacagactgagaggaaaacttcgagcagagatagagaatctccaccggacttttgatccccactttctgagggtgccctgctggaagataaccctgtttgtaattgtgccggttcttggacccttggttgccttgatcatctgctacaactggctacatcgaagactagcagggcaattccttgaagagctactcttccacctggaagccctctctggctaaggacaggcaggtgcccctctctccatcagaggacacctgtactggagagcaacacaggatggtctctgccatgaactggaggccaggaatctcctcactgaaaattacagtatggtaactttgcaaatggtggttgtttcttccaagactccagccctgattgcgcaaaactgaaaggcatgtgaagggaaggaagaggaagagtgcaaaacattgaagagagagctgagtgagctgaagagtgaggatatgagtagccccaacccaa

SEQ ID NO: 436788 - DNA, 1245 bp, Homo sapiens
agtctgtagcccttttgtgtgagtgcctggcaagggtgacgtggggctgtttctgcgggcacagctgcagcaattaccggagtggaggcagggcccaggcagcactgccctccaagatcttcccttgggcttttcagcagtaaggggacatgcaccccaagggcctccacttggcctgaccttgctgcgggggctctctgtccccaggaacagtagagatggcaagcttatcgagaccctctctgcccagctgcctctgctccttcctcctcctcctcctcctccaagtgtcttccagctatgcagggcagttcagagtgataggaccaagacaccctatccgggctctggtcggggatgaagtggaattgccatgtcgcatatctcctgggaagaacgctacaggcatggaggtggggtggtaccgcccccccttctctagggtggttcatctctacagaaatggcaaggaccaagatggagaccaggcacctgaatatcggggccggacagagctgctgaaagatgctattggtgagggaaaggtgactctcaggatccggaatgtaaggttctcagatgaaggaggtttcacctgcttcttccgagatcattcttaccaagaggaggcagcaatggaattgaaagtagaagatcctttctactgggtgagccctggagtgctggttctcctcgcggtgctgcctgtgctcctcctgcagatcactgttggcctcgtcttcctctgcctgcagtacagactgagaggaaaacttcgagcagagatagagaatctccaccggacttttgatccccactttctgagggtgccctgctggaagataaccctgtttgtaattgtgccggttcttggacccttggttgccttgatcatctgctacaactggctacatcgaagactagcagggcaattccttgaagagctactcttccacctggaagccctctctggctaaggacaggcaggtgcccctctctccatcagaggacacctgtactggagagcaacacaggatggtctctgccatgaactggaggccaggaatctcctcactgaaaattacagtatggtaactttgcaaatggtggttgtttcttccaagactccagccctgattgcgcaaaactgaaaggcatgtgaagggaaggaagaggaagagtgcaaaacattgaagagagagctgagtgagctgaagagtgaggatatgagtagccccaacccaa

SEQ ID NO: 436789 - DNA, 918 bp, Homo sapiens
agtctgtagcccttttgtgtgagtgcctggcaagggtgacgtggggctgtttctgcgggcacagctgcagcaattaccggagtggaggcagggcccaggcagcactgccctccaagatcttcccttgggcttttcagcagtaaggggacatgcaccccaagggcctccacttggcctgaccttgctgcgggggctctctgtccccaggaacagtagagatggcaagcttatcgagaccctctctgcccagctgcctctgctccttcctcctcctcctcctcctccaagtgtcttccagctatgcagggcagttcagagtgataggaccaagacaccctatccgggctctggtcggggatgaagtggaattgccatgtcgcatatctcctgggaagaacgctacaggcatggaggtggggtggtaccgcccccccttctctagggtggttcatctctacagaaatggcaaggaccaagatggagaccaggcacctgaatatcggggccggacagagctgctgaaagatgctattggtgagggaaaggtgactctcaggatccggaatgtaaggttctcagatgaaggaggtttcacctgcttcttccgagatcattcttaccaagaggaggcagcaatggaattgaaagtagaaggtgagtagtgccatataatattaggtattaactgttgggtggccaagaacaattattctctcaactgagatgagatccctcaacccaaacatctcagtcctgggaatgatttccataaaaatgtacacatcaataaacagaaactcatgcttagggatgtctgttgcatcattattcagagtagcaaggaaattgggatcaaaatcaatgcctttgagtaggtaagtgacagaatgaacaatggtagccatactgtgaatatta

SEQ ID NO: 436790 - DNA, 1121 bp, Homo sapiens
agtctgtagcccttttgtgtgagtgcctggcaagggtgacgtggggctgtttctgcgggcacagctgcagcaattaccggagtggaggcagggcccaggcagcactgccctccaagatcttcccttgggcttttcagcagtaaggggacatgcaccccaagggcctccacttggcctgaccttgctgcgggggctctctgtccccaggaacagtagagatggcaagcttatcgagaccctctctgcccagctgcctctgctccttcctcctcctcctcctcctccaagtgtcttccagctatgcagggcagttcagagtgataggaccaagacaccctatccgggctctggtcggggatgaagtggaattgccatgtcgcatatctcctgggaagaacgctacaggcatggaggtggggtggtaccgcccccccttctctagggtggttcatctctacagaaatggcaaggaccaagatggagaccaggcacctgaatatcggggccggacagagctgctgaaagatgctattggtgagggaaaggtgactctcaggatccggaatgtaaggttctcagatgaaggaggtttcacctgcttcttccgagatcattcttaccaagaggaggcagcaatggaattgaaagtagaagatcctttctactgggtgagccctggagtgctggttctcctcgcggtgctgcctgtgctcctcctgcagatcactgttggcctcgtcttcctctgcctgcagtacagactgagaggaaaacttcgagcagagatagagaatctccaccggacttttgatccccactttctgtcttccacctggaagccctctctggctaaggacaggcaggtgcccctctctccatcagaggacacctgtactggagagcaacacaggatggtctctgccatgaactggaggccaggaatctcctcactgaaaattacagtatggtaactttgcaaatggtggttgtttcttccaagactccagccctgattgcgcaaaactgaaaggcatgtgaagggaaggaagaggaagagtgcaaaacattgaagagagagctgagtgagctgaagagtgaggatatgagtagccccaacccaa

SEQ ID NO: 436791 - DNA, 664 bp, Homo sapiens
  misc_feature (269)..(269): n is a, c, g, or t
gacgcgagaggatggtagcggagcgcacccacaaagcggcagccaccggtgcccgcggccctggggagttgggcgcgcccgggacggtggctctggtggcggcgcgggcggagcgcggcgcacggctgccgagtccagggtcgtgcgggctgctgacgctggccctctgctcgctggcactcagcctgctcgcccactttcggacggccgagctgcaggcccgggtgctgcgcctggaagcggagcgcggggagcagcaaatggagacngctattttgggacgagtcaatcaactgctggacgagaaatggaagctccactcaaggaggcgccgggaggccccaaagacatctccaggatgtaactgcccaccagggcctttgcacttgctgtgctggtgtgcagtgaccatcccttggactccctcgtgccgcctcttcattatctaggtttcgactccaacaccacctcctcagaaaggccttcctcagtcatccaagctaaagcattttcccaaattccagccccgtctactatatttgcatattgtaacttctcatagcagtcatcagtgtgtaaatttttcccatttatttatttctgtttgttgtctatcacctgcggctagagataataataataataagccaatacttgtatggtg

SEQ ID NO: 436792 - DNA, 2904 bp, Homo sapiens
atctcatacgcacgtgtacagacgccacgtggattgacgccacgtgtacagacgccacgtggacagacgccacgttgagggtgcgtcagggaaatcatgcagccatcaggacacaggctccgggacgtcgagcatcatcctctcctggctgaaaatgacaactatgactcttcatcgtcctcctcctccgaggctgacgtggctgaccgggtctggttcatccgtgacggctgcggcatgatctgtgctgtcatgacgtggcttctggtcgcctatgcagacttcgtggtgactttcgtcatgctgctgccttccaaagacttctggtactctgtggtcaacggggtcatctttaactgcttggccgtgcttgccctgtcatcccacctgagaaccatgctcaccgaccctggggcagtacccaaaggaaacgctacgaaagaatacatggagagcttgcagctgaagcccggggaagtcatctacaagtgccccaagtgctgctgtattaaacccgagcgcgcccaccactgcagtatttgcaaaagatgtattcggaaaatggatcatcactgcccgtgggtgaacaattgtgtaggagaaaagaatcaaagattttttgtgctcttcactatgtatatagctctgtcttcagtccatgctctgatcctttgtggatttcagttcatctcctgtgtccgagggcagtggactgaatgcagtgatttttcacctccgataactgtaatcctgttgatcttcctgtgccttgagggtcttctgtttttcactttcactgcagttatgtttggcacccaaatccactccatatgcaacgacgagacggagatcgagcgattgaaaagtgagaagcccacatgggagcggaggctgcgatgggaagggatgaagtccgtctttggggggcccccctcactcctctggatgaatccctttgtgggcttccgatttaggcgactgcccacgagacccagaaaaggcggcccggagttctcagtgtgaggcgtggctcatcagactgaaacttgctcacagacttccagttatttatttggggtctgaaggatatcaacagctcatctgtgaccaacagggcaactggaacctacacaaaccaattgcttgcagcaagcagagttttatatatttatagtcacagatggcagaggaagaggctctcagtccccacctgtacaacaacggaaaggtgtgtggccacacgaagaagccaaacgccgtggcctcctgcagagctggggcttctgtggagaatacttcgggttattacatgggttattcaaatcctgggtcctgagctgctgtttccaatcatgaagaaaaacagtgaatccagtgaacagggattctccaagcagtcatttcagggggctcctgctgaccccgccactcagcagtgcactccccggatcacagcagggcgtttacatagaaagacgttttggtctcgattagctccgatgctttgcactgaagttgcaaaagatctgtgcactgaacagtgaaggtggcttccggcacactccccgctgccccggaagagacatcctttgaccctctcagcaagtctgtgtgtgtgcgtgtctgtgcgtgtgcgcgcgtgtgtgcatgtgtgtcaaaattgccagtgttgtttaggcaatgtaacatttaccggctgtgtacagcaaacaagctattttttagaaaccgacgtttcagggaagaggggagagagccgcggggtcctgcccgtggttactatgaatgtattgctgttggaggacatctcgatccaaagaacagccgttcctgtgcggcccttcgttgccctcctgctttcattttttaaagaaatcttgagtgcttgagggccttggaactgattttttttttttgttccagccaaattagcagtgtataaatggcacctaggtaagagcagagctgcggctcggtgacttgatacttggggcagcccgatgctgtgtgtggggcaggggaggcatccttactggagaggcagggcccagccattgggcacctctgggaaggggaggggaccatgaggcagccagcccctggcaggggcgactgtgccaccgcaggcagcgctccagtcgggaatggccaggatggcgccctcttgttggagtttttggttagcttttacgttttcttctccacccacggcacaggtgataaaataggatccttggtgcggagcttaaaattatgccagaaagccaacagctcccctcgtggggccttgccttaaacttgcctggtttgtacattttttgccggacgcatcaagaagcaatctgtgacaaagtctgagggtcttcctttatgcttgccctccacactaagagaagttggcgtctccctcctgggaattgttttgcctttctgttcatctgtgaactgttttttgtttttaattactctgtaccccatccgaatcagggcttctaccactgctgatgcaaaaccacaaagggacctacctgagccaccgtcctagccaagcgagcaaacctgcagggggtttggaagtggacttggtcaccgcagaagcgtgtgcgccgttgggggaagagctgcgtcacagccagagggacaaagtgtgggtgatcctggagacgccagtttccgagattgttctgcatattcatttgcacattgttgtctgggttggacatgcgtgtgggcttcagtgtgaggcttttaatatgtatatcctgttatcaataaaacaattatccaagtggttgaatcctgtgagacttggcaagtgtgtgcaaatcaagtatacttgacttttcaacctcttctttcaatgtaacttttatatgaaataaagtaatcaattaacagttctca

SEQ ID NO: 436793 - DNA, 3309 bp, Homo sapiens
acttccggcgctcgcaccgccccgctctccagccaaggctccgggctgaggcatttgcttggctgcagcctccttccgacctgcccggcgggacccaggggaccaagccgagccgagccgcggggcccgctccagcccggccatgagcgcggccgcatgatgcgtccctgcctcggccgctgcagtcgccgccgccgccgccgcaggccgggaggagccgcagcgccgggcgaccccgcccgggcctcggatccgatcacataggacagtatgcaccttaagatcctgaagaaacggcacaaaatgttcaagtgatgtttagaaataacttgtgagggtgcgtcagggaaatcatgcagccatcaggacacaggctccgggacgtcgagcatcatcctctcctggctgaaaatgacaactatgactcttcatcgtcctcctcctccgaggctgacgtggctgaccgggtctggttcatccgtgacggctgcggcatgatctgtgctgtcatgacgtggcttctggtcgcctatgcagacttcgtggtgactttcgtcatgctgctgccttccaaagacttctggtactctgtggtcaacggggtcatctttaactgcttggccgtgcttgccctgtcatcccacctgagaaccatgctcaccgaccctgaaaaatccagtgactgccgaccatctgcctgcacagtgaaaactgggctggacccaacccttgtgggcatttgtggtgagggaaccgagtctgtgcaaagcctcctgcttggggcagtacccaaaggaaacgctacgaaagaatacatggagagcttgcagctgaagcccggggaagtcatctacaagtgccccaagtgctgctgtattaaacccgagcgcgcccaccactgcagagcatggaatactgaaaaatcaaactctccttttcagtatttgcaaaagatgtattcggaaaatggatcatcactgcccgtgggtgaacaattgtgtaggagaaaagaatcaaagattttttgtgctcttcactatgtatatagctctgtcttcagtccatgctctgatcctttgtggatttcagttcatctcctgtgtccgagggcagtggactgaatgcagtgatttttcacctccgataactgtaatcctgttgatcttcctgtgccttgagggtcttctgtttttcactttcactgcagttatgtttggcacccaaatccactccatatgcaacgacgagacggagatcgagcgattgaaaagtgagaagcccacatgggagcggaggctgcgatgggaagggatgaagtccgtctttggggggcccccctcactcctctggatgaatccctttgtgggcttccgatttaggcgactgcccacgagacccagaaaaggcggcccggagttctcagtgtgaggcgtggctcatcagactgaaacttgctcacagacttccagttatttatttggggtctgaaggatatcaacagctcatctgtgaccaacagggcaactggaacctacacaaaccaattgcttgcagcaagcagagttttatatatttatagtcacagatggcagaggaagaggctctcagtccccacctgtacaacaacggaaaggtgtgtggccacacgaagaagccaaacgccgtggcctcctgcagagctggggcttctgtggagaatacttcgggttattacatgggttattcaaatcctgggtcctgagctgctgtttccaatcatgaagaaaaacagtgaatccagtgaacagggattctccaagcagtcatttcagggggctcctgctgaccccgccactcagcagtgcactccccggatcacagcagggcgtttacatagaaagacgttttggtctcgattagctccgatgctttgcactgaagttgcaaaagatctgtgcactgaacagtgaaggtggcttccggcacactccccgctgccccggaagagacatcctttgaccctctcagcaagtctgtgtgtgtgcgtgtctgtgcgtgtgcgcgcgtgtgtgcatgtgtgtcaaaattgccagtgttgtttaggcaatgtaacatttaccggctgtgtacagcaaacaagctattttttagaaaccgacgtttcagggaagaggggagagagccgcggggtcctgcccgtggttactatgaatgtattgctgttggaggacatctcgatccaaagaacagccgttcctgtgcggcccttcgttgccctcctgctttcattttttaaagaaatcttgagtgcttgagggccttggaactgattttttttttttgttccagccaaattagcagtgtataaatggcacctaggtaagagcagagctgcggctcggtgacttgatacttggggcagcccgatgctgtgtgtggggcaggggaggcatccttactggagaggcagggcccagccattgggcacctctgggaaggggaggggaccatgaggcagccagcccctggcaggggcgactgtgccaccgcaggcagcgctccagtcgggaatggccaggatggcgccctcttgttggagtttttggttagcttttacgttttcttctccacccacggcacaggtgataaaataggatccttggtgcggagcttaaaattatgccagaaagccaacagctcccctcgtggggccttgccttaaacttgcctggtttgtacattttttgccggacgcatcaagaagcaatctgtgacaaagtctgagggtcttcctttatgcttgccctccacactaagagaagttggcgtctccctcctgggaattgttttgcctttctgttcatctgtgaactgttttttgtttttaattactctgtaccccatccgaatcagggcttctaccactgctgatgcaaaaccacaaagggacctacctgagccaccgtcctagccaagcgagcaaacctgcagggggtttggaagtggacttggtcaccgcagaagcgtgtgcgccgttgggggaagagctgcgtcacagccagagggacaaagtgtgggtgatcctggagacgccagtttccgagattgttctgcatattcatttgcacattgttgtctgggttggacatgcgtgtgggcttcagtgtgaggcttttaatatgtatatcctgttatcaataaaacaattatccaagtggttgaatcctgtgagacttggcaagtgtgtgcaaatcaagtatacttgacttttcaacctcttctttcaatgtaacttttatatgaaataaagtaatcaattaacagttctca

SEQ ID NO: 436794 - DNA, 2551 bp, Homo sapiens
gcctgatgtttttaactttcattctccccaactaaagtacattcttcttatatggtagggggcagtacccaaaggaaacgctacgaaagaatacatggagagcttgcagctgaagcccggggaagtcatctacaagtgccccaagtgctgctgtattaaacccgagcgcgcccaccactgcagtatttgcaaaagatgtattcggaaaatggatcatcactgcccgtgggtgaacaattgtgtaggagaaaagaatcaaagattttttgtgctcttcactatgtatatagctctgtcttcagtccatgctctgatcctttgtggatttcagttcatctcctgtgtccgagggcagtggactgaatgcagtgatttttcacctccgataactgtaatcctgttgatcttcctgtgccttgagggtcttctgtttttcactttcactgcagttatgtttggcacccaaatccactccatatgcaacgacgagacggagatcgagcgattgaaaagtgagaagcccacatgggagcggaggctgcgatgggaagggatgaagtccgtctttggggggcccccctcactcctctggatgaatccctttgtgggcttccgatttaggcgactgcccacgagacccagaaaaggcggcccggagttctcagtgtgaggcgtggctcatcagactgaaacttgctcacagacttccagttatttatttggggtctgaaggatatcaacagctcatctgtgaccaacagggcaactggaacctacacaaaccaattgcttgcagcaagcagagttttatatatttatagtcacagatggcagaggaagaggctctcagtccccacctgtacaacaacggaaaggtgtgtggccacacgaagaagccaaacgccgtggcctcctgcagagctggggcttctgtggagaatacttcgggttattacatgggttattcaaatcctgggtcctgagctgctgtttccaatcatgaagaaaaacagtgaatccagtgaacagggattctccaagcagtcatttcagggggctcctgctgaccccgccactcagcagtgcactccccggatcacagcagggcgtttacatagaaagacgttttggtctcgattagctccgatgctttgcactgaagttgcaaaagatctgtgcactgaacagtgaaggtggcttccggcacactccccgctgccccggaagagacatcctttgaccctctcagcaagtctgtgtgtgtgcgtgtctgtgcgtgtgcgcgcgtgtgtgcatgtgtgtcaaaattgccagtgttgtttaggcaatgtaacatttaccggctgtgtacagcaaacaagctattttttagaaaccgacgtttcagggaagaggggagagagccgcggggtcctgcccgtggttactatgaatgtattgctgttggaggacatctcgatccaaagaacagccgttcctgtgcggcccttcgttgccctcctgctttcattttttaaagaaatcttgagtgcttgagggccttggaactgattttttttttttgttccagccaaattagcagtgtataaatggcacctaggtaagagcagagctgcggctcggtgacttgatacttggggcagcccgatgctgtgtgtggggcaggggaggcatccttactggagaggcagggcccagccattgggcacctctgggaaggggaggggaccatgaggcagccagcccctggcaggggcgactgtgccaccgcaggcagcgctccagtcgggaatggccaggatggcgccctcttgttggagtttttggttagcttttacgttttcttctccacccacggcacaggtgataaaataggatccttggtgcggagcttaaaattatgccagaaagccaacagctcccctcgtggggccttgccttaaacttgcctggtttgtacattttttgccggacgcatcaagaagcaatctgtgacaaagtctgagggtcttcctttatgcttgccctccacactaagagaagttggcgtctccctcctgggaattgttttgcctttctgttcatctgtgaactgttttttgtttttaattactctgtaccccatccgaatcagggcttctaccactgctgatgcaaaaccacaaagggacctacctgagccaccgtcctagccaagcgagcaaacctgcagggggtttggaagtggacttggtcaccgcagaagcgtgtgcgccgttgggggaagagctgcgtcacagccagagggacaaagtgtgggtgatcctggagacgccagtttccgagattgttctgcatattcatttgcacattgttgtctgggttggacatgcgtgtgggcttcagtgtgaggcttttaatatgtatatcctgttatcaataaaacaattatccaagtggttgaatcctgtgagacttggcaagtgtgtgcaaatcaagtatacttgacttttcaacctcttctttcaatgtaacttttatatgaaataaagtaatcaattaacagttctca

SEQ ID NO: 436795 - DNA, 3553 bp, Homo sapiens
acttccggcgctcgcaccgccccgctctccagccaaggctccgggctgaggcatttgcttggctgcagcctccttccgacctgcccggcgggacccaggggaccaagccgagccgagccgcggggcccgctccagcccggccatgagcgcggccgcatgatgcgtccctgcctcggccgctgcagtcgccgccgccgccgccgcaggccgggaggagccgcagcgccgggcgaccccgcccgggcctcggatccgatcacataggacagtatgcaccttaagatcctgaagaaacggcacaaaatgttcaagtgatgtttagaaataacttgtgagggtgcgtcagggaaatcatgcagccatcaggacacaggctccgggacgtcgagcatcatcctctcctggctgaaaatgacaactatgactcttcatcgtcctcctcctccgaggctgacgtggctgaccgggtctggttcatccgtgacggctgcggcatgatctgtgctgtcatgacgtggcttctggtcgcctatgcagacttcgtggtgactttcgtcatgctgctgccttccaaagacttctggtactctgtggtcaacggggtcatctttaactgcttggccgtgcttgccctgtcatcccacctgagaaccatgctcaccgaccctgaaaaatccagtgactgccgaccatctgcctgcacagtgaaaactgggctggacccaacccttgtgggcatttgtggtgagggaaccgagtctgtgcaaagcctcctgcttggggcagtacccaaaggaaacgctacgaaagaatacatggagagcttgcagctgaagcccggggaagtcatctacaagtgccccaagtgctgctgtattaaacccgagcgcgcccaccactgcagtatttgcaaaagatgtattcggaaaatggatcatcactgcccgtgggtgaacaattgtgtaggagaaaagaatcaaagattttttgtgctcttcactatgtatatagctctgtcttcagtccatgctctgatcctttgtggatttcagttcatctcctgtgtccgagggcagtggactgaatgcagtgatttttcacctccgataactgtaatcctgttgatcttcctgtgccttgagggtcttctgtttttcactttcactgcagttatgtttggcacccaaatccactccatatgcaacgacgagacggagatcgagcgattgaaaagtgagaagcccacatgggagcggaggctgcgatgggaagggatgaagtccgtctttggggggcccccctcactcctctggatgaatccctttgtgggcttccgatttaggcgactgcccacgagacccagaaaaggcggcccggagttctcagtgtgaggcgtggctcatcagactgaaacttgctcacagacttccagttatttatttggggtctgaaggatatcaacagctcatctgtgaccaacagggcaactggaacctacacaaaccaattgcttgcagcaagcagagttttatatatttatagtcacagatggcagaggaagaggctctcagtccccacctgtacaacaacggaaaggtgtgtggccacacgaagaagccaaacgccgtggcctcctgcagagctggggcttctgtggagaatacttcgggttattacatgggttattcaaatcctgggtcctgagctgctgtttccaatcatgaagaaaaacagtgaatccagtgaacagggattctccaagcagtcatttcagggggctcctgctgaccccgccactcagcagtgcactccccggatcacagcagggcgtttacatagaaagacgttttggtctcgattagctccgatgctttgcactgaagttgcaaaagatctgtgcactgaacagtgaaggtggcttccggcacactccccgctgccccggaagagacatcctttgaccctctcagcaagtctgtgtgtgtgcgtgtctgtgcgtgtgcgcgcgtgtgtgcatgtgtgtcaaaattgccagtgttgtttaggcaatgtaacatttaccggctgtgtacagcaaacaagctattttttagaaaccgacgtttcagggaagaggggagagagccgcggggtcctgcccgtggttactatgaatgtattgctgttggaggacatctcgatccaaagaacagccgttcctgtgcggcccttcgttgccctcctgctttcattttttaaagaaatcttgagtgcttgagggccttggaactgattttttttttttgttccagccaaattagcagtgtataaatggcacctaggtaagagcagagctgcggctcggtgacttgatacttggggcagcccgatgctgtgtgtggggcaggggaggcatccttactggagaggcagggcccagccattgggcacctctgggaaggggaggggaccatgaggcagccagcccctggcaggggcgactgtgccaccgcaggcagcgctccagtcgggaatggccaggatggcgccctcttgttggagtttttggttagcttttacgttttcttctccacccacggcacaggtgataaaataggatccttggtgcggagcttaaaattatgccagaaagccaacagctcccctcgtggggccttgccttaaacttgcctggtttgtacattttttgccggacgcatcaagaagcaatctgtgacaaagtctgagggtcttcctttatgcttgccctccacactaagagaagttggcgtctccctcctgggaattgttttgcctttctgttcatctgtgaactgttttttgtttttaattactctgtaccccatccgaatcagggcttctaccactgctgatgcaaaaccacaaagggacctacctgagccaccgtcctagccaagcgagcaaacctgcagggggtttggaagtggacttggtcaccgcagaagcgtgtgcgccgttgggggaagagctgcgtcacagccagagggacaaagtgtgggtgatcctggagacgccagtttccgagattgttctgcatattcatttgcacattgttgtctgggttggacatgcgtgtgggcttcagtgtgaggcttttaatatgtatatcctgttatcaataaaacaattatccaagtggttgaatcctgtgagacttggcaagtgtgtgcaaatcaagtatacttgacttttcaacctcttctttcaatgtaacttttatatgaaataaagtaatcaattaacagttctcaaatggcttccaaagcgcccgttcttcctggatggtggtgttttcagggggtgcctttccgtgcttcgtgggcccagccccaggctgttaaggtcactcccaaacagtttccagaaactctaaatgcttttgtgcccatgacaagtgacctgggcactcaagcgcgactcacaaatgttgcccagtgagtactgttgcttgttgaatgtttaattcgactcccatcgttttacttagtcctttttttagtgcacgttgaaataaaaacaatgtttcaaaatc

SEQ ID NO: 436796 - DNA, 3019 bp, Homo sapiens
acttccggcgctcgcaccgccccgctctccagccaaggctccgggctgaggcatttgcttggctgcagcctccttccgacctgcccggcgggacccaggggaccaagccgagccgagccgcggggcccgctccagcccggccatgagcgcggccgcatgatgcgtccctgcctcggccgctgcagtcgccgccgccgccgccgcaggccgggaggagccgcagcgccgggcgaccccgcccgggcctcggatccgatcacataggacagtatgcaccttaagatcctgaagaaacggcacaaaatgttcaagtgatgtttagaaataacttgtgagggtgcgtcagggaaatcatgcagccatcaggacacaggctccgggacgtcgagcatcatcctctcctggctgaaaatgacaactatgactcttcatcgtcctcctcctccgaggctgacgtggctgaccgggtctggttcatccgtgacggctgcggcatgatctgtgctgtcatgacgtggcttctggtcgcctatgcagacttcgtggtgactttcgtcatgctgctgccttccaaagacttctggtactctgtggtcaacggggtcatctttaactgcttggccgtgcttgccctgtcatcccacctgagaaccatgctcaccgaccctgaaaaatccagtgactgccgaccatctgcctgcacagtgaaaactgggctggacccaacccttgtgggcatttgtggtgagggaaccgagtctgtgcaaagcctcctgcttggggcagtacccaaaggaaacgctacgaaagaatacatggagagcttgcagctgaagcccggggaagtcatctacaagtgccccaagtgctgctgtattaaacccgagcgcgcccaccactgcagtatttgcaaaagatgtattcggaaaatggatcatcactgcccgtgggtgaacaattgtgtaggagaaaagaatcaaagattttttgtgctcttcactatgtatatagctctgtcttcagtccatgctctgatcctttgtggatttcagttcatctcctgtgtccgagggcagtggactgaatgcagtgatttttcacctccgataactgtaatcctgttgatcttcctgtgccttgagggtcttctgtttttcactttcactgcagttatgtttggcacccaaatccactccatatgcaacgacgagacggagatcgagcgattgaaaagtgagaagcccacatgggagcggaggctgcgatgggaagggatgaagtccgtctttggggggcccccctcactcctctggatgaatccctttgtgggcttccgatttaggcgactgcccacgagacccagaaaaggcggcccggagttctcagtgtgaggcgtggctcatcagactgaaacttgctcacagacttccagttatttatttggggtctgaaggatatcaacagctcatctgtgaccaacagggcaactggaacctacacaaaccaattgcttgcagcaagcagagttttatatatttatagtcacagatggcagaggaagaggctctcagtccccacctgtacaacaacggaaaggtgtgtggccacacgaagaagccaaacgccgtggcctcctgcagagctggggcttctgtggagaatacttcgggttattacatgggttattcaaatcctgggtcctgagctgctgtttccaatcatgaagaaaaacagtgaatccagtgaacagggattctccaagcagtcatttcagggggctcctgctgaccccgccactcagcagtgcactccccggatcacagcagggcgtttacatagaaagacgttttggtctcgattagctccgatgctttgcactgaagttgcaaaagatctgtgcactgaacagtgaaggtggcttccggcacactccccgctgccccggaagagacatcctttgaccctctcagcaagtctgtgtgtgtgcgtgtctgtgcgtgtgcgcgcgtgtgtgcatgtgtgtcaaaattgccagtgttgtttaggcaatgtaacatttaccggctgtgtacagcaaacaagctattttttagaaaccgacgtttcagggaagaggggagagagccgcggggtcctgcccgtggttactatgaatgtattgctgttggaggacatctcgatccaaagaacagccgttcctgtgcggcccttcgttgccctcctgctttcattttttaaagaaatcttgagtgcttgagggccttggaactgattttttttttttgttccagccaaattagcagtgtataaatggcacctagggcttctaccactgctgatgcaaaaccacaaagggacctacctgagccaccgtcctagccaagcgagcaaacctgcagggggtttggaagtggacttggtcaccgcagaagcgtgtgcgccgttgggggaagagctgcgtcacagccagagggacaaagtgtgggtgatcctggagacgccagtttccgagattgttctgcatattcatttgcacattgttgtctgggttggacatgcgtgtgggcttcagtgtgaggcttttaatatgtatatcctgttatcaataaaacaattatccaagtggttgaatcctgtgagacttggcaagtgtgtgcaaatcaagtatacttgacttttcaacctcttctttcaatgtaacttttatatgaaataaagtaatcaattaacagttctcaaatggcttccaaagcgcccgttcttcctggatggtggtgttttcagggggtgcctttccgtgcttcgtgggcccagccccaggctgttaaggtcactcccaaacagtttccagaaactctaaatgcttttgtgcccatgacaagtgacctgggcactcaagcgcgactcacaaatgttgcccagtgagtactgttgcttgttgaatgtttaattcgactcccatcgttttacttagtcctttttttagtgcacgttgaaataaaaacaatgtttcaaaatc

SEQ ID NO: 436797 - DNA, 877 bp, Homo sapiens
acttccggcgctcgcaccgccccgctctccagccaaggctccgggctgaggcatttgcttggctgcagcctccttccgacctgcccggcgggacccaggggaccaagccgagccgagccgcggggcccgctccagcccggccatgagcgcggccgcatgatgcgtccctgcctcggccgctgcagtcgccgccgccgccgccgcaggccgggaggagccgcagcgccgggcgaccccgcccgggcctcggatccgatcacataggacagtatgcaccttaagatcctgaagaaacggcacaaaatgttcaagtgatgtttagaaataacttgtgagggtgcgtcagggaaatcatgcagccatcaggacacaggctccgggacgtcgagcatcatcctctcctggctgaaaatgacaactatgactcttcatcgtcctcctcctccgaggctgacgtggctgaccgggtctggttcatccgtgacggctgcggcatgatctgtgctgtcatgacgtggcttctggtcgcctatgcagacttcgtggtgactttcgtcatgctgctgccttccaaagacttctggtactctgtggtcaacggggtcatctttaactgcttggccgtgcttgccctgtcatcccacctgagaaccatgctcaccgaccctgtgagtactggctgcgtctctgggtggctctcttgtgtctggtctagtgtcctcgggtgtggctgaccctttggaggaagcagtgcacagggacatattgacatgggtgtggaacaagaaaggtggattgagctcattttgggagcagattccctttaggctgagaataaacataggccagacctagcgcagtgaaatacccctagttc

SEQ ID NO: 436798 - DNA, 3161 bp, Homo sapiens
acttccggcgctcgcaccgccccgctctccagccaaggctccgggctgaggcatttgcttggctgcagcctccttccgacctgcccggcgggacccaggggaccaagccgagccgagccgcggggcccgctccagcccggccatgagcgcggccgcatgatgcgtccctgcctcggccgctgcagtcgccgccgccgccgccgcaggccgggaggagccgcagcgccgggcgaccccgcccgggcctcggatccgatcacataggacagtatgcaccttaagatcctgaagaaacggcacaaaatgttcaagtgatgtttagaaataacttgtgagggtgcgtcagggaaatcatgcagccatcaggacacaggctccgggacgtcgagcatcatcctctcctggctgaaaatgacaactatgactcttcatcgtcctcctcctccgaggctgacgtggctgaccgggtctggttcatccgtgacggctgcggcatgatctgtgctgtcatgacgtggcttctggtcgcctatgcagacttcgtggtgactttcgtcatgctgctgccttccaaagacttctggtactctgtggtcaacggggtcatctttaactgcttggccgtgcttgccctgtcatcccacctgagaaccatgctcaccgaccctggggcagtacccaaaggaaacgctacgaaagaatacatggagagcttgcagctgaagcccggggaagtcatctacaagtgccccaagtgctgctgtattaaacccgagcgcgcccaccactgcagtatttgcaaaagatgtattcggaaaatggatcatcactgcccgtgggtgaacaattgtgtaggagaaaagaatcaaagattttttgtgctcttcactatgtatatagctctgtcttcagtccatgctctgatcctttgtggatttcagttcatctcctgtgtccgagggcagtggactgaatgcagtgatttttcacctccgataactgtaatcctgttgatcttcctgtgccttgagggtcttctgtttttcactttcactgcagttatgtttggcacccaaatccactccatatgcaacgacgagacggagatcgagcgattgaaaagtgagaagcccacatgggagcggaggctgcgatgggaagggatgaagtccgtctttggggggcccccctcactcctctggatgaatccctttgtgggcttccgatttaggcgactgcccacgagacccagaaaaggcggcccggagttctcagtgtgaggcgtggctcatcagactgaaacttgctcacagacttccagttatttatttggggtctgaaggatatcaacagctcatctgtgaccaacagggcaactggaacctacacaaaccaattgcttgcagcaagcagagttttatatatttatagtcacagatggcagaggaagaggctctcagtccccacctgtacaacaacggaaaggtgtgtggccacacgaagaagccaaacgccgtggcctcctgcagagctggggcttctgtggagaatacttcgggttattacatgggttattcaaatcctgggtcctgagctgctgtttccaatcatgaagaaaaacagtgaatccagtgaacagggattctccaagcagtcatttcagggggctcctgctgaccccgccactcagcagtgcactccccggatcacagcagggcgtttacatagaaagacgttttggtctcgattagctccgatgctttgcactgaagttgcaaaagatctgtgcactgaacagtgaaggtggcttccggcacactccccgctgccccggaagagacatcctttgaccctctcagcaagtctgtgtgtgtgcgtgtctgtgcgtgtgcgcgcgtgtgtgcatgtgtgtcaaaattgccagtgttgtttaggcaatgtaacatttaccggctgtgtacagcaaacaagctattttttagaaaccgacgtttcagggaagaggggagagagccgcggggtcctgcccgtggttactatgaatgtattgctgttggaggacatctcgatccaaagaacagccgttcctgtgcggcccttcgttgccctcctgctttcattttttaaagaaatcttgagtgcttgagggccttggaactgattttttttttttgttccagccaaattagcagtgtataaatggcacctaggtaagagcagagctgcggctcggtgacttgatacttggggcagcccgatgctgtgtgtggggcaggggaggcatccttactggagaggcagggcccagccattgggcacctctgggaaggggaggggaccatgaggcagccagcccctggcaggggcgactgtgccaccgcaggcagcgctccagtcgggaatggccaggatggcgccctcttgttggagtttttggttagcttttacgttttcttctccacccacggcacaggtgataaaataggatccttggtgcggagcttaaaattatgccagaaagccaacagctcccctcgtggggccttgccttaaacttgcctggtttgtacattttttgccggacgcatcaagaagcaatctgtgacaaagtctgagggtcttcctttatgcttgccctccacactaagagaagttggcgtctccctcctgggaattgttttgcctttctgttcatctgtgaactgttttttgtttttaattactctgtaccccatccgaatcagggcttctaccactgctgatgcaaaaccacaaagggacctacctgagccaccgtcctagccaagcgagcaaacctgcagggggtttggaagtggacttggtcaccgcagaagcgtgtgcgccgttgggggaagagctgcgtcacagccagagggacaaagtgtgggtgatcctggagacgccagtttccgagattgttctgcatattcatttgcacattgttgtctgggttggacatgcgtgtgggcttcagtgtgaggcttttaatatgtatatcctgttatcaataaaacaattatccaagtggttgaatcctgtgagacttggcaagtgtgtgcaaatcaagtatacttgacttttcaacctcttctttcaatgtaacttttatatgaaataaagtaatcaattaacagttctca

SEQ ID NO: 436799 - DNA, 3272 bp, Homo sapiens
acttccggcgctcgcaccgccccgctctccagccaaggctccgggctgaggcatttgcttggctgcagcctccttccgacctgcccggcgggacccaggggaccaagccgagccgagccgcggggcccgctccagcccggccatgagcgcggccgcatgatgcgtccctgcctcggccgctgcagtcgccgccgccgccgccgcaggccgggaggagccgcagcgccgggcgaccccgcccgggcctcggatccgatcacataggacagtatgcaccttaagatcctgaagaaacggcacaaaatgttcaagtgatgtttagaaataacttgtgagggtgcgtcagggaaatcatgcagccatcaggacacaggctccgggacgtcgagcatcatcctctcctggctgaaaatgacaactatgactcttcatcgtcctcctcctccgaggctgacgtggctgaccgggtctggttcatccgtgacggctgcggcatgatctgtgctgtcatgacgtggcttctggtcgcctatgcagacttcgtggtgactttcgtcatgctgctgccttccaaagacttctggtactctgtggtcaacggggtcatctttaactgcttggccgtgcttgccctgtcatcccacctgagaaccatgctcaccgaccctgaaaaatccagtgactgccgaccatctgcctgcacagtgaaaactgggctggacccaacccttgtgggcatttgtggtgagggaaccgagtctgtgcaaagcctcctgcttggggcagtacccaaaggaaacgctacgaaagaatacatggagagcttgcagctgaagcccggggaagtcatctacaagtgccccaagtgctgctgtattaaacccgagcgcgcccaccactgcagtatttgcaaaagatgtattcggaaaatggatcatcactgcccgtgggtgaacaattgtgtaggagaaaagaatcaaagattttttgtgctcttcactatgtatatagctctgtcttcagtccatgctctgatcctttgtggatttcagttcatctcctgtgtccgagggcagtggactgaatgcagtgatttttcacctccgataactgtaatcctgttgatcttcctgtgccttgagggtcttctgtttttcactttcactgcagttatgtttggcacccaaatccactccatatgcaacgacgagacggagatcgagcgattgaaaagtgagaagcccacatgggagcggaggctgcgatgggaagggatgaagtccgtctttggggggcccccctcactcctctggatgaatccctttgtgggcttccgatttaggcgactgcccacgagacccagaaaaggcggcccggagttctcagtgtgaggcgtggctcatcagactgaaacttgctcacagacttccagttatttatttggggtctgaaggatatcaacagctcatctgtgaccaacagggcaactggaacctacacaaaccaattgcttgcagcaagcagagttttatatatttatagtcacagatggcagaggaagaggctctcagtccccacctgtacaacaacggaaaggtgtgtggccacacgaagaagccaaacgccgtggcctcctgcagagctggggcttctgtggagaatacttcgggttattacatgggttattcaaatcctgggtcctgagctgctgtttccaatcatgaagaaaaacagtgaatccagtgaacagggattctccaagcagtcatttcagggggctcctgctgaccccgccactcagcagtgcactccccggatcacagcagggcgtttacatagaaagacgttttggtctcgattagctccgatgctttgcactgaagttgcaaaagatctgtgcactgaacagtgaaggtggcttccggcacactccccgctgccccggaagagacatcctttgaccctctcagcaagtctgtgtgtgtgcgtgtctgtgcgtgtgcgcgcgtgtgtgcatgtgtgtcaaaattgccagtgttgtttaggcaatgtaacatttaccggctgtgtacagcaaacaagctattttttagaaaccgacgtttcagggaagaggggagagagccgcggggtcctgcccgtggttactatgaatgtattgctgttggaggacatctcgatccaaagaacagccgttcctgtgcggcccttcgttgccctcctgctttcattttttaaagaaatcttgagtgcttgagggccttggaactgattttttttttttgttccagccaaattagcagtgtataaatggcacctaggtaagagcagagctgcggctcggtgacttgatacttggggcagcccgatgctgtgtgtggggcaggggaggcatccttactggagaggcagggcccagccattgggcacctctgggaaggggaggggaccatgaggcagccagcccctggcaggggcgactgtgccaccgcaggcagcgctccagtcgggaatggccaggatggcgccctcttgttggagtttttggttagcttttacgttttcttctccacccacggcacaggtgataaaataggatccttggtgcggagcttaaaattatgccagaaagccaacagctcccctcgtggggccttgccttaaacttgcctggtttgtacattttttgccggacgcatcaagaagcaatctgtgacaaagtctgagggtcttcctttatgcttgccctccacactaagagaagttggcgtctccctcctgggaattgttttgcctttctgttcatctgtgaactgttttttgtttttaattactctgtaccccatccgaatcagggcttctaccactgctgatgcaaaaccacaaagggacctacctgagccaccgtcctagccaagcgagcaaacctgcagggggtttggaagtggacttggtcaccgcagaagcgtgtgcgccgttgggggaagagctgcgtcacagccagagggacaaagtgtgggtgatcctggagacgccagtttccgagattgttctgcatattcatttgcacattgttgtctgggttggacatgcgtgtgggcttcagtgtgaggcttttaatatgtatatcctgttatcaataaaacaattatccaagtggttgaatcctgtgagacttggcaagtgtgtgcaaatcaagtatacttgacttttcaacctcttctttcaatgtaacttttatatgaaataaagtaatcaattaacagttctca

SEQ ID NO: 436800 - DNA, 2989 bp, Homo sapiens
ctgtcctgggaatgggacagtattataggcccaaccagagggcagctggggagtggtaccttggggacaaacttggaagcaaagtctgccagtggctttgtagcctgatctgatggtggagtctttgaccataactgagtctcttcgatgggtttgtgccttcagagaattaaagcctgtcttgtcatttccttttacgcggcaggtctccctctaggagccagaccctgctcctgatccctgtgtgtctccgccctctccttccttggctgcagcagaaaccccttgtttgttgcccaaagtgcccaggcacttcgacaaaggagagggccagctacagggccaggtccagctcagcgatttttactggaatattgccttgtaggaaaaatccagtgactgccgaccatctgcctgcacagtgaaaactgggctggacccaacccttgtgggcatttgtggtgagggaaccgagtctgtgcaaagcctcctgcttggggcagtacccaaaggaaacgctacgaaagaatacatggagagcttgcagctgaagcccggggaagtcatctacaagtgccccaagtgctgctgtattaaacccgagcgcgcccaccactgcagtatttgcaaaagatgtattcggaaaatggatcatcactgcccgtgggtgaacaattgtgtaggagaaaagaatcaaagattttttgtgctcttcactatgtatatagctctgtcttcagtccatgctctgatcctttgtggatttcagttcatctcctgtgtccgagggcagtggactgaatgcagtgatttttcacctccgataactgtaatcctgttgatcttcctgtgccttgagggtcttctgtttttcactttcactgcagttatgtttggcacccaaatccactccatatgcaacgacgagacggagatcgagcgattgaaaagtgagaagcccacatgggagcggaggctgcgatgggaagggatgaagtccgtctttggggggcccccctcactcctctggatgaatccctttgtgggcttccgatttaggcgactgcccacgagacccagaaaaggcggcccggagttctcagtgtgaggcgtggctcatcagactgaaacttgctcacagacttccagttatttatttggggtctgaaggatatcaacagctcatctgtgaccaacagggcaactggaacctacacaaaccaattgcttgcagcaagcagagttttatatatttatagtcacagatggcagaggaagaggctctcagtccccacctgtacaacaacggaaaggtgtgtggccacacgaagaagccaaacgccgtggcctcctgcagagctggggcttctgtggagaatacttcgggttattacatgggttattcaaatcctgggtcctgagctgctgtttccaatcatgaagaaaaacagtgaatccagtgaacagggattctccaagcagtcatttcagggggctcctgctgaccccgccactcagcagtgcactccccggatcacagcagggcgtttacatagaaagacgttttggtctcgattagctccgatgctttgcactgaagttgcaaaagatctgtgcactgaacagtgaaggtggcttccggcacactccccgctgccccggaagagacatcctttgaccctctcagcaagtctgtgtgtgtgcgtgtctgtgcgtgtgcgcgcgtgtgtgcatgtgtgtcaaaattgccagtgttgtttaggcaatgtaacatttaccggctgtgtacagcaaacaagctattttttagaaaccgacgtttcagggaagaggggagagagccgcggggtcctgcccgtggttactatgaatgtattgctgttggaggacatctcgatccaaagaacagccgttcctgtgcggcccttcgttgccctcctgctttcattttttaaagaaatcttgagtgcttgagggccttggaactgattttttttttttgttccagccaaattagcagtgtataaatggcacctaggtaagagcagagctgcggctcggtgacttgatacttggggcagcccgatgctgtgtgtggggcaggggaggcatccttactggagaggcagggcccagccattgggcacctctgggaaggggaggggaccatgaggcagccagcccctggcaggggcgactgtgccaccgcaggcagcgctccagtcgggaatggccaggatggcgccctcttgttggagtttttggttagcttttacgttttcttctccacccacggcacaggtgataaaataggatccttggtgcggagcttaaaattatgccagaaagccaacagctcccctcgtggggccttgccttaaacttgcctggtttgtacattttttgccggacgcatcaagaagcaatctgtgacaaagtctgagggtcttcctttatgcttgccctccacactaagagaagttggcgtctccctcctgggaattgttttgcctttctgttcatctgtgaactgttttttgtttttaattactctgtaccccatccgaatcagggcttctaccactgctgatgcaaaaccacaaagggacctacctgagccaccgtcctagccaagcgagcaaacctgcagggggtttggaagtggacttggtcaccgcagaagcgtgtgcgccgttgggggaagagctgcgtcacagccagagggacaaagtgtgggtgatcctggagacgccagtttccgagattgttctgcatattcatttgcacattgttgtctgggttggacatgcgtgtgggcttcagtgtgaggcttttaatatgtatatcctgttatcaataaaacaattatccaagtggttgaatcctgtgagacttggcaagtgtgtgcaaatcaagtatacttgacttttcaacctcttctttcaatgtaacttttatatgaaataaagtaatcaattaacagttctca

SEQ ID NO: 436801 - DNA, 3218 bp, Homo sapiens
acttccggcgctcgcaccgccccgctctccagccaaggctccgggctgaggcatttgcttggctgcagcctccttccgacctgcccggcgggacccaggggaccaagccgagccgagccgcggggcccgctccagcccggccatgagcgcggccgcatgatgcgtccctgcctcggccgctgcagtcgccgccgccgccgccgcaggccgggaggagccgcagcgccgggcgaccccgcccgggcctcggatccgatcacataggacagtatgcaccttaagatcctgaagaaacggcacaaaatgttcaagtgatgtttagaaataacttgtgagggtgcgtcagggaaatcatgcagccatcaggacacaggctccgggacgtcgagcatcatcctctcctggctgaaaatgacaactatgactcttcatcgtcctcctcctccgaggctgacgtggctgaccgggtctggttcatccgtgacggctgcggcatgatctgtgctgtcatgacgtggcttctggtcgcctatgcagacttcgtggtgactttcgtcatgctgctgccttccaaagacttctggtactctgtggtcaacggggtcatctttaactgcttggccgtgcttgccctgtcatcccacctgagaaccatgctcaccgaccctgaaaaatccagtgactgccgaccatctgcctgcacagtgaaaactgggctggacccaacccttgtgggcatttgtggtgagggaaccgagtctgtgcaaagcctcctgcttggggcagtacccaaaggaaacgctacgaaagaatacatggagagcttgcagctgaagcccggggaagtcatctacaagtgccccaagtgctgctgtattaaacccgagcgcgcccaccactgcagtatttgcaaaagatgtattcggaaaatggatcatcactgcccgtgggtgaacaattgtgtaggagaaaagaatcaaagattttttgtgctcttcactatgtatatagctctgtcttcagtccatgctctgatcctttgtggatttcagttcatctcctgtgtccgagggcagtggactgaatgcagtgatttttcacctccgataactgtaatcctgttgatcttcctgtgccttgagggtcttctgtttttcactttcactgcagttatgtttggcacccaaatccactccatatgcaacgacgagacggagatcgagcgattgaaaagtgagaagcccacatgggagcggaggctgcgatgggaagggatgaagtccgtctttggggggcccccctcactcctctggatgaatccctttgtgggcttccgatttaggcgactgcccacgagacccagaaaaggcggcccggagttctcagtgtgaggcgtggctcatcagactgaaacttgctcacagacttccagttatttatttggggtctgaaggatatcaacagctcatctgtgaccaacagggcaactggaacctacacaaaccaattgcttgcagcaagcagagttttatatatttatagtcacagatggcagaggaagaggctctcagtccccacctgtacaacaacggaaaggtgtgtggccacacgaagaagccaaacgccgtggcctcctgcagagctggggcttctgtggagaatacttcgggttattacatgggttattcaaatcctgggtcctgagctgctgtttccaatcatgaagaaaaacagtgaatccagtgaacagggattctccaagcagtcatttcagggggctcctgctgaccccgccactcagcagtgcactccccggatcacagcagggcgtttacatagaaagacgttttggtctcgattagctccgatgctttgcactgaagttgcaaaagatctgtgcactgaacagtgaaggtggcttccggcacactccccgctgccccggaagagacatcctttgaccctctcagcaagtctgtgtgtgtgcgtgtctgtgcgtgtgcgcgcgtgtgtgcatgtgtgtcaaaattgccagtgttgtttaggcaatgtaacatttaccggctgtgtacagcaaacaagctattttttagaaaccgacgtttcagggaagaggggagagagccgcggggtcctgcccgtggttactatgaatgtattgctgttggaggacatctcgatccaaagaacagccgttcctgtgcggcccttcgttgccctcctgctttcattttttaaagaaatcttgagtgcttgagggccttggaactgattttttttttttgttccagccaaattagcagtgtataaatggcacctaggtaagagcagagctgcggctcggtgacttgatacttggggcagcccgatgctgtgtgtggggcaggggaggcatccttactggagaggcagggcccagccattgggcacctctgggaaggggaggggaccatgaggcagccagcccctggcaggggcgactgtgccaccgcaggcagcgctccagtcgggaatggccaggatggcgccctcttgttggagtttttggttagcttttacgttttcttctccacccacggcacaggtgataaaataggatccttggtgcggagcttaaaattatgccagaaagccaacagctcccctcgtggggccttgccttaaacttgcctggtttgtacattttttgccggacgcatcaagaagcaatctgtgacaaagtctgagggtcttcctttatgcttgccctccacactaagagaagttggcgtctccctcctgggaattgttttgcctttctgttcatctgtgaactgttttttgtttttaattactctgtaccccatccgaatcagggcttctaccactgctgatgccagggggtttggaagtggacttggtcaccgcagaagcgtgtgcgccgttgggggaagagctgcgtcacagccagagggacaaagtgtgggtgatcctggagacgccagtttccgagattgttctgcatattcatttgcacattgttgtctgggttggacatgcgtgtgggcttcagtgtgaggcttttaatatgtatatcctgttatcaataaaacaattatccaagtggttgaatcctgtgagacttggcaagtgtgtgcaaatcaagtatacttgacttttcaacctcttctttcaatgtaacttttatatgaaataaagtaatcaattaacagttctca

SEQ ID NO: 436802 - DNA, 1050 bp, Homo sapiens
acttccggcgctcgcaccgccccgctctccagccaaggctccgggctgaggcatttgcttggctgcagcctccttccgacctgcccggcgggacccaggggaccaagccgagccgagccgcggggcccgctccagcccggccatgagcgcggccgcatgatgcgtccctgcctcggccgctgcagtcgccgccgccgccgccgcaggccgggaggagccgcagcgccgggcgaccccgcccgggcctcggatccgatcacataggacagtatgcaccttaagatcctgaagaaacggcacaaaatgttcaagtgatgtttagaaataacttgtgagggtgcgtcagggaaatcatgcagccatcaggacacaggctccgggacgtcgagcatcatcctctcctggctgaaaatgacaactatgactcttcatcgtcctcctcctccgaggctgacgtggctgaccgggtctggttcatccgtgacggctgcggcatgatctgtgctgtcatgacgtggcttctggtcgcctatgcagacttcgtggtgactttcgtcatgctgctgccttccaaagacttctggtactctgtggtcaacggggtcatctttaactgcttggccgtgcttgccctgtcatcccacctgagaaccatgctcaccgaccctgaaaaatccagtgactgccgaccatctgcctgcacagtgaaaactgggctggacccaacccttgtgggcatttgtggtgagggaaccgagtctgtgcaaagcctcctgcttgtgagtgtggggtaggcacatgggggagggtcagcctggctgggagtcctcagcagtttgctcctctttgctgacaagcgcacttgccccttcctcctctgcgctcagactctacagctactcagcagtccagcttctgctcccaccccgctcctgctcctgcggaaaaggccccagaagcctggagagctggaggcggccaggaagtcagggtagaaggtgtgtgcagggcgtgctgccgccctggtgggcagatttcttttgcttgttg

SEQ ID NO: 436803 - DNA, 290 bp, Homo sapiens
tgtagagacagggtcttgctatgttgcccaggctggtgttgcaaactcctggcgtcaggcaatcttcccacgtcagcctctgaagttactgggattacaaagcatgaaccactgtgcctggtcaaatcgtgttaatttttaaagcagctgaataatgtgattaatttttagtatataaagtgttaaaagtgttaagaaggatacagtttagaaattcatattctccctctccaccttcctctcttttccacttcctttcattatatcttttttttttttttgagatgcag

SEQ ID NO: 436804 - DNA, 2215 bp, Homo sapiens
agcaggagggtgggaccaagggtgctgctggaccaaggatgggactgggccaagggtggggctgggaagcatcctgttttgcatgtttgatcaggagctgctgccaagttgtgactttcactttcccttttgggttccagggtatatctcagagactggagaacgtgtctggttattatgcagatgcacggctggaggtgggatccacacagctcagaacagctggatcttgctcacactctttcaagagaagcttccttgggttaagaaaaaaaacgaacccttccagtcaggtcagtgactggagagctccaaggaaagtctctcagtgacctggctgctggcaccatggactcagaaaagaaacgctttactgaagaggccaccaaatacttccgggagagagtcagcccagtgcatctgcaaatcctgctgactaacaatgaagcctggaagagattcgtgactgcggctgaattgcccagggatgaggcagatgctctctacgaagctctgaagaagcttagaacatatgcagctattgaggacgaatatgtgcagcagaaagatgagcagtttagggaatggtttttgaaagagtttccccaagtcaagaggaagatccaggagtccatagaaaagcttcgtgcccttgcaaatggtattgaagaggtccacagaggctgcaccatctccaatgtggtgtccagctccactggcgctgcctctggcatcatgtcccttgctggtcttgttttggcaccatttacagcagggacgagtctggcccttactgcagctggggtagggctgggagcagcgtctgctgtgactgggatcaccaccagcatcgtggagcactcatacacatcatcagcagaagctgaagccagcaggctgactgcaaccagcattgaccgattgaaggtatttaaggaagttatgcgtgacatcacacccaacttactttcccttcttaataattattacgaagccacacaaaccattgggagtgaaatccgtgccatcaggcaagccagagccagggcccgactccctgtgaccacctggcgaatctcagctggaagtggtggtcaagcagagagaacgattgcaggcaccacccgggcagtgagcagaggagcccggatcctgagtgcgaccacttcaggcatcttccttgcactggatgtggtcaaccttgtatacgagtcaaagcacttgcatgagggggcaaagtctgcatctgctgaggagctgaggcggcaggctcaggagctggaggagaatctaatggagctcactcagatctatcagcgtctgaatccatgccatacccactgaccccagaccagtgcagccagcaggggaggtgagccatacacaggccacgacaaaatgcaggcattttattagggggataaagagggcaaggtaaagtttatggagctgagtgttagtgactttggcatttctgtagctgagcacagcaggggaggggttaatgcagatggcaagtgcaccaaggagaaggcaggaatgctggagcctggaataagggaggagaggggactggagagtgtggggaataggaagaagaaatttcctttagactaacgaatatattggggggaggaatagaggggaggtgtgcaggaaccagcaatgagaaggccaggaaaagaaagagctgaaaatgcagaaagccgaagagttagaacttttggatacagcagaagaaacagcggctccactaccgacctgcccccggttcgatgtccttccaagaatgaagtctttccctggtgatggtcccctgccctgtctttccagcatccactctgtcttgtcctcctggaagtgtatctcagtcagccagtggcttcttgatgatggcggtggaggtggtggttgtagtgtgatggatcccctttaggttatttaggggtatatgtcccctgcttgaaccctgaaggccaggtaatgagccatggccattgtccccagctgaggaccaggtgtctctaaaaacccaaacatcctggagagtatgcgagaacctaccaagaaaaacagtctcattactcatatacagcaggcaaagagacagaaaattaactgaaaagcagtttagagactgggggaggccggatctctagagccatcctgctgagtgccctgtgtgtaagtcctaataaactcacctactcaccaa

SEQ ID NO: 436805 - DNA, 3627 bp, Homo sapiens
actctggggaaaggagggtacaaccacatgtaaattttattataatgatggtataatgaacttggggtgacctgagggcatgtttttgtgttactgggcatgtgcccctttaggagacttccacctgtgccttactttctctttctttgggatgtgctggccacagactttaccaaaaactccatccattaggatggcattaggacggttctggggctaaacttaggtgggccaggggctgtttcactgtcagcctttctactctcttttcttacccactcctagctgctaatgtctatttaactacctaatatttccccctttagagaaaaaaagccaaatttttgggtagatcggtgacaattaatctggctacttcctgctgacaagaggcagtggtaataattgggttctcttttttgctctcttgtagctggtaggttgggcagagaaaagtggtggccatccaaggggcccacgtagatatcagacatggttgagacctcgcggtaaccttgtgtagaatcatttggagttttatggattctaggtgggaagaaacaaaacaaccttgtaaatcaaatgagcatcgtttgaaagctataagttgtataaagctgttttaggaccaagaaagggggctaaccaggaaaaccaggaccagttgttaaatttccaccagtcaaagcctcctgaaactctgttttccattaacttgttggccctgtctgtaatttttttaagttggtttgcactttacctgattggttgatgaaaacagcaatgtttatcaagtgttgcacaagctcccccttgattggctgtgagcaaattaaaagctcatcaatttcataagactatgcttgctaatgaagcaatttgttctgaaagggtattgacctggttagttagattaataatttgttgagtaatttttaagaagagtttctgggcagtaaaaatggagttaaggaggtcctccagttcccgtgccaataccagccagaacgccaattatagtcagtgctgttaaaactcctctttcagttttaccagattgagcgtgtatagggaggggaatgctatcgataagagtgagtttggggatgatgtaaactagggccaaatccccgtttaattagcagacaagcagagatatgccttgtttctatacaaaaatgtgatttgtcatgttaagacaaatatcaacagtgatactaaagtagggtttttccatgctgtgtaagtctgctttaataccctcagaagtggaagtcaaggctagttcatgtaatgggggaacacaggcagtacttgacagaatgaaagaggaatcaaaagcccaattagaggaaggagtgatgggatcccaaccaatattgtgaaattatggggagctgcagttttttgcaatgattttgcccgaagttgtgagactgaaaccagaagttgttatgtttaaaatgatattctggtgtgggtctggggaaaagggtagatccagaatagctggcttctttccacatagtggttctgttggggggcttgggaaatgaataaaacacaaagaagaattagaatatcaggtgaaggtagcaggtgctcctggcagaagaacccacataaggaagtgtccagaagccacacagggtatatctcagagactggagaacgtgtctggttattatgcagatgcacggctggaggtgggatccacacagctcagaacagctggatcttgctcacactctttcaagagaagcttccttgaaaagaaacgctttactgaagaggccaccaaatacttccgggagagagtcagcccagtgcatctgcaaatcctgctgactaacaatgaagcctggaagagattcgtgactgcggctgaattgcccagggatgaggcagatgctctctacgaagctctgaagaagcttagaacatatgcagctattgaggacgaatatgtgcagcagaaagatgagcagtttagggaatggtttttgaaagagtttccccaagtcaagaggaagatccaggagtccatagaaaagcttcgtgcccttgcaaatggtattgaagaggtccacagaggctgcaccatctccaatgtggtgtccagctccactggcgctgcctctggcatcatgtcccttgctggtcttgttttggcaccatttacagcagggacgagtctggcccttactgcagctggggtagggctgggagcagcgtctgctgtgactgggatcaccaccagcatcgtggagcactcatacacatcatcagcagaagctgaagccagcaggctgactgcaaccagcattgaccgattgaaggtatttaaggaagttatgcgtgacatcacacccaacttactttcccttcttaataattattacgaagccacacaaaccattgggagtgaaatccgtgccatcaggcaagccagagccagggcccgactccctgtgaccacctggcgaatctcagctggaagtggtggtcaagcagagagaacgattgcaggcaccacccgggcagtgagcagaggagcccggatcctgagtgcgaccacttcaggcatcttccttgcactggatgtggtcaaccttgtatacgagtcaaagcacttgcatgagggggcaaagtctgcatctgctgaggagctgaggcggcaggctcaggagctggaggagaatctaatggagctcactcagatctatcagcgtctgaatccatgccatacccactgaccccagaccagtgcagccagcaggggaggtgagccatacacaggccacgacaaaatgcaggcattttattagggggataaagagggcaaggtaaagtttatggagctgagtgttagtgactttggcatttctgtagctgagcacagcaggggaggggttaatgcagatggcaagtgcaccaaggagaaggcaggaatgctggagcctggaataagggaggagaggggactggagagtgtggggaataggaagaagaaatttcctttagactaacgaatatattggggggaggaatagaggggaggtgtgcaggaaccagcaatgagaaggccaggaaaagaaagagctgaaaatgcagaaagccgaagagttagaacttttggatacagcagaagaaacagcggctccactaccgacctgcccccggttcgatgtccttccaagaatgaagtctttccctggtgatggtcccctgccctgtctttccagcatccactctgtcttgtcctcctggaagtgtatctcagtcagccagtggcttcttgatgatggcggtggaggtggtggttgtagtgtgatggatcccctttaggttatttaggggtatatgtcccctgcttgaaccctgaaggccaggtaatgagccatggccattgtccccagctgaggaccaggtgtctctaaaaacccaaacatcctggagagtatgcgagaacctaccaagaaaaacagtctcattactcatatacagcaggcaaagagacagaaaattaactgaaaagcagtttagagactgggggaggccggatctctagagccatcctgctgagtgccctgtgtgtaagtcctaataaactcacctactcaccaa

SEQ ID NO: 436806 - DNA, 2118 bp, Homo sapiens
agcaggagggtgggaccaagggtgctgctggaccaaggatgggactgggccaagggtggggctgggaagcatcctgttttgcatgtttgatcaggagctgctgccaagttgtgactttcactttcccttttgggttccagggtatatctcagagactggagaacgtgtctggttattatgcagatgcacggctggaggtgggatccacacagctcagaacagctggatcttgctcacactctttcaagagaagcttccttgaaaagaaacgctttactgaagaggccaccaaatacttccgggagagagtcagcccagtgcatctgcaaatcctgctgactaacaatgaagcctggaagagattcgtgactgcggctgaattgcccagggatgaggcagatgctctctacgaagctctgaagaagcttagaacatatgcagctattgaggacgaatatgtgcagcagaaagatgagcagtttagggaatggtttttgaaagagtttccccaagtcaagaggaagatccaggagtccatagaaaagcttcgtgcccttgcaaatggtattgaagaggtccacagaggctgcaccatctccaatgtggtgtccagctccactggcgctgcctctggcatcatgtcccttgctggtcttgttttggcaccatttacagcagggacgagtctggcccttactgcagctggggtagggctgggagcagcgtctgctgtgactgggatcaccaccagcatcgtggagcactcatacacatcatcagcagaagctgaagccagcaggctgactgcaaccagcattgaccgattgaaggtatttaaggaagttatgcgtgacatcacacccaacttactttcccttcttaataattattacgaagccacacaaaccattgggagtgaaatccgtgccatcaggcaagccagagccagggcccgactccctgtgaccacctggcgaatctcagctggaagtggtggtcaagcagagagaacgattgcaggcaccacccgggcagtgagcagaggagcccggatcctgagtgcgaccacttcaggcatcttccttgcactggatgtggtcaaccttgtatacgagtcaaagcacttgcatgagggggcaaagtctgcatctgctgaggagctgaggcggcaggctcaggagctggaggagaatctaatggagctcactcagatctatcagcgtctgaatccatgccatacccactgaccccagaccagtgcagccagcaggggaggtgagccatacacaggccacgacaaaatgcaggcattttattagggggataaagagggcaaggtaaagtttatggagctgagtgttagtgactttggcatttctgtagctgagcacagcaggggaggggttaatgcagatggcaagtgcaccaaggagaaggcaggaatgctggagcctggaataagggaggagaggggactggagagtgtggggaataggaagaagaaatttcctttagactaacgaatatattggggggaggaatagaggggaggtgtgcaggaaccagcaatgagaaggccaggaaaagaaagagctgaaaatgcagaaagccgaagagttagaacttttggatacagcagaagaaacagcggctccactaccgacctgcccccggttcgatgtccttccaagaatgaagtctttccctggtgatggtcccctgccctgtctttccagcatccactctgtcttgtcctcctggaagtgtatctcagtcagccagtggcttcttgatgatggcggtggaggtggtggttgtagtgtgatggatcccctttaggttatttaggggtatatgtcccctgcttgaaccctgaaggccaggtaatgagccatggccattgtccccagctgaggaccaggtgtctctaaaaacccaaacatcctggagagtatgcgagaacctaccaagaaaaacagtctcattactcatatacagcaggcaaagagacagaaaattaactgaaaagcagtttagagactgggggaggccggatctctagagccatcctgctgagtgccctgtgtgtaagtcctaataaactcacctactcaccaa

SEQ ID NO: 436807 - DNA, 3670 bp, Homo sapiens
actctggggaaaggagggtacaaccacatgtaaattttattataatgatggtataatgaacttggggtgacctgagggcatgtttttgtgttactgggcatgtgcccctttaggagacttccacctgtgccttactttctctttctttgggatgtgctggccacagactttaccaaaaactccatccattaggatggcattaggacggttctggggctaaacttaggtgggccaggggctgtttcactgtcagcctttctactctcttttcttacccactcctagctgctaatgtctatttaactacctaatatttccccctttagagaaaaaaagccaaatttttgggtagatcggtgacaattaatctggctacttcctgctgacaagaggcagtggtaataattgggttctcttttttgctctcttgtagctggtaggttgggcagagaaaagtggtggccatccaaggggcccacgtagatatcagacatggttgagacctcgcggtaaccttgtgtagaatcatttggagttttatggattctaggtgggaagaaacaaaacaaccttgtaaatcaaatgagcatcgtttgaaagctataagttgtataaagctgttttaggaccaagaaagggggctaaccaggaaaaccaggaccagttgttaaatttccaccagtcaaagcctcctgaaactctgttttccattaacttgttggccctgtctgtaatttttttaagttggtttgcactttacctgattggttgatgaaaacagcaatgtttatcaagtgttgcacaagctcccccttgattggctgtgagcaaattaaaagctcatcaatttcataagactatgcttgctaatgaagcaatttttaagaagagtttctgggcagtaaaaatggagttaaggaggtcctccagttcccgtgccaataccagccagaacgccaattatagtcagtgctgttaaaactcctctttcagttttaccagattgagcgtgtatagggaggggaatgctatcgataagagtgagtttggggatgatgtaaactagggccaaatccccgtttaattagcagacaagcagagatatgccttgtttctatacaaaaatgtgatttgtcatgttaagacaaatatcaacagtgatactaaagtagggtttttccatgctgtgtaagtctgctttaataccctcagaagtggaagtcaaggctagttcatgtaatgggggaacacaggcagtacttgacagaatgaaagaggaatcaaaagcccaattagaggaaggagtgatgggatcccaaccaatattgtgaaattatggggagctgcagttttttgcaatgattttgcccgaagttgtgagactgaaaccagaagttgttatgtttaaaatgatattctggtgtgggtctggggaaaagggtagatccagaatagctggcttctttccacatagtggttctgttggggggcttgggaaatgaataaaacacaaagaagaattagaatatcaggtgaaggtagcaggtgctcctggcagaagaacccacataaggaagtgtccagaagccacacagggtatatctcagagactggagaacgtgtctggttattatgcagatgcacggctggaggtgggatccacacagctcagaacagctggatcttgctcacactctttcaagagaagcttccttgggttaagaaaaaaaacgaacccttccagtcaggtcagtgactggagagctccaaggaaagtctctcagtgacctggctgctggcaccatggactcagaaaagaaacgctttactgaagaggccaccaaatacttccgggagagagtcagcccagtgcatctgcaaatcctgctgactaacaatgaagcctggaagagattcgtgactgcggctgaattgcccagggatgaggcagatgctctctacgaagctctgaagaagcttagaacatatgcagctattgaggacgaatatgtgcagcagaaagatgagcagtttagggaatggtttttgaaagagtttccccaagtcaagaggaagatccaggagtccatagaaaagcttcgtgcccttgcaaatggtattgaagaggtccacagaggctgcaccatctccaatgtggtgtccagctccactggcgctgcctctggcatcatgtcccttgctggtcttgttttggcaccatttacagcagggacgagtctggcccttactgcagctggggtagggctgggagcagcgtctgctgtgactgggatcaccaccagcatcgtggagcactcatacacatcatcagcagaagctgaagccagcaggctgactgcaaccagcattgaccgattgaaggtatttaaggaagttatgcgtgacatcacacccaacttactttcccttcttaataattattacgaagccacacaaaccattgggagtgaaatccgtgccatcaggcaagccagagccagggcccgactccctgtgaccacctggcgaatctcagctggaagtggtggtcaagcagagagaacgattgcaggcaccacccgggcagtgagcagaggagcccggatcctgagtgcgaccacttcaggcatcttccttgcactggatgtggtcaaccttgtatacgagtcaaagcacttgcatgagggggcaaagtctgcatctgctgaggagctgaggcggcaggctcaggagctggaggagaatctaatggagctcactcagatctatcagcgtctgaatccatgccatacccactgaccccagaccagtgcagccagcaggggaggtgagccatacacaggccacgacaaaatgcaggcattttattagggggataaagagggcaaggtaaagtttatggagctgagtgttagtgactttggcatttctgtagctgagcacagcaggggaggggttaatgcagatggcaagtgcaccaaggagaaggcaggaatgctggagcctggaataagggaggagaggggactggagagtgtggggaataggaagaagaaatttcctttagactaacgaatatattggggggaggaatagaggggaggtgtgcaggaaccagcaatgagaaggccaggaaaagaaagagctgaaaatgcagaaagccgaagagttagaacttttggatacagcagaagaaacagcggctccactaccgacctgcccccggttcgatgtccttccaagaatgaagtctttccctggtgatggtcccctgccctgtctttccagcatccactctgtcttgtcctcctggaagtgtatctcagtcagccagtggcttcttgatgatggcggtggaggtggtggttgtagtgtgatggatcccctttaggttatttaggggtatatgtcccctgcttgaaccctgaaggccaggtaatgagccatggccattgtccccagctgaggaccaggtgtctctaaaaacccaaacatcctggagagtatgcgagaacctaccaagaaaaacagtctcattactcatatacagcaggcaaagagacagaaaattaactgaaaagcagtttagagactgggggaggccggatctctagagccatcctgctgagtgccctgtgtgtaagtcctaataaactcacctactcaccaa

SEQ ID NO: 436808 - DNA, 3726 bp, Homo sapiens
  misc_feature (3410)..(3411): n is a, c, g, or t
  misc_feature (3713)..(3713): n is a, c, g, or t
actctggggaaaggagggtacaaccacatgtaaattttattataatgatggtataatgaacttggggtgacctgagggcatgtttttgtgttactgggcatgtgcccctttaggagacttccacctgtgccttactttctctttctttgggatgtgctggccacagactttaccaaaaactccatccattaggatggcattaggacggttctggggctaaacttaggtgggccaggggctgtttcactgtcagcctttctactctcttttcttacccactcctagctgctaatgtctatttaactacctaatatttccccctttagagaaaaaaagccaaatttttgggtagatcggtgacaattaatctggctacttcctgctgacaagaggcagtggtaataattgggttctcttttttgctctcttgtagctggtaggttgggcagagaaaagtggtggccatccaaggggcccacgtagatatcagacatggttgagacctcgcggtaaccttgtgtagaatcatttggagttttatggattctaggtgggaagaaacaaaacaaccttgtaaatcaaatgagcatcgtttgaaagctataagttgtataaagctgttttaggaccaagaaagggggctaaccaggaaaaccaggaccagttgttaaatttccaccagtcaaagcctcctgaaactctgttttccattaacttgttggccctgtctgtaatttttttaagttggtttgcactttacctgattggttgatgaaaacagcaatgtttatcaagtgttgcacaagctcccccttgattggctgtgagcaaattaaaagctcatcaatttcataagactatgcttgctaatgaagcaatttttaagaagagtttctgggcagtaaaaatggagttaaggaggtcctccagttcccgtgccaataccagccagaacgccaattatagtcagtgctgttaaaactcctctttcagttttaccagattgagcgtgtatagggaggggaatgctatcgataagagtgagtttggggatgatgtaaactagggccaaatccccgtttaattagcagacaagcagagatatgccttgtttctatacaaaaatgtgatttgtcatgttaagacaaatatcaacagtgatactaaagtagggtttttccatgctgtgtaagtctgctttaataccctcagaagtggaagtcaaggctagttcatgtaatgggggaacacaggcagtacttgacagaatgaaagaggaatcaaaagcccaattagaggaaggagtgatgggatcccaaccaatattgtgaaattatggggagctgcagttttttgcaatgattttgcccgaagttgtgagactgaaaccagaagttgttatgtttaaaatgatattctggtgtgggtctggggaaaagggtagatccagaatagctggcttctttccacatagtggttctgttggggggcttgggaaatgaataaaacacaaagaagaattagaatatcaggtgaaggtagcaggtgctcctggcagaagaacccacataaggaagtgtccagaagccacacagggtatatctcagagactggagaacgtgtctggttattatgcagatgcacggctggaggtgggatccacacagctcagaacagctggatcttgctcacactctttcaagagaagcttccttgggttaagaaaaaaaacgaacccttccagtcaggtcagtgactggagagctccaaggaaagtctctcagtgacctggctgctggcaccatggactcagaaaagaaacgctttactgaagaggccaccaaatacttccgggagagagtcagcccagtgcatctgcaaatcctgctgactaacaatgaagcctggaagagattcgtgactgcggctgaattgcccagggatgaggcagatgctctctacgaagctctgaagaagcttagaacatatgcagctattgaggacgaatatgtgcagcagaaagatgagcagtttagggaatggtttttgaaagagtttccccaagtcaagaggaagatccaggagtccatagaaaagcttcgtgcccttgcaaatggtattgaagaggtccacagaggctgcaccatctccaatgtggtgtccagctccactggcgctgcctctggcatcatgtcccttgctggtcttgttttggcaccatttacagcagggacgagtctggcccttactgcagctggggtagggctgggagcagcgtctgctgtgactgggatcaccaccagcatcgtggagcactcatacacatcatcagcagaagctgaagccagcaggctgactgcaaccagcattgaccgattgaaggtatttaaggaagttatgcgtgacatcacacccaacttactttcccttcttaataattattacgaagccacacaaaccattgggagtgaaatccgtgccatcaggcaagccagagccagggcccgactccctgtgaccacctggcgaatctcagctggaagtggtggtcaagcagagagaacgattgcaggcaccacccgggcagtgagcagaggagcccggatcctgagtgcgaccacttcaggcatcttccttgcactggatgtggtcaaccttgtatacgagtcaaagcacttgcatgagggggcaaagtctgcatctgctgaggagctgaggcggcaggctcaggagctggaggagaatctaatggagctcactcagatctatcagcgtctgaatccatgccatacccactgaccccagaccagtgcagccagcaggggaggtgagccatacacaggccacgacaaaatgcaggcattttattagggggataaagagggcaaggtaaagtttatggagctgagtgttagtgactttggcatttctgtagctgagcacagcaggggaggggttaatgcagatggcaagtgcaccaaggagaaggcaggaatgctggagcctggaataagggaggagaggggactggagagtgtggggaataggaagaagaaatttcctttagactaacgaatatattggggggaggaatagaggggaggtgtgcaggaaccagcaatgagaaggccaggaaaagaaagagctgaaaatgcagaaagccgaagagttagaacttttggatacagcagaagaaacagcggctccactaccgacctgcccccggttcgatgtccttccaagaatgaagtctttccctggtgatggtcccctgccctgtctttccagcatccactctgtcttgtcctcctggaagtgtatctcagtcagccagtggcttcttgatgatggcggtggaggtggtggttgtagtgtgatggatcccctttaggttatttaggggtatatgnntggggcccagctttctgtacaaaccccaacttcctggaccggttgcttacaacctccaagacagtctattacctcttatacagcccgcacagtgacctatactttacttctatcgtaccttgatgttgcgggccggcatctcctcttctctctttcctgagccaccctcccggccacatatctaatacactcacccctctcactctctccccactatcgccctcttatttctccttccgttctctctgtctccctcttccacccttctttctctctttcactcctttctcctcgcctctttnctcctccccctcc

SEQ ID NO: 436809 - DNA, 3186 bp, Homo sapiens
actctggggaaaggagggtacaaccacatgtaaattttattataatgatggtataatgaacttggggtgacctgagggcatgtttttgtgttactgggcatgtgcccctttaggagacttccacctgtgccttactttctctttctttgggatgtgctggccacagactttaccaaaaactccatccattaggatggcattaggacggttctggggctaaacttaggtgggccaggggctgtttcactgtcagcctttctactctcttttcttacccactcctagctgctaatgtctatttaactacctaatatttccccctttagagaaaaaaagccaaatttttgggtagatcggtgacaattaatctggctacttcctgctgacaagaggcagtggtaataattgggttctcttttttgctctcttgtagctggtaggttgggcagagaaaagtggtggccatccaaggggcccacgtagatatcagacatggttgagacctcgcggtaaccttgtgtagaatcatttggagttttatggattctaggtgggaagaaacaaaacaaccttgtaaatcaaatgagcatcgtttgaaagctataagttgtataaagctgttttaggaccaagaaagggggctaaccaggaaaaccaggaccagttgttaaatttccaccagtcaaagcctcctgaaactctgttttccattaacttgttggccctgtctgtaatttttttaagttggtttgcactttacctgattggttgatgaaaacagcaatgtttatcaagtgttgcacaagctcccccttgattggctgtgagcaaattaaaagctcatcaatttcataagactatgcttgctaatgaagcaatttttaagaagagtttctgggcagtaaaaatggagttaaggaggtcctccagttcccgtgccaataccagccagaacgccaattatagtcagtgctgttaaaactcctctttcagttttaccagattgagcgtgtatagggaggggaatgctatcgataagagtgagtttggggatgatgtaaactagggccaaatccccgtttaattagcagacaagcagagatatgccttgtttctatacaaaaatgtgatttgtcatgttaagacaaatatcaacagtgatactaaagtagggtttttccatgctgtgtaagtctgctttaataccctcagaagtggaagtcaaggctagttcatgtaatgggggaacacaggcagtacttgacagaatgaaagaggaatcaaaagcccaattagaggaaggagtgatgggatcccaaccaatattgtgaaattatggggagctgcagttttttgcaatgattttgcccgaagttgtgagactgaaaccagaagttgttatgtttaaaatgatattctggtgtgggtctggggaaaagggtagatccagaatagctggcttctttccacatagtggttctgttggggggcttgggaaatgaataaaacacaaagaagaattagaatatcaggtgaaggtagcaggtgctcctggcagaagaacccacataaggaagtgtccagaagccacacagggtatatctcagagactggagaacgtgtctggttattatgcagatgcacggctggaggtgggatccacacagctcagaacagctggatcttgctcacactctttcaagagaagcttccttgggttaagaaaaaaaacgaacccttccagtcaggtcagtgactggagagctccaaggaaagtctctcagtgacctggctgctggcaccatggactcagaaaagaaacgctttactgaagaggccaccaaatacttccgggagagagtcagcccagtgcatctgcaaatcctgctgactaacaatgaagcctggaagagattcgtgactgcggctgaattgcccagggatgaggcagatgctctctacgaagctctgaagaagcttagaacatatgcagctattgaggacgaatatgtgcagcagaaagatgagcagtttagggaatggtttttgaaagagtttccccaagtcaagaggaagatccaggagtccatagaaaagcttcgtgcccttgcaaatggtattgaagaggtccacagaggctgcaccatctccaatgtggtgtccagctccactggcgctgcctctggcatcatgtcccttgctggtcttgttttggcaccatttacagcagggacgagtctggcccttactgcagctggggtagggctgggagcagcgtctgctgtgactgggatcaccaccagcatcgtggagcactcatacacatcatcagcagaagctgaagccagcaggctgactgcaaccagcattgaccgattgaaggtatttaaggaagttatgcgtgacatcacacccaacttactttcccttcttaataattattacgaagccacacaaaccattgggagtgaaatccgtgccatcaggcaagccagagccagggcccgactccctgtgaccacctggcgaatctcagctggaagtggtggtcaagcagagagaacgattgcaggcaccacccgggcagtgagcagaggagcccggatcctgagtgcgaccacttcaggcatcttccttgcactggatgtggtcaaccttgtatacgagtcaaagcacttgcatgagggggcaaagtctgcatctgctgaggagctgaggcggcaggctcaggagctggaggagaatctaatggagctcactcagatctatcagcgtctgaatccatgccatacccactgaccccagaccagtgcagccagcaggggaggtgagccatacacaggccacgacaaaatgcaggcattttattagggggataaagagggcaaggtaaagtttatggagctgagtgttagtgactttggcatttctgtagctgagcacagcaggggaggggttaatgcagatggcaagtgcaccaaggagaaggcaggaatgctggagcctggaataagggaggagaggggactggagagtgtggggaataggaagaagaaatttcctttagactaacgaatatattggggggaggaatagaggggaggtgtgcaggaaccaagtgggaggccagcaaccaagtgggaggccagcaaccaagtgggaggccagcaaccaagtgggaggcca

SEQ ID NO: 436810 - DNA, 669 bp, Homo sapiens
gatccggtgggttctggctaacagaagagcacataggtgcgtcatataggtgccccctatggccaactgagggtaccagatgtggtgatgaatagaggggaggtgtgcaggaaccagcaatgagaaggccaggaaaagaaagagctgaaaatgcagaaagccgaagagttagaacttttggatacagcagaagaaacagcggctccactaccgacctgcccccggttcgatgtccttccaagaatgaagtctttccctggtgatggtcccctgccctgtctttccagcatccactctgtcttgtcctcctggaagtgtatctcagtcagccagtggcttcttgatgatggcggtggaggtggtggttgtagtgtgatggatcccctttaggttatttaggggtatatgtcccctgcttgaaccctgaaggccaggtaatgagccatggccattgtccccagctgaggaccaggtgtctctaaaaacccaaacatcctggagagtatgcgagaacctaccaagaaaaacagtctcattactcatatacagcaggcaaagagacagaaaattaactgaaaagcagtttagagactgggggaggccggatctctagagccatcctgctgagtgccctgtgtgtaagtcctaataaactcacctactcaccaa

SEQ ID NO: 436811 - DNA, 2444 bp, Homo sapiens
agcaggagggtgggaccaagggtgctgctggaccaaggatgggactgggccaagggtggggctgggaagcatcctgttttgcatgtttgatcaggagctgctgccaagttgtgactttcactttcccttttgggttccagggtatatctcagagactggagaacgtgtctggttattatgcagatgcacggctggaggtgggatccacacagctcagaacagctggatcttgctcacactctttcaagagaagcttccttggacaaaaggaccctgccttggtgtgagagtgagggcagagggagctggagcaagtagaatttctctaaataccagctggctggggcccaggagattaaaaaacaccgggctaggttggtcttggcatttgctgacacgcaaagggattgcagagatccagcccctccaacctccctctgtccacaggtggctcacattcagtcccacaatttgctttctcctcctcaagggttaagaaaaaaaacgaacccttccagtcaggtcagtgactggagagctccaaggaaagtctctcagtgacctggctgctggcaccatggactcagaaaagaaacgctttactgaagaggccaccaaatacttccgggagagagtcagcccagtgcatctgcaaatcctgctgactaacaatgaagcctggaagagattcgtgactgcggctgaattgcccagggatgaggcagatgctctctacgaagctctgaagaagcttagaacatatgcagctattgaggacgaatatgtgcagcagaaagatgagcagtttagggaatggtttttgaaagagtttccccaagtcaagaggaagatccaggagtccatagaaaagcttcgtgcccttgcaaatggtattgaagaggtccacagaggctgcaccatctccaatgtggtgtccagctccactggcgctgcctctggcatcatgtcccttgctggtcttgttttggcaccatttacagcagggacgagtctggcccttactgcagctggggtagggctgggagcagcgtctgctgtgactgggatcaccaccagcatcgtggagcactcatacacatcatcagcagaagctgaagccagcaggctgactgcaaccagcattgaccgattgaaggtatttaaggaagttatgcgtgacatcacacccaacttactttcccttcttaataattattacgaagccacacaaaccattgggagtgaaatccgtgccatcaggcaagccagagccagggcccgactccctgtgaccacctggcgaatctcagctggaagtggtggtcaagcagagagaacgattgcaggcaccacccgggcagtgagcagaggagcccggatcctgagtgcgaccacttcaggcatcttccttgcactggatgtggtcaaccttgtatacgagtcaaagcacttgcatgagggggcaaagtctgcatctgctgaggagctgaggcggcaggctcaggagctggaggagaatctaatggagctcactcagatctatcagcgtctgaatccatgccatacccactgaccccagaccagtgcagccagcaggggaggtgagccatacacaggccacgacaaaatgcaggcattttattagggggataaagagggcaaggtaaagtttatggagctgagtgttagtgactttggcatttctgtagctgagcacagcaggggaggggttaatgcagatggcaagtgcaccaaggagaaggcaggaatgctggagcctggaataagggaggagaggggactggagagtgtggggaataggaagaagaaatttcctttagactaacgaatatattggggggaggaatagaggggaggtgtgcaggaaccagcaatgagaaggccaggaaaagaaagagctgaaaatgcagaaagccgaagagttagaacttttggatacagcagaagaaacagcggctccactaccgacctgcccccggttcgatgtccttccaagaatgaagtctttccctggtgatggtcccctgccctgtctttccagcatccactctgtcttgtcctcctggaagtgtatctcagtcagccagtggcttcttgatgatggcggtggaggtggtggttgtagtgtgatggatcccctttaggttatttaggggtatatgtcccctgcttgaaccctgaaggccaggtaatgagccatggccattgtccccagctgaggaccaggtgtctctaaaaacccaaacatcctggagagtatgcgagaacctaccaagaaaaacagtctcattactcatatacagcaggcaaagagacagaaaattaactgaaaagcagtttagagactgggggaggccggatctctagagccatcctgctgagtgccctgtgtgtaagtcctaataaactcacctactcaccaa

SEQ ID NO: 436812 - DNA, 3564 bp, Homo sapiens
actctggggaaaggagggtacaaccacatgtaaattttattataatgatggtataatgaacttggggtgacctgagggcatgtttttgtgttactgggcatgtgcccctttaggagacttccacctgtgccttactttctctttctttgggatgtgctggccacagactttaccaaaaactccatccattaggatggcattaggacggttctggggctaaacttaggtgggccaggggctgtttcactgtcagcctttctactctcttttcttacccactcctagctgctaatgtctatttaactacctaatatttccccctttagagaaaaaaagccaaatttttgggtagatcggtgacaattaatctggctacttcctgctgacaagaggcagtggtaataattgggttctcttttttgctctcttgtagctggtaggttgggcagagaaaagtggtggccatccaaggggcccacgtagatatcagacatggttgagacctcgcggtaaccttgtgtagaatcatttggagttttatggattctaggtgggaagaaacaaaacaaccttgtaaatcaaatgagcatcgtttgaaagctataagttgtataaagctgttttaggaccaagaaagggggctaaccaggaaaaccaggaccagttgttaaatttccaccagtcaaagcctcctgaaactctgttttccattaacttgttggccctgtctgtaatttttttaagttggtttgcactttacctgattggttgatgaaaacagcaatgtttatcaagtgttgcacaagctcccccttgattggctgtgagcaaattaaaagctcatcaatttcataagactatgcttgctaatgaagcaatttgttctgaaagggtattgacctggttagttagattaataatttgttgagtaatttttaagaagagtttctgggcagtaaaaatggagttaaggaggtcctccagttcccgtgccaataccagccagaacgccaattatagtcagtgctgttaaaactcctctttcagttttaccagattgagcgtgtatagggaggggaatgctatcgataagagtgagtttggggatgatgtaaactagggccaaatccccgtttaattagcagacaagcagagatatgccttgtttctatacaaaaatgtgatttgtcatgttaagacaaatatcaacagtgatactaaagtagggtttttccatgctgtgtaagtctgctttaataccctcagaagtggaagtcaaggctagttcatgtaatgggggaacacaggcagtacttgacagaatgaaagaggaatcaaaagcccaattagaggaaggagtgatgggatcccaaccaatattgtgaaattatggggagctgcagttttttgcaatgattttgcccgaagttgtgagactgaaaccagaagttgttatgtttaaaatgatattctggtgtgggtctggggaaaagggtagatccagaatagctggcttctttccacatagtggttctgttggggggcttgggaaatgaataaaacacaaagaagaattagaatatcagggtatatctcagagactggagaacgtgtctggttattatgcagatgcacggctggaggtgggatccacacagctcagaacagctggatcttgctcacactctttcaagagaagcttccttgaaaagaaacgctttactgaagaggccaccaaatacttccgggagagagtcagcccagtgcatctgcaaatcctgctgactaacaatgaagcctggaagagattcgtgactgcggctgaattgcccagggatgaggcagatgctctctacgaagctctgaagaagcttagaacatatgcagctattgaggacgaatatgtgcagcagaaagatgagcagtttagggaatggtttttgaaagagtttccccaagtcaagaggaagatccaggagtccatagaaaagcttcgtgcccttgcaaatggtattgaagaggtccacagaggctgcaccatctccaatgtggtgtccagctccactggcgctgcctctggcatcatgtcccttgctggtcttgttttggcaccatttacagcagggacgagtctggcccttactgcagctggggtagggctgggagcagcgtctgctgtgactgggatcaccaccagcatcgtggagcactcatacacatcatcagcagaagctgaagccagcaggctgactgcaaccagcattgaccgattgaaggtatttaaggaagttatgcgtgacatcacacccaacttactttcccttcttaataattattacgaagccacacaaaccattgggagtgaaatccgtgccatcaggcaagccagagccagggcccgactccctgtgaccacctggcgaatctcagctggaagtggtggtcaagcagagagaacgattgcaggcaccacccgggcagtgagcagaggagcccggatcctgagtgcgaccacttcaggcatcttccttgcactggatgtggtcaaccttgtatacgagtcaaagcacttgcatgagggggcaaagtctgcatctgctgaggagctgaggcggcaggctcaggagctggaggagaatctaatggagctcactcagatctatcagcgtctgaatccatgccatacccactgaccccagaccagtgcagccagcaggggaggtgagccatacacaggccacgacaaaatgcaggcattttattagggggataaagagggcaaggtaaagtttatggagctgagtgttagtgactttggcatttctgtagctgagcacagcaggggaggggttaatgcagatggcaagtgcaccaaggagaaggcaggaatgctggagcctggaataagggaggagaggggactggagagtgtggggaataggaagaagaaatttcctttagactaacgaatatattggggggaggaatagaggggaggtgtgcaggaaccagcaatgagaaggccaggaaaagaaagagctgaaaatgcagaaagccgaagagttagaacttttggatacagcagaagaaacagcggctccactaccgacctgcccccggttcgatgtccttccaagaatgaagtctttccctggtgatggtcccctgccctgtctttccagcatccactctgtcttgtcctcctggaagtgtatctcagtcagccagtggcttcttgatgatggcggtggaggtggtggttgtagtgtgatggatcccctttaggttatttaggggtatatgtcccctgcttgaaccctgaaggccaggtaatgagccatggccattgtccccagctgaggaccaggtgtctctaaaaacccaaacatcctggagagtatgcgagaacctaccaagaaaaacagtctcattactcatatacagcaggcaaagagacagaaaattaactgaaaagcagtttagagactgggggaggccggatctctagagccatcctgctgagtgccctgtgtgtaagtcctaataaactcacctactcaccaa

SEQ ID NO: 436813 - DNA, 2328 bp, Homo sapiens
agcaggagggtgggaccaagggtgctgctggaccaaggatgggactgggccaagggtggggctgggaagcatcctgttttgcatgtttgatcaggagctgctgccaagttgtgactttcactttcccttttgggttccagggtatatctcagagactggagaacgtgtctggttattatgcagatgcacggctggaggtgggatccacacagctcagaacagctggatcttgctcacactctttcaagagaagcttccttggacaaaaggaccctgccttggtgtgagagtgagggcagagggagctggagcaagtagaatttctctaaataccagctggctggggcccaggagattaaaaaacaccgggctagggttaagaaaaaaaacgaacccttccagtcaggtcagtgactggagagctccaaggaaagtctctcagtgacctggctgctggcaccatggactcagaaaagaaacgctttactgaagaggccaccaaatacttccgggagagagtcagcccagtgcatctgcaaatcctgctgactaacaatgaagcctggaagagattcgtgactgcggctgaattgcccagggatgaggcagatgctctctacgaagctctgaagaagcttagaacatatgcagctattgaggacgaatatgtgcagcagaaagatgagcagtttagggaatggtttttgaaagagtttccccaagtcaagaggaagatccaggagtccatagaaaagcttcgtgcccttgcaaatggtattgaagaggtccacagaggctgcaccatctccaatgtggtgtccagctccactggcgctgcctctggcatcatgtcccttgctggtcttgttttggcaccatttacagcagggacgagtctggcccttactgcagctggggtagggctgggagcagcgtctgctgtgactgggatcaccaccagcatcgtggagcactcatacacatcatcagcagaagctgaagccagcaggctgactgcaaccagcattgaccgattgaaggtatttaaggaagttatgcgtgacatcacacccaacttactttcccttcttaataattattacgaagccacacaaaccattgggagtgaaatccgtgccatcaggcaagccagagccagggcccgactccctgtgaccacctggcgaatctcagctggaagtggtggtcaagcagagagaacgattgcaggcaccacccgggcagtgagcagaggagcccggatcctgagtgcgaccacttcaggcatcttccttgcactggatgtggtcaaccttgtatacgagtcaaagcacttgcatgagggggcaaagtctgcatctgctgaggagctgaggcggcaggctcaggagctggaggagaatctaatggagctcactcagatctatcagcgtctgaatccatgccatacccactgaccccagaccagtgcagccagcaggggaggtgagccatacacaggccacgacaaaatgcaggcattttattagggggataaagagggcaaggtaaagtttatggagctgagtgttagtgactttggcatttctgtagctgagcacagcaggggaggggttaatgcagatggcaagtgcaccaaggagaaggcaggaatgctggagcctggaataagggaggagaggggactggagagtgtggggaataggaagaagaaatttcctttagactaacgaatatattggggggaggaatagaggggaggtgtgcaggaaccagcaatgagaaggccaggaaaagaaagagctgaaaatgcagaaagccgaagagttagaacttttggatacagcagaagaaacagcggctccactaccgacctgcccccggttcgatgtccttccaagaatgaagtctttccctggtgatggtcccctgccctgtctttccagcatccactctgtcttgtcctcctggaagtgtatctcagtcagccagtggcttcttgatgatggcggtggaggtggtggttgtagtgtgatggatcccctttaggttatttaggggtatatgtcccctgcttgaaccctgaaggccaggtaatgagccatggccattgtccccagctgaggaccaggtgtctctaaaaacccaaacatcctggagagtatgcgagaacctaccaagaaaaacagtctcattactcatatacagcaggcaaagagacagaaaattaactgaaaagcagtttagagactgggggaggccggatctctagagccatcctgctgagtgccctgtgtgtaagtcctaataaactcacctactcaccaa

SEQ ID NO: 436814 - DNA, 3873 bp, Homo sapiens
actctggggaaaggagggtacaaccacatgtaaattttattataatgatggtataatgaacttggggtgacctgagggcatgtttttgtgttactgggcatgtgcccctttaggagacttccacctgtgccttactttctctttctttgggatgtgctggccacagactttaccaaaaactccatccattaggatggcattaggacggttctggggctaaacttaggtgggccaggggctgtttcactgtcagcctttctactctcttttcttacccactcctagctgctaatgtctatttaactacctaatatttccccctttagagaaaaaaagccaaatttttgggtagatcggtgacaattaatctggctacttcctgctgacaagaggcagtggtaataattgggttctcttttttgctctcttgtagctggtaggttgggcagagaaaagtggtggccatccaaggggcccacgtagatatcagacatggttgagacctcgcggtaaccttgtgtagaatcatttggagttttatggattctaggtgggaagaaacaaaacaaccttgtaaatcaaatgagcatcgtttgaaagctataagttgtataaagctgttttaggaccaagaaagggggctaaccaggaaaaccaggaccagttgttaaatttccaccagtcaaagcctcctgaaactctgttttccattaacttgttggccctgtctgtaatttttttaagttggtttgcactttacctgattggttgatgaaaacagcaatgtttatcaagtgttgcacaagctcccccttgattggctgtgagcaaattaaaagctcatcaatttcataagactatgcttgctaatgaagcaatttttaagaagagtttctgggcagtaaaaatggagttaaggaggtcctccagttcccgtgccaataccagccagaacgccaattatagtcagtgctgttaaaactcctctttcagttttaccagattgagcgtgtatagggaggggaatgctatcgataagagtgagtttggggatgatgtaaactagggccaaatccccgtttaattagcagacaagcagagatatgccttgtttctatacaaaaatgtgatttgtcatgttaagacaaatatcaacagtgatactaaagtagggtttttccatgctgtgtaagtctgctttaataccctcagaagtggaagtcaaggctagttcatgtaatgggggaacacaggcagtacttgacagaatgaaagaggaatcaaaagcccaattagaggaaggagtgatgggatcccaaccaatattgtgaaattatggggagctgcagttttttgcaatgattttgcccgaagttgtgagactgaaaccagaagttgttatgtttaaaatgatattctggtgtgggtctggggaaaagggtagatccagaatagctggcttctttccacatagtggttctgttggggggcttgggaaatgaataaaacacaaagaagaattagaatatcaggtgaaggtagcaggtgctcctggcagaagaacccacataaggaagtgtccagaagccacacagggtatatctcagagactggagaacgtgtctggttattatgcagatgcacggctggaggtgggatccacacagctcagaacagctggatcttgctcacactctttcaagagaagcttccttgggttaagaaaaaaaacgaacccttccagtcaggtcagtgactggagagctccaaggaaagtctctcagtgacctggctgctggcaccatggactcagaaaagaaacgctttactgaagaggccaccaaatacttccgggagagagtcagcccagtgcatctgcaaatcctgctgactaacaatgaagcctggaagagattcgtgactgcggctgaattgcccagggatgaggcagatgctctctacgaagctctgaagaagcttagaacatatgcagctattgaggacgaatatgtgcagcagaaagatgagcagtttagggaatggtttttgaaagagtttccccaagtcaagaggaagatccaggagtccatagaaaagcttcgtgcccttgcaaatggtattgaagaggtccacagaggctgcaccatctccaatgtggtgtccagctccactggcgctgcctctggcatcatgtcccttgctggtcttgttttggcaccatttacagcagggacgagtctggcccttactgcagctggggtagggctgggagcagcgtctgctgtgactgggatcaccaccagcatcgtggagcactcatacacatcatcagcagaagctgaagccagcaggctgactgcaaccagcattgaccgattgaaggtatttaaggaagttatgcgtgacatcacacccaacttactttcccttcttaataattattacgaagccacacaaaccattgggagtgaaatccgtgccatcaggcaagccagagccagggcccgactccctgtgaccacctggcgaatctcagctggaagtggtggtcaagcagagagaacgattgcaggcaccacccgggcagtgagcagaggagcccggatcctgagtgcgaccacttcaggcatcttccttgcactggatgtggtcaaccttgtatacgagtcaaagcacttgcatgagggggcaaagtctgcatctgctgaggagctgaggcggcaggctcaggagctggaggagaatctaatggagctcactcagatctatcagcgtctgaatccatgccatacccactgaccccagaccagtgcagccagcaggggaggtgagccatacacaggccacgacaaaatgcaggcattttattagggggataaagagggcaaggtaaagtttatggagctgagtgttagtgactttggcatttctgtagctgagcacagcaggggaggggttaatgcagatggcaagtgcaccaaggagaaggcaggaatgctggagcctggaataagggaggagaggggactggagagtgtggggaataggaagaagaaatttcctttagactaacgaatatattggggggaggaatagaggggaggtgtgcaggaaccagcaatgagaaggccaggaaaagaaagagctgaaaatgcagaaagccgaagagttagaacttttggatacagcagaagaaacagcggctccactaccgacctgcccccggttcgatgtccttccaagaatgaagtctttccctggtgatggtcccctgccctgtctttccagcatccactctgtcttgtcctcctggaagtgtatctcagtcagccagtggcttcttgatgatggcggtggaggtggtggttgtagtgtgatggatcccctttaggttatttaggggtatatgtcccctgcttgaaccctgaaggccaggtaatgagccatggccattgtccccagctgaggaccaggtgtctctaaaaacccaaacatcctggagagtatgcgagaacctaccaagaaaaacagtctcattactcatatacagcaggcaaagagacagaaaattaactgaaaagcagtttagagactgggggaggccggatctctagagccatcctgctgagtgccctgtgtgtaagtcctaataaactcacctactcaccaaactggacttattcgagtcattccttggtctcctggctcctttctcgctttgggagcaagttcctgtctgaagtttttgtctgaacagtggtaaaggtgatggtgatgatgtcagcagacagcaggaggacttgacaaatgtcagccctgcttggggccaggatacactgagggaacgatgacattccaatgaaactccaaatt

SEQ ID NO: 436815 - DNA, 3394 bp, Homo sapiens
actctggggaaaggagggtacaaccacatgtaaattttattataatgatggtataatgaacttggggtgacctgagggcatgtttttgtgttactgggcatgtgcccctttaggagacttccacctgtgccttactttctctttctttgggatgtgctggccacagactttaccaaaaactccatccattaggatggcattaggacggttctggggctaaacttaggtgggccaggggctgtttcactgtcagcctttctactctcttttcttacccactcctagctgctaatgtctatttaactacctaatatttccccctttagagaaaaaaagccaaatttttgggtagatcggtgacaattaatctggctacttcctgctgacaagaggcagtggtaataattgggttctcttttttgctctcttgtagctggtaggttgggcagagaaaagtggtggccatccaaggggcccacgtagatatcagacatggttgagacctcgcggtaaccttgtgtagaatcatttggagttttatggattctaggtgggaagaaacaaaacaaccttgtaaatcaaatgagcatcgtttgaaagctataagttgtataaagctgttttaggaccaagaaagggggctaaccaggaaaaccaggaccagttgttaaatttccaccagtcaaagcctcctgaaactctgttttccattaacttgttggccctgtctgtaatttttttaagttggtttgcactttacctgattggttgatgaaaacagcaatgtttatcaagtgttgcacaagctcccccttgattggctgtgagcaaattaaaagctcatcaatttcataagactatgcttgctaatgaagcaatttttaagaagagtttctgggcagtaaaaatggagttaaggaggtcctccagttcccgtgccaataccagccagaacgccaattatagtcagtgctgttaaaactcctctttcagttttaccagattgagcgtgtatagggaggggaatgctatcgataagagtgagtttggggatgatgtaaactagggccaaatccccgtttaattagcagacaagcagagatatgccttgtttctatacaaaaatgtgatttgtcatgttaagacaaatatcaacagtgatactaaagtagggtttttccatgctgtgtaagtctgctttaataccctcagaagtggaagtcaaggctagttcatgtaatgggggaacacaggcagtacttgacagaatgaaagaggaatcaaaagcccaattagaggaaggagtgatgggatcccaaccaatattgtgaaattatggggagctgcagttttttgcaatgattttgcccgaagttgtgagactgaaaccagaagttgttatgtttaaaatgatattctggtgtgggtctggggaaaagggtagatccagaatagctggcttctttccacatagtggttctgttggggggcttgggaaatgaataaaacacaaagaagaattagaatatcaggtgaaggtagcaggtgctcctggcagaagaacccacataaggaagtgtccagaagccacacagggtatatctcagagactggagaacgtgtctggttattatgcagatgcacggctggaggtgggatccacacagctcagaacagctggatcttgctcacactctttcaagagaagcttccttgggttaagaaaaaaaacgaacccttccagtcaggtcagtgactggagagctccaaggaaagtctctcagtgacctggctgctggcaccatggactcagaaaagaaacgctttactgaagaggccaccaaatacttccgggagagagtcagcccagtgcatctgcaaatcctgctgactaacaatgaagcctggaagagattcgtgactgcggctgaattgcccagggatgaggcagatgctctctacgaagctctgaagaagcttagaacatatgcagctattgaggacgaatatgtgcagcagaaagatgagcagtttagggaatggtttttgaaagagtttccccaagtcaagaggaagatccaggagtccatagaaaagcttcgtgcccttgcaaatggtattgaagaggtccacagaggctgcaccatctccaatgtggtgtccagctccactggcgctgcctctggcatcatgtcccttgctggtcttgttttggcaccatttacagcagggacgagtctggcccttactgcagctggggtagggctgggagcagcgtctgctgtgactgggatcaccaccagcatcgtggagcactcatacacatcatcagcagaagctgaagccagcaggctgactgcaaccagcattgaccgattgaaggtatttaaggaagttatgcgtgacatcacacccaacttactttcccttcttaataattattacgaagccacacaaaccattgggagtgaaatccgtgccatcaggcaagccagagccagggcccgactccctgtgaccacctggcgaatctcagctggaagtggtggtcaagcagagagaacgattgcaggcaccacccgggcagtgagcagaggagcccggatcctgagtgcgaccacttcaggcatcttccttgcactggatgtggtcaaccttgtatacgagtcaaagcacttgcatgagggggcaaagtctgcatctgctgaggagctgaggcggcaggctcaggagctggaggagaatctaatggagctcactcagatctatcagcgtctgaatccatgccatacccactgaccccagaccagtgcagccagcaggggaggtgagccatacacaggccacgacaaaatgcaggcattttattagggggataaagagggcaaggtaaagtttatggagctgagtgttagtgactttggcatttctgtagctgagcacagcaggggaggggttaatgcagatggcaagtgcacatagattaagggatttggcttccttctgaactagatcatttgttagaggcttcagaaaaagaaaattagcttgaaatctagtctgggaaatggggggcagggaatgaaaaagttggtctcttgtttctccacgatacacaggcttcccatctaaagtcatgcttaactaaaagggaaaaaaaatgaaccaagcaaaagtatatagagtagccgtgacatttgcattattttctagactttacatttgcctgcaacaggcataacatgaaactccagagggaattgggatggataggaatgttcacataaacaccagcagtggctaactgttacacaacattcaaagtattcgagagaactgcctggagacagagagcgagggtccacagacacattagcaccatactgatgggagc

SEQ ID NO: 436816 - DNA, 2636 bp, Homo sapiens
cgcctagccgcgccggtcccagaagtggcgaaagccgcagccgagtccaggtcacgccgaagccgttgcccttttaagggggagccttgaaacggcgcctgggttccatgtttgcatccgcctcgcgggaaggaaactccatgttgtaacaaagtttcctccgcgccccctccctccccctcccccctagaacctggctcccctcccctccggagctcgcggggatccctccctcccacccctcccctcccccccgcgccccgattccggccccagccgggggggaggccgggcgcccgggccagagtccggccggagcggagcgcgcccggccccatggacagctcggccgtcattactcagatcagcaaggaggaggctcggggcccgctgcggggcaaaggtgaccagaagtcagcagcttcccagaagccccgaagccggggcatcctccactcactcttctgctgtgtctgccgggatgatggggaggccctgcctgctcacagcggggcgcccctgcttgtggaggagaatggcgccatccctacagaccccagtccaatacctgctccctgaggccaaggcccaggactcagacaagatctgcgtggtcatcgacctggacgagaccctggtgcacagctccttcaagccagtgaacaacgcggacttcatcatccctgtggagattgatggggtggtccaccaggtctacgtgttgaagcgtcctcatgtggatgagttcctgcagcgaatgggcgagctctttgaatgtgtgctgttcactgctagcctcgccaagtacgcagacccagtagctgacctgctggacaaatggggggccttccgggcccggctgtttcgagagtcctgcgtcttccaccgggggaactacgtgaaggacctgagccggttgggtcgagacctgcggcgggtgctcatcctggacaattcacctgcctcctatgtcttccatccagacaatgctgtaccggtggcctcgtggtttgacaacatgagtgacacagagctccacgacctcctccccttcttcgagcaactcagccgtgtggacgacgtgtactcagtgctcaggcagccacggccagggagctagtgagggtgatggggccaggacctgcccctgaccaatgatacccacacctcctcccaggaagactgcccaggcctttgttaggaaaacccatgggccgccgccacactcagtgccatggggaagcgggcgtctcccccaccagccccaccaggcggtgtaggggcagcaggctgcactgaggaccgtgagctccaggccccgtgtcagtgccttcaaacctcctcccctattctcaggggacctggggggccctgcctgctgctccctttttctgtctctgtccatgctgccatgtttctctgctgccaaattgggccccttggccccttccggttctgcttcctgggggcagggttcctgccttggacccccagtctgggaacggtggacatcaagtgccttgcatagagccccctcttccccgcccagctttcccaggggcacagctctaggctgggaggggagaaccagcccctccccctgccccacctcctcccttgggactgagagggcccctaccaacctttgcctctgccttggagggaggggaggtctgttaccactggggaaggcagcaggagtctgtccttcaggccccacagtgcagcttctccagggccgacagctgagggctgctccctgcatcatccaagcaatgacctcagacttctgccttaaccagccccggggcttggctcccccagctctgagcgtgggggcataggcaggaccccccttgtggtgccatataaatatgtacatgtgtatatagatttttaggggaaggagagagggaagggtcagggtagagacacccctcccttgcccctttcctgggcccagaagttggggggagggagggaaaggatttttacattttttaaactgctattttctgaatggaacaagctgggccaaggggcccaggccctgtcctctgtccctcacacccctttgctccgttcattcattcaaaaaaacatttcttgagcaccttctgtgcccagcatatgctaggcccaccagctaagtgtgtgtggggggtctctacgccagctcatcagtgcctccttgcccatccttcaccggtgcctttgggggatctgtaggaggtgggaccttctgtggggtttggggatctccaggaagcccgaccaagctgtccccttcccctgtgccaacccatctcctacagccccctgcctgatcccctgctggctgggggcagctcccaggatatcctgccttccaactgtttctgaagcccctcctcctaacatggcgattccggaggtcaaggccttgggctctccccagggtctaacggttaaggggacccacataccagtgccaagggggatgtcaagtggtgatgtcgttgtgctcccctcccccagagcgggtgggcggggggtgaatatggttggcctgcatcaggtggccttcccatttaagtgccttctctgtgactgagagccctagtgtgatgagaactaaagagaaagccagaccccta

SEQ ID NO: 436817 - DNA, 3023 bp, Homo sapiens
cttcttgtttgctcgtccttcccctccctcgtcctccgtctgtgtgcggtcgcctgtcgtttcttcttccgtctctctttctgtcttcggcgctttctctcccctctttcgtccctcccgtctattcttcttcctgtcacacacacgctctgcctgtctctctctctctgctcctccgccccccgccttgcgtccccttttctctccttctcgccccccgcgcgcccccgcggtgtgtcgttcttttttttctttctatatatataatacttgttttattttttttttttttttttttttatttatttttttatttttttttttttttgttttttattattttttattatatatttgtattttttattttttattttattttttttttttttttttttgtttgtcgggcttggcattattaatttttaaatggtgaacttacaaaatagtaacgacgagtgaaaagaacttcataaacgaggaaaaagaccaacccgcagacccacggcgcgcaccacggaggggcttgcagcgagaagacagggacctccgttcccaagtgcccagcactgcgccacaggccgggtggaacgggccttgagggcctctggtttgaggtcccccacggtcgggctttgggcccaccgcgtgcggcgccgtgctgggctcctaggatcggcagcgagtccagtgactcccaccgcacccccagtaatcacagggcggccggcgaccgcgggcaggggagggggtctgggaaggcccctggagaaggtggcatttcctcgaggtgaccagaagtcagcagcttcccagaagccccgaagccggggcatcctccactcactcttctgctgtgtctgccgggatgatggggaggccctgcctgctcacagcggggcgcccctgcttgtggaggagaatggcgccatccctacagaccccagtccaatacctgctccctgaggccaaggcccaggactcagacaagatctgcgtggtcatcgacctggacgagaccctggtgcacagctccttcaagccagtgaacaacgcggacttcatcatccctgtggagattgatggggtggtccaccaggtctacgtgttgaagcgtcctcatgtggatgagttcctgcagcgaatgggcgagctctttgaatgtgtgctgttcactgctagcctcgccaagtacgcagacccagtagctgacctgctggacaaatggggggccttccgggcccggctgtttcgagagtcctgcgtcttccaccgggggaactacgtgaaggacctgagccggttgggtcgagacctgcggcgggtgctcatcctggacaattcacctgcctcctatgtcttccatccagacaatgctgtaccggtggcctcgtggtttgacaacatgagtgacacagagctccacgacctcctccccttcttcgagcaactcagccgtgtggacgacgtgtactcagtgctcaggcagccacggccagggagctagtgagggtgatggggccaggacctgcccctgaccaatgatacccacacctcctcccaggaagactgcccaggcctttgttaggaaaacccatgggccgccgccacactcagtgccatggggaagcgggcgtctcccccaccagccccaccaggcggtgtaggggcagcaggctgcactgaggaccgtgagctccaggccccgtgtcagtgccttcaaacctcctcccctattctcaggggacctggggggccctgcctgctgctccctttttctgtctctgtccatgctgccatgtttctctgctgccaaattgggccccttggccccttccggttctgcttcctgggggcagggttcctgccttggacccccagtctgggaacggtggacatcaagtgccttgcatagagccccctcttccccgcccagctttcccaggggcacagctctaggctgggaggggagaaccagcccctccccctgccccacctcctcccttgggactgagagggcccctaccaacctttgcctctgccttggagggaggggaggtctgttaccactggggaaggcagcaggagtctgtccttcaggccccacagtgcagcttctccagggccgacagctgagggctgctccctgcatcatccaagcaatgacctcagacttctgccttaaccagccccggggcttggctcccccagctctgagcgtgggggcataggcaggaccccccttgtggtgccatataaatatgtacatgtgtatatagatttttaggggaaggagagagggaagggtcagggtagagacacccctcccttgcccctttcctgggcccagaagttggggggagggagggaaaggatttttacattttttaaactgctattttctgaatggaacaagctgggccaaggggcccaggccctgtcctctgtccctcacacccctttgctccgttcattcattcaaaaaaacatttcttgagcaccttctgtgcccagcatatgctaggcccaccagctaagtgtgtgtggggggtctctacgccagctcatcagtgcctccttgcccatccttcaccggtgcctttgggggatctgtaggaggtgggaccttctgtggggtttggggatctccaggaagcccgaccaagctgtccccttcccctgtgccaacccatctcctacagccccctgcctgatcccctgctggctgggggcagctcccaggatatcctgccttccaactgtttctgaagcccctcctcctaacatggcgattccggaggtcaaggccttgggctctccccagggtctaacggttaaggggacccacataccagtgccaagggggatgtcaagtggtgatgtcgttgtgctcccctcccccagagcgggtgggcggggggtgaatatggttggcctgcatcaggtggccttcccatttaagtgccttctctgtgactgagagccctagtgtgatgagaactaaagagaaagccagaccccta

SEQ ID NO: 436818 - DNA, 2358 bp, Homo sapiens
cggccgccttagctgtgcccgaagctcccagcccgagagggagcagggagagagtttgaactcagaggaggctcagagacgcggggcggggcctggcgcctttggggcgctcctgtccgctcgaggtgaccagaagtcagcagcttcccagaagccccgaagccggggcatcctccactcactcttctgctgtgtctgccgggatgatggggaggccctgcctgctcacagcggggcgcccctgcttgtggaggagaatggcgccatccctacagaccccagtccaatacctgctccctgaggccaaggcccaggactcagacaagatctgcgtggtcatcgacctggacgagaccctggtgcacagctccttcaagccagtgaacaacgcggacttcatcatccctgtggagattgatggggtggtccaccaggtctacgtgttgaagcgtcctcatgtggatgagttcctgcagcgaatgggcgagctctttgaatgtgtgctgttcactgctagcctcgccaagtacgcagacccagtagctgacctgctggacaaatggggggccttccgggcccggctgtttcgagagtcctgcgtcttccaccgggggaactacgtgaaggacctgagccggttgggtcgagacctgcggcgggtgctcatcctggacaattcacctgcctcctatgtcttccatccagacaatgctgtaccggtggcctcgtggtttgacaacatgagtgacacagagctccacgacctcctccccttcttcgagcaactcagccgtgtggacgacgtgtactcagtgctcaggcagccacggccagggagctagtgagggtgatggggccaggacctgcccctgaccaatgatacccacacctcctcccaggaagactgcccaggcctttgttaggaaaacccatgggccgccgccacactcagtgccatggggaagcgggcgtctcccccaccagccccaccaggcggtgtaggggcagcaggctgcactgaggaccgtgagctccaggccccgtgtcagtgccttcaaacctcctcccctattctcaggggacctggggggccctgcctgctgctccctttttctgtctctgtccatgctgccatgtttctctgctgccaaattgggccccttggccccttccggttctgcttcctgggggcagggttcctgccttggacccccagtctgggaacggtggacatcaagtgccttgcatagagccccctcttccccgcccagctttcccaggggcacagctctaggctgggaggggagaaccagcccctccccctgccccacctcctcccttgggactgagagggcccctaccaacctttgcctctgccttggagggaggggaggtctgttaccactggggaaggcagcaggagtctgtccttcaggccccacagtgcagcttctccagggccgacagctgagggctgctccctgcatcatccaagcaatgacctcagacttctgccttaaccagccccggggcttggctcccccagctctgagcgtgggggcataggcaggaccccccttgtggtgccatataaatatgtacatgtgtatatagatttttaggggaaggagagagggaagggtcagggtagagacacccctcccttgcccctttcctgggcccagaagttggggggagggagggaaaggatttttacattttttaaactgctattttctgaatggaacaagctgggccaaggggcccaggccctgtcctctgtccctcacacccctttgctccgttcattcattcaaaaaaacatttcttgagcaccttctgtgcccagcatatgctaggcccaccagctaagtgtgtgtggggggtctctacgccagctcatcagtgcctccttgcccatccttcaccggtgcctttgggggatctgtaggaggtgggaccttctgtggggtttggggatctccaggaagcccgaccaagctgtccccttcccctgtgccaacccatctcctacagccccctgcctgatcccctgctggctgggggcagctcccaggatatcctgccttccaactgtttctgaagcccctcctcctaacatggcgattccggaggtcaaggccttgggctctccccagggtctaacggttaaggggacccacataccagtgccaagggggatgtcaagtggtgatgtcgttgtgctcccctcccccagagcgggtgggcggggggtgaatatggttggcctgcatcaggtggccttcccatttaagtgccttctctgtgactgagagccctagtgtgatgagaactaaagagaaagccagaccccta

SEQ ID NO: 436819 - DNA, 2311 bp, Homo sapiens
ccgaagcacgtcgcttcctttcttgaaactcagtttcctcatctgtgaaatgggttaagaaggaggccgttctaaggggtgaccagaagtcagcagcttcccagaagccccgaagccggggcatcctccactcactcttctgctgtgtctgccgggatgatggggaggccctgcctgctcacagcggggcgcccctgcttgtggaggagaatggcgccatccctacagaccccagtccaatacctgctccctgaggccaaggcccaggactcagacaagatctgcgtggtcatcgacctggacgagaccctggtgcacagctccttcaagccagtgaacaacgcggacttcatcatccctgtggagattgatggggtggtccaccaggtctacgtgttgaagcgtcctcatgtggatgagttcctgcagcgaatgggcgagctctttgaatgtgtgctgttcactgctagcctcgccaagtacgcagacccagtagctgacctgctggacaaatggggggccttccgggcccggctgtttcgagagtcctgcgtcttccaccgggggaactacgtgaaggacctgagccggttgggtcgagacctgcggcgggtgctcatcctggacaattcacctgcctcctatgtcttccatccagacaatgctgtaccggtggcctcgtggtttgacaacatgagtgacacagagctccacgacctcctccccttcttcgagcaactcagccgtgtggacgacgtgtactcagtgctcaggcagccacggccagggagctagtgagggtgatggggccaggacctgcccctgaccaatgatacccacacctcctcccaggaagactgcccaggcctttgttaggaaaacccatgggccgccgccacactcagtgccatggggaagcgggcgtctcccccaccagccccaccaggcggtgtaggggcagcaggctgcactgaggaccgtgagctccaggccccgtgtcagtgccttcaaacctcctcccctattctcaggggacctggggggccctgcctgctgctccctttttctgtctctgtccatgctgccatgtttctctgctgccaaattgggccccttggccccttccggttctgcttcctgggggcagggttcctgccttggacccccagtctgggaacggtggacatcaagtgccttgcatagagccccctcttccccgcccagctttcccaggggcacagctctaggctgggaggggagaaccagcccctccccctgccccacctcctcccttgggactgagagggcccctaccaacctttgcctctgccttggagggaggggaggtctgttaccactggggaaggcagcaggagtctgtccttcaggccccacagtgcagcttctccagggccgacagctgagggctgctccctgcatcatccaagcaatgacctcagacttctgccttaaccagccccggggcttggctcccccagctctgagcgtgggggcataggcaggaccccccttgtggtgccatataaatatgtacatgtgtatatagatttttaggggaaggagagagggaagggtcagggtagagacacccctcccttgcccctttcctgggcccagaagttggggggagggagggaaaggatttttacattttttaaactgctattttctgaatggaacaagctgggccaaggggcccaggccctgtcctctgtccctcacacccctttgctccgttcattcattcaaaaaaacatttcttgagcaccttctgtgcccagcatatgctaggcccaccagctaagtgtgtgtggggggtctctacgccagctcatcagtgcctccttgcccatccttcaccggtgcctttgggggatctgtaggaggtgggaccttctgtggggtttggggatctccaggaagcccgaccaagctgtccccttcccctgtgccaacccatctcctacagccccctgcctgatcccctgctggctgggggcagctcccaggatatcctgccttccaactgtttctgaagcccctcctcctaacatggcgattccggaggtcaaggccttgggctctccccagggtctaacggttaaggggacccacataccagtgccaagggggatgtcaagtggtgatgtcgttgtgctcccctcccccagagcgggtgggcggggggtgaatatggttggcctgcatcaggtggccttcccatttaagtgccttctctgtgactgagagccctagtgtgatgagaactaaagagaaagccagaccccta

SEQ ID NO: 436820 - DNA, 2660 bp, Homo sapiens
cgcctagccgcgccggtcccagaagtggcgaaagccgcagccgagtccaggtcacgccgaagccgttgcccttttaagggggagccttgaaacggcgcctgggttccatgtttgcatccgcctcgcgggaaggaaactccatgttgtaacaaagtttcctccgcgccccctccctccccctcccccctagaacctggctcccctcccctccggagctcgcggggatccctccctcccacccctcccctcccccccgcgccccgattccggccccagccgggggggaggccgggcgcccgggccagagtccggccggagcggagcgcgcccggccccatggacagctcggccgtcattactcagatcagcaaggaggaggctcggggcccgctgcggggcaaaggtgaccagaagtcagcagcttcccagaagccccgaagccggggcatcctccactcactcttctgctgtgtctgccgggatgatggggaggccctgcctgctcacagcggggcgcccctgcttgtggaggagaatggcgccatccctacagaccccagtccaatacctgctccctgaggccaaggcccaggactcagacaagatctgcgtggtcatcgacctggacgagaccctggtgcacagctccttcaagccagtgaacaacgcggacttcatcatccctgtggagattgatggggtggtccaccagccccctcactggcccgccccccaggtctacgtgttgaagcgtcctcatgtggatgagttcctgcagcgaatgggcgagctctttgaatgtgtgctgttcactgctagcctcgccaagtacgcagacccagtagctgacctgctggacaaatggggggccttccgggcccggctgtttcgagagtcctgcgtcttccaccgggggaactacgtgaaggacctgagccggttgggtcgagacctgcggcgggtgctcatcctggacaattcacctgcctcctatgtcttccatccagacaatgctgtaccggtggcctcgtggtttgacaacatgagtgacacagagctccacgacctcctccccttcttcgagcaactcagccgtgtggacgacgtgtactcagtgctcaggcagccacggccagggagctagtgagggtgatggggccaggacctgcccctgaccaatgatacccacacctcctcccaggaagactgcccaggcctttgttaggaaaacccatgggccgccgccacactcagtgccatggggaagcgggcgtctcccccaccagccccaccaggcggtgtaggggcagcaggctgcactgaggaccgtgagctccaggccccgtgtcagtgccttcaaacctcctcccctattctcaggggacctggggggccctgcctgctgctccctttttctgtctctgtccatgctgccatgtttctctgctgccaaattgggccccttggccccttccggttctgcttcctgggggcagggttcctgccttggacccccagtctgggaacggtggacatcaagtgccttgcatagagccccctcttccccgcccagctttcccaggggcacagctctaggctgggaggggagaaccagcccctccccctgccccacctcctcccttgggactgagagggcccctaccaacctttgcctctgccttggagggaggggaggtctgttaccactggggaaggcagcaggagtctgtccttcaggccccacagtgcagcttctccagggccgacagctgagggctgctccctgcatcatccaagcaatgacctcagacttctgccttaaccagccccggggcttggctcccccagctctgagcgtgggggcataggcaggaccccccttgtggtgccatataaatatgtacatgtgtatatagatttttaggggaaggagagagggaagggtcagggtagagacacccctcccttgcccctttcctgggcccagaagttggggggagggagggaaaggatttttacattttttaaactgctattttctgaatggaacaagctgggccaaggggcccaggccctgtcctctgtccctcacacccctttgctccgttcattcattcaaaaaaacatttcttgagcaccttctgtgcccagcatatgctaggcccaccagctaagtgtgtgtggggggtctctacgccagctcatcagtgcctccttgcccatccttcaccggtgcctttgggggatctgtaggaggtgggaccttctgtggggtttggggatctccaggaagcccgaccaagctgtccccttcccctgtgccaacccatctcctacagccccctgcctgatcccctgctggctgggggcagctcccaggatatcctgccttccaactgtttctgaagcccctcctcctaacatggcgattccggaggtcaaggccttgggctctccccagggtctaacggttaaggggacccacataccagtgccaagggggatgtcaagtggtgatgtcgttgtgctcccctcccccagagcgggtgggcggggggtgaatatggttggcctgcatcaggtggccttcccatttaagtgccttctctgtgactgagagccctagtgtgatgagaactaaagagaaagccagaccccta

SEQ ID NO: 436821 - DNA, 2660 bp, Homo sapiens
cggccgccttagctgtgcccgaagctcccagcccgagagggagcagggagagagtttgaactcagaggaggctcagagacgcggggcggggcctggcgcctttggggcgctcctgtccgctcgaggtgaggaaactgaggcaggaatagagagggaactccttcgggggtttcctggcaggcattgcgtggtgcatgggcgcccccccaccattggcgccaatggggctgggagatgggggagctgaggagggcgcctatgggccacccgtgagactccgccccaccccccacccccacccccccgggctgcggtccggtagggtcttgggagggggcgccgaggtgacagcaggctggggaggcttggagggatctcccgccaacacacagctacgttccccacaaacttcgcgtcacgcgtggaggcgccgaccccctcggaggcacagagaggacggccggcacttccaagagtcgcttggcgcccgcggggagagtcgtgcgcctagtgggcacgcaccaccccgcaaagcctcgccgccccgacgaggctgcgtcccccagcgtggctgggccggggtgggggggtctgtcttctccttttccccgtgtggacctcaggatctggacgctgcccccaggtgaccagaagtcagcagcttcccagaagccccgaagccggggcatcctccactcactcttctgctgtgtctgccgggatgatggggaggccctgcctgctcacagcggggcgcccctgcttgtggaggagaatggcgccatccctacagaccccagtccaatacctgctccctgaggccaaggcccaggactcagacaagatctgcgtggtcatcgacctggacgagaccctggtgcacagctccttcaagccagtgaacaacgcggacttcatcatccctgtggagattgatggggtggtccaccagctgcggcgggtgctcatcctggacaattcacctgcctcctatgtcttccatccagacaatgctgtaccggtggcctcgtggtttgacaacatgagtgacacagagctccacgacctcctccccttcttcgagcaactcagccgtgtggacgacgtgtactcagtgctcaggcagccacggccagggagctagtgagggtgatggggccaggacctgcccctgaccaatgatacccacacctcctcccaggaagactgcccaggcctttgttaggaaaacccatgggccgccgccacactcagtgccatggggaagcgggcgtctcccccaccagccccaccaggcggtgtaggggcagcaggctgcactgaggaccgtgagctccaggccccgtgtcagtgccttcaaacctcctcccctattctcaggggacctggggggccctgcctgctgctccctttttctgtctctgtccatgctgccatgtttctctgctgccaaattgggccccttggccccttccggttctgcttcctgggggcagggttcctgccttggacccccagtctgggaacggtggacatcaagtgccttgcatagagccccctcttccccgcccagctttcccaggggcacagctctaggctgggaggggagaaccagcccctccccctgccccacctcctcccttgggactgagagggcccctaccaacctttgcctctgccttggagggaggggaggtctgttaccactggggaaggcagcaggagtctgtccttcaggccccacagtgcagcttctccagggccgacagctgagggctgctccctgcatcatccaagcaatgacctcagacttctgccttaaccagccccggggcttggctcccccagctctgagcgtgggggcataggcaggaccccccttgtggtgccatataaatatgtacatgtgtatatagatttttaggggaaggagagagggaagggtcagggtagagacacccctcccttgcccctttcctgggcccagaagttggggggagggagggaaaggatttttacattttttaaactgctattttctgaatggaacaagctgggccaaggggcccaggccctgtcctctgtccctcacacccctttgctccgttcattcattcaaaaaaacatttcttgagcaccttctgtgcccagcatatgctaggcccaccagctaagtgtgtgtggggggtctctacgccagctcatcagtgcctccttgcccatccttcaccggtgcctttgggggatctgtaggaggtgggaccttctgtggggtttggggatctccaggaagcccgaccaagctgtccccttcccctgtgccaacccatctcctacagccccctgcctgatcccctgctggctgggggcagctcccaggatatcctgccttccaactgtttctgaagcccctcctcctaacatggcgattccggaggtcaaggccttgggctctccccagggtctaacggttaaggggacccacataccagtgccaagggggatgtcaagtggtgatgtcgttgtgctcccctcccccagagcgggtgggcggggggtgaatatggttggcctgcatcaggtggccttcccatttaagtgccttctctgtgactgagagccctagtgtgatgagaactaaagagaaagccagaccccta

SEQ ID NO: 436822 - DNA, 2959 bp, Homo sapiens
  misc_feature (2934)..(2934): n is a, c, g, or t
  misc_feature (2959)..(2959): n is a, c, g, or t
cgcctagccgcgccggtcccagaagtggcgaaagccgcagccgagtccaggtcacgccgaagccgttgcccttttaagggggagccttgaaacggcgcctgggttccatgtttgcatccgcctcgcgggaaggaaactccatgttgtaacaaagtttcctccgcgccccctccctccccctcccccctagaacctggctcccctcccctccggagctcgcggggatccctccctcccacccctcccctcccccccgcgccccgattccggccccagccgggggggaggccgggcgcccgggccagagtccggccggagcggagcgcgcccggccccatggacagctcggccgtcattactcagatcagcaaggaggaggctcggggcccgctgcggggcaaaggtgaccagaagtcagcagcttcccagaagccccgaagccggggcatcctccactcactcttctgctgtgtctgccgggatgatggggaggccctgcctgctcacagcggggcgcccctgcttgtggaggagaatggcgccatccctacagaccccagtccaatacctgctccctgaggccaaggcccaggactcagacaagatctgcgtggtcatcgacctggacgagaccctggtgcacagctccttcaagccagtgaacaacgcggacttcatcatccctgtggagattgatggggtggtccaccaggtctacgtgttgaagcgtcctcatgtggatgagttcctgcagcgaatgggcgagctctttgaatgtgtgctgttcactgctagcctcgccaagtacgcagacccagtagctgacctgctggacaaatggggggccttccgggcccggctgtttcgagagtcctgcgtcttccaccgggggaactacgtgaaggacctgagccggttgggtcgagacctgcggcgggtgctcatcctggacaattcacctgcctcctatgtcttccatccagacaatgctgtaccggtggcctcgtggtttgacaacatgagtgacacagagctccacgacctcctccccttcttcgagcaactcagccgtgtggacgacgtgtactcagtgctcaggcagccacggccagggagctagtgagggtgatggggccaggacctgcccctgaccaatgatacccacacctcctcccaggaagactgcccaggcctttgttaggaaaacccatgggccgccgccacactcagtgccatggggaagcgggcgtctcccccaccagccccaccaggcggtgtaggggcagcaggctgcactgaggaccgtgagctccaggccccgtgtcagtgccttcaaacctcctcccctattctcaggggacctggggggccctgcctgctgctccctttttctgtctctgtccatgctgccatgtttctctgctgccaaattgggccccttggccccttccggttctgcttcctgggggcagggttcctgccttggacccccagtctgggaacggtggacatcaagtgccttgcatagagccccctcttccccgcccagctttcccaggggcacagctctaggctgggaggggagaaccagcccctccccctgccccacctcctcccttgggactgagagggcccctaccaacctttgcctctgccttggagggaggggaggtctgttaccactggggaaggcagcaggagtctgtccttcaggccccacagtgcagcttctccagggccgacagctgagggctgctccctgcatcatccaagcaatgacctcagacttctgccttaaccagccccggggcttggctcccccagctctgagcgtgggggcataggcaggaccccccttgtggtgccatataaatatgtacatgtgtatatagatttttaggggaaggagagagggaagggtcagggtagagacacccctcccttgcccctttcctgggcccagaagttggggggagggagggaaaggatttttacattttttaaactgctattttctgaatggaacaagctgggccaaggggcccaggccctgtcctctgtccctcacacccctttgctccgttcattcattcaaaaaaacatttcttgagcaccttctgtgcccagcatatgctaggcccaccagctaagtgtgtgtggggggtctctacgccagctcatcagtgcctccttgcccatccttcaccggtgcctttgggggatctgtaggaggtgggaccttctgtggggtttggggatctccaggaagcccgaccaagctgtccccttcccctgtgccaacccatctcctacagccccctgcctgatcccctgctggctgggggcagctcccaggatatcctgccttccaactgtttctgaagcccctcctcctaacatggcgattccggaggtcaaggccttgggctctccccagggtctaacggttaaggggacccacataccagtgccaagggggatgtcaagtggtgatgtcgttgtgctcccctcccccagagcgggtgggcggggggtgaatatggttggcctgcatcaggtggccttcccatttaagtgccttctctgtgactgagagccctagtgtgatgagaactaaagagaaagccagacccctaaaaaaaaaaaaaaacaaaaaaaaaaacaactttttgggccggccttgggccctctggaaaaagtttttaaacccctttctttgggcgccgcgggggccccatatgtgttacggtaacactgcgccatagcctggtcccaaagagagaaacccggggccataacaaaggtgtctggtttctcccccatttaaaaaaccgccgcgggcggaacccagaggctgtctaacaaattcccaatagggactccgagaggcactacacgggatctatacacccggaggcacacagcgacctccanttaaattagcgcgctccccgggcgn

SEQ ID NO: 436823 - DNA, 2644 bp, Homo sapiens
cgcctagccgcgccggtcccagaagtggcgaaagccgcagccgagtccaggtcacgccgaagccgttgcccttttaagggggagccttgaaacggcgcctgggttccatgtttgcatccgcctcgcgggaaggaaactccatgttgtaacaaagtttcctccgcgccccctccctccccctcccccctagaacctggctcccctcccctccggagctcgcggggatccctccctcccacccctcccctcccccccgcgccccgattccggccccagccgggggggaggccgggcgcccgggccagagtccggccggagcggagcgcgcccggccccatggacagctcggccgtcattactcagatcagcaaggaggaggctcggggcccgctgcggggcaaaggtgaccagaagtcagcagcttcccagaagccccgaagccggggcatcctccactcactcttctgctgtgtctgccgggatgatggggaggccctgcctgctcacagcggggcgcccctgcttgtggaggagaatggcgccatccctacagaccccagtccaatacctgctccctgaggccaaggcccaggactcagacaagatctgcgtggtcatcgacctggacgagaccctggtgcacagctccttcaagccagtgaacaacgcggacttcatcatccctgtggagattgatggggtggtccaccaggtctacgtgttgaagcgtcctcatgtggatgagttcctgcagcgaatgggcgagctctttgaatgtgtgctgttcactgctagcctcgccaagtacgcagacccagtagctgacctgctggacaaatggggggccttccgggcccggctgtttcgagagtcctgcgtcttccaccgggggaactacgtgaaggacctgagccggttgggtcgagacctgcggcgggtgctcatcctggacaattcacctgcctcctatgtcttccatccagacaatgctgtaccggtggcctcgtggtttgacaacatgagtgacacagagctccacgacctcctccccttcttcgagcaactcagccgtgtggacgacgtgtactcagtgctcaggcagccacggccagggagctagtgagggtgatggggccaggacctgcccctgaccaatgatacccacacctcctcccaggaagactgcccaggcctttgttaggaaaacccatgggccgccgccacactcagtgccatggggaagcgggcgtctcccccaccagccccaccaggcggtgtaggggcagcaggctgcactgaggaccgtgagctccaggccccgtgtcagtgccttcaaacctcctcccctattctcaggggacctggggggccctgcctgctgctccctttttctgtctctgtccatgctgccatgtttctctgctgccaaattgggccccttggccccttccggttctgcttcctgggggcagggttcctgccttggacccccagtctgggaacggtggacatcaagtgccttgcatagagccccctcttccccgcccagctttcccaggggcacagctctaggctgggaggggagaaccagcccctccccctgccccacctcctcccttgggactgagagggcccctaccaacctttgcctctgccttggagggaggggaggtctgttaccactggggaaggcagcaggagtctgtccttcaggccccacagtgcagcttctccagggccgacagctgagggctgctccctgcatcatccaagcaatgacctcagacttctgccttaaccagccccggggcttggctcccccagctctgagcgtgggggcataggcaggaccccccttgtggtgccatataaatatgtacatgtgtatatagatttttaggggaaggagagagggaagggtcagggtagagacacccctcccttgcccctttcctgggcccagaagttggggggagggagggaaaggatttttacattttttaaactgctattttctgaatggaacaagctgggccaaggggcccaggccctgtcctctgtccctcacacccctttgctccgttcattcattcaaaaaaacatttcttgagcaccttctgtgcccagcatatgctaggcccaccagctaagtgtgtgtggggggtctctacgccagctcatcagtgcctccttgcccatccttcaccggtgcctttgggggatctgtaggaggtgggaccttctgtggggtttggggatctccaggaagcccgaccaagctgtccccttcccctgtgccaacccatctcctacagccccctgcctgatcccctgctggctgggggcagctcccaggatatcctgccttccaactgtttctgaagcccctcctcctaacatggcgattccggaggtcaaggccttgggctctccccagggtctaacggttaaggggacccacataccagtgccaagggggatgtcaagtggtgatgtcgttgtgctcccctcccccagagcgggtgggcggggggtgaatatggttggcctgcatcagtgcaatcccagtagtgccattcttcctgctgacctgatacacaccctaggtgtgattgagaatcaaagaccgccctactcggtgttc

SEQ ID NO: 436824 - DNA, 2674 bp, Homo sapiens
cgcctagccgcgccggtcccagaagtggcgaaagccgcagccgagtccaggtcacgccgaagccgttgcccttttaagggggagccttgaaacggcgcctgggttccatgtttgcatccgcctcgcgggaaggaaactccatgttgtaacaaagtttcctccgcgccccctccctccccctcccccctagaacctggctcccctcccctccggagctcgcggggatccctccctcccacccctcccctcccccccgcgccccgattccggccccagccgggggggaggccgggcgcccgggccagagtccggccggagcggagcgcgcccggccccatggacagctcggccgtcattactcagatcagcaaggaggaggctcggggcccgctgcggggcaaaggtgaccagaagtcagcagcttcccagaagccccgaagccggggcatcctccactcactcttctgctgtgtctgccgggatgatggggaggccctgcctgctcacagcggggcgcccctgcttgtggaggagaatggcgccatccctacagaccccagtccaatacctgctccctgaggccaaggcccaggactcagacaagatctgcgtggtcatcgacctggacgagaccctggtgcacagctccttcaagccagtgaacaacgcggacttcatcatccctgtggagattgatggggtggtccaccaggtctacgtgttgaagcgtcctcatgtggatgagttcctgcagcgaatgggcgagctctttgaatgtgtgctgttcactgctagcctcgccaagtacgcagacccagtagctgacctgctggacaaatggggggccttccgggcccggctgtttcgagagtcctgcgtcttccaccgggggaactacgtgaaggacctgagccggttgggtcgagacctgcggcgggtgctcatcctggacaattcacctgcctcctatgtcttccatccagacaatgctgtaccggtggcctcgtggtttgacaacatgagtgacacagagctccacgacctcctccccttcttcgagcaactcagccgtgtggacgacgtgtactcagtgctcaggcagccacggccagggagctagtgagggtgatggggccaggacctgcccctgaccaatgatacccacacctcctcccaggaagactgcccaggcctttgttaggaaaacccatgggccgccgccacactcagtgccatggggaagcgggcgtctcccccaccagccccaccaggcggtgtaggggcagcaggctgcactgaggaccgtgagctccaggccccgtgtcagtgccttcaaacctcctcccctattctcaggggacctggggggccctgcctgctgctccctttttctgtctctgtccatgctgccatgtttctctgctgccaaattgggccccttggccccttccggttctgcttcctgggggcagggttcctgccttggacccccagtctgggaacggtggacatcaagtgccttgcatagagccccctcttccccgcccagctttcccaggggcacagctctaggctgggaggggagaaccagcccctccccctgccccacctcctcccttgggactgagagggcccctaccaacctttgcctctgccttggagggaggggaggtctgttaccactggggaaggcagcaggagtctgtccttcaggccccacagtgcagcttctccagggccgacagctgagggctgctccctgcatcatccaagcaatgacctcagacttctgccttaaccagccccggggcttggctcccccagctctgagcgtgggggcataggcaggaccccccttgtggtgccatataaatatgtacatgtgtatatagatttttaggggaaggagagagggaagggtcagggtagagacacccctcccttgcccctttcctgggcccagaagttggggggagggagggaaaggatttttacattttttaaactgctattttctgaatggaacaagctgggccaaggggcccaggccctgtcctctgtccctcacacccctttgctccgttcattcattcaaaaaaacatttcttgagcaccttctgtgcccagcatatgctaggcccaccagctaagtgtgtgtggggggtctctacgccagctcatcagtgcctccttgcccatccttcaccggtgcctttgggggatctgtaggaggtgggaccttctgtggggtttggggatctccaggaagcccgaccaagctgtccccttcccctgtgccaacccatctcctacagccccctgcctgatcccctgctggctgggggcagctcccaggatatcctgccttccaactgtttctgaagcccctcctcctaacatggcgattccggaggtcaaggccttgggctctccccagggtctaacggttaaggggacccacataccagtccccaccccgggcccccgagccgcacttcagatttcccagcgcatcatccaggtcagccagttgttcatcccggagccggtggggctggtgggctagcatgcaactcacacagcgctcctcgtccgccagcagagcgtccagccgctcggcgccggcgcgcagctccagttgcagcggcaccgagtgatgggcgagggcggccgc

SEQ ID NO: 436825 - DNA, 2469 bp, Homo sapiens
cgcctagccgcgccggtcccagaagtggcgaaagccgcagccgagtccaggtcacgccgaagccgttgcccttttaagggggagccttgaaacggcgcctgggttccatgtttgcatccgcctcgcgggaaggaaactccatgttgtaacaaagtttcctccgcgccccctccctccccctcccccctagaacctggctcccctcccctccggagctcgcggggatccctccctcccacccctcccctcccccccgcgccccgattccggccccagccgggggggaggccgggcgcccgggccagagtccggccggagcggagcgcgcccggccccatggacagctcggccgtcattactcagatcagcaaggaggaggctcggggcccgctgcggggcaaaggtgaccagaagtcagcagcttcccagaagccccgaagccggggcatcctccactcactcttctgctgtgtctgccgggatgatggggaggccctgcctgctcacagcggggcgcccctgcttgtggaggagaatggcgccatccctacagaccccagtccaatacctgctccctgaggccaaggcccaggactcagacaagatctgcgtggtcatcgacctggacgagaccctggtgcacagctccttcaagccagtgaacaacgcggacttcatcatccctgtggagattgatggggtggtccaccaggtctacgtgttgaagcgtcctcatgtggatgagttcctgcagcgaatgggcgagctctttgaatgtgtgctgttcactgctagcctcgccaagtacgcagacccagtagctgacctgctggacaaatggggggccttccgggcccggctgtttcgagagtcctgcgtcttccaccgggggaactacgtgaaggacctgagccggttgggtcgagacctgcggcgggtgctcatcctggacaattcacctgcctcctatgtcttccatccagacaatgctgtaccggtggcctcgtggtttgacaacatgagtgacacagagctccacgacctcctccccttcttcgagcaactcagccgtgtggacgacgtgtactcagtgctcaggcagccacggccagggagctagtgagggtgatggggccaggacctgcccctgaccaatgatacccacacctcctcccaggaagactgcccaggcctttgttaggaaaacccatgggccgccgccacactcagtgccatggggaagcgggcgtctcccccaccagccccaccaggcggtgtaggggcagcaggctgcactgaggaccgtgagctccaggccccgtgtcagtgccttcaaacctcctcccctattctcaggggacctggggggccctgcctgctgctccctttttctgtctctgtccatgctgccatgtttctctgctgccaaattgggccccttggccccttccggttctgcttcctgggggcagggttcctgccttggacccccagtctgggaacggtggacatcaagtgccttgcatagagccccctcttccccgcccagctttcccaggggcacagctctaggctgggaggggagaaccagcccctccccctgccccacctcctcccttgggactgagagggcccctaccaacctttgcctctgccttggagggaggggaggtctgttaccactggggaaggcagcaggagtctgtccttcaggccccacagtgcagcttctccagggccgacagctgagggctgctccctgcatcatccaagcaatgacctcagacttctgccttaaccagccccggggcttggctcccccagctctgagcgtgggggcataggcaggaccccccttgtggtgccatataaatatgtacatgtgtatatagatttttaggggaaggagagagggaagggtcagggtagagacacccctcccttgcccctttcctgggcccagaagttggggggagggagggaaaggatttttacattttttaaactgctattttctgaatggaacaagctgggccaaggggcccaggccctgtcctctgtccctcacacccctttgctccgttcattcattcaaaaaaacatttcttgagcaccttctgtgcccagcatatgctaggcccaccagctaagtgtgtgtggggggtctctacgccagctcatctcccaggatatcctgccttccaactgtttctgaagcccctcctcctaacatggcgattccggaggtcaaggccttgggctctccccagggtctaacggttaaggggacccacataccagtgccaagggggatgtcaagtggtgatgtcgttgtgctcccctcccccagagcgggtgggcggggggtgaatatggttggcctgcatcaggtggccttcccatttaagtgccttctctgtgactgagagccctagtgtgatgagaactaaagagaaagccagaccccta

SEQ ID NO: 436826 - DNA, 1821 bp, Homo sapiens
cgcctagccgcgccggtcccagaagtggcgaaagccgcagccgagtccaggtcacgccgaagccgttgcccttttaagggggagccttgaaacggcgcctgggttccatgtttgcatccgcctcgcgggaaggaaactccatgttgtaacaaagtttcctccgcgccccctccctccccctcccccctagaacctggctcccctcccctccggagctcgcggggatccctccctcccacccctcccctcccccccgcgccccgattccggccccagccgggggggaggccgggcgcccgggccagagtccggccggagcggagcgcgcccggccccatggacagctcggccgtcattactcagatcagcaaggaggaggctcggggcccgctgcggggcaaaggtgaccagaagtcagcagcttcccagaagccccgaagccggggcatcctccactcactcttctgctgtgtctgccgggatgatggggaggccctgcctgctcacagcggggcgcccctgcttgtggaggagaatggcgccatccctacagaccccagtccaatacctgctccctgaggccaaggcccaggactcagacaagatctgcgtggtcatcgacctggacgagaccctggtgcacagctccttcaagccagtgaacaacgcggacttcatcatccctgtggagattgatggggtggtccaccaggtctacgtgttgaagcgtcctcatgtggatgagttcctgcagcgaatgggcgagctctttgaatgtgtgctgttcactgctagcctcgccaagtacgcagacccagtagctgacctgctggacaaatggggggccttccgggcccggctgtttcgagagtcctgcgtcttccaccgggggaactacgtgaaggacctgagccggttgggtcgagacctgcggcgggtgctcatcctggacaattcacctgcctcctatgtcttccatccagacaatgctgtaccggtggcctcgtggtttgacaacatgagtgacacagagctccacgacctcctccccttcttcgagcaactcagccgtgtggacgacgtgtactcagtgctcaggcagccacggccagggagctagtgagggtgatggggccaggacctgcccctgaccaatgatacccacacctcctcccaggaagactgcccaggcctttgttaggaaaacccatgggccgccgccacactcagtgccatggggaagcgggcgtctcccccaccagccccaccaggcggtgtaggggcagcaggctgcactgaggaccgtgagctccaggccccgtgtcagtgccttcaaacctcctcccctattctcaggggacctggggggccctgcctgctgctccctttttctgtctctgtccatgctgccatgtttctctgctgccaaattgggccccttggccccttccggttctgcttcctgggggcagggttcctgccttggacccccagtctgggaacggtggacatcaagtgccttgcatagagccccctcttccccgcccagctttcccaggggcacagctctaggctgggaggggagaaccagcccctccccctgccccacctcctctccccagggtctaacggttaaggggacccacataccagtgccaagggggatgtcaagtggtgatgtcgttgtgctcccctcccccagagcgggtgggcggggggtgaatatggttggcctgcatcaggtggccttcccatttaagtgccttctctgtgactgagagccctagtgtgatgagaactaaagagaaagccagaccccta

SEQ ID NO: 436827 - DNA, 1525 bp, Homo sapiens
  misc_feature (1423)..(1423): n is a, c, g, or t
  misc_feature (1433)..(1433): n is a, c, g, or t
  misc_feature (1435)..(1435): n is a, c, g, or t
cgcctagccgcgccggtcccagaagtggcgaaagccgcagccgagtccaggtcacgccgaagccgttgcccttttaagggggagccttgaaacggcgcctgggttccatgtttgcatccgcctcgcgggaaggaaactccatgttgtaacaaagtttcctccgcgccccctccctccccctcccccctagaacctggctcccctcccctccggagctcgcggggatccctccctcccacccctcccctcccccccgcgccccgattccggccccagccgggggggaggccgggcgcccgggccagagtccggccggagcggagcgcgcccggccccatggacagctcggccgtcattactcagatcagcaaggaggaggctcggggcccgctgcggggcaaaggtgaccagaagtcagcagcttcccagaagccccgaagccggggcatcctccactcactcttctgctgtgtctgccgggatgatggggaggccctgcctgctcacagcggggcgcccctgcttgtggaggagaatggcgccatccctacagaccccagtccaatacctgctccctgaggccaaggcccaggactcagacaagatctgcgtggtcatcgacctggacgagaccctggtgcacagctccttcaagccagtgaacaacgcggacttcatcatccctgtggagattgatggggtggtccaccaggtctacgtgttgaagcgtcctcatgtggatgagttcctgcagcgaatgggcgagctctttgaatgtgtgctgttcactgctagcctcgccaagtacgcagacccagtagctgacctgctggacaaatggggggccttccgggcccggctgtttcgagagtcctgcgtcttccaccgggggaactacgtgaaggacctgagccggttgggtcgagacctgcggcgggtgctcatcctggacaattcacctgcctcctatgtcttccatccagacaatgctgtaccggtggcctcgtggtttgacaacatgagtgacacagagctccacgacctcctccccttcttcgagcaactcagccgtgtggacgacgtgtactcagtgctcaggcagccacggccagggagctagtgagggtgatggggccaggacctgcccctgaccaatgatacccacacctcctcccaggaagactgcccaggcctttgttaggaaaacccatgggccgccgccacactcagtgccatggggaagcgggcgtctcccccaccagccccaccaggcggtgtaggggcagcaggctgcactgaggaccgtgagctccaggccccgtgtcagtgccttcaaacctcctcccctattctcaggggacctggggggccctgcctgctgctccctttttctgtctctgtccatgctgccatgtttctcttntgcaatgggncntggccttccggctgtcccgggacggtcccttggacgccgttggacgctggccacgtgcctaaacccttcgccttccgcggactccgcgtg

SEQ ID NO: 436828 - DNA, 1197 bp, Homo sapiens
cttcttgtttgctcgtccttcccctccctcgtcctccgtctgtgtgcggtcgcctgtcgtttcttcttccgtctctctttctgtcttcggcgctttctctcccctctttcgtccctcccgtctattcttcttcctgtcacacacacgctctgcctgtctctctctctctgctcctccgccccccgccttgcgtccccttttctctccttctcgccccccgcgcgcccccgcggtgtgtcgttcttttttttctttctatatatataatacttgttttattttttttttttttttttttttatttatttttttatttttttttttttttgttttttattattttttattatatatttgtattttttattttttattttattttttttttttttttttttgtttgtcgggcttggcattattaatttttaaatggtgaacttacaaaatagtaacgacgagtgaaaagaacttcataaacgaggaaaaagaccaacccgcagacccacggcgcgcaccacggaggggcttgcagcgagaagacagggacctccgttcccaagtgcccagcactgcgccacaggccgggtggaacgggccttgagggcctctggtttgaggtcccccacggtcgggctttgggcccaccgcgtgcggcgccgtgctgggctcctaggatcggcagcgagtccagtgactcccaccgcacccccagtaatcacagggcggccggcgaccgcgggcaggggagggggtctgggaaggcccctggagaaggtggcatttcctcgaggtcggtggaatttggctacgcgaaaggaacagcgcgtacgaaaacttcaggcgggaacgcgcggtggcccgtgcgcggcgggtagacgtgcggggccccgggtggggccgtggggagaggtcggcagggggctttcccagggcagagagttagaatttcacgtcctacagaccgggggcacctcgccctggggctgcggggggcggcgaccgtcccattcaagagcgtgattctgaggtttgcacagctgtttcgggccagcagagccttcgctggctcttgacgtccttgcgaggtgatctctgcgaccaccagacaggagagaagacccattttacagatgaggtagtgctatctccaagtcctcaacgaggaaaccgagaagcctctagtcccgggtcttcaga

SEQ ID NO: 436829 - DNA, 582 bp, Homo sapiens
cttcttgtttgctcgtccttcccctccctcgtcctccgtctgtgtgcggtcgcctgtcgtttcttcttccgtctctctttctgtcttcggcgctttctctcccctctttcgtccctcccgtctattcttcttcctgtcacacacacgctctgcctgtctctctctctctgctcctccgccccccgccttgcgtccccttttctctccttctcgccccccgcgcgcccccgcggtgtgtcgttcttttttttctttctatatatataatacttgttttattttttttttttttttttttttatttatttttttatttttttttttttttgttttttattattttttattatatatttgtattttttattttttattttattttttttttttttttttttgtttgtcgggcttggcattattaatttttaaatggtgaacttacaaaatagtaacgacgagtgaaaagaacttcataaacgaggaaaaagaccaacccgcagacccacggcgcaaaattctctatttaataaatattatgctctaagcctgggctcagagctttcatctcatttaattctcacc

SEQ ID NO: 436830 - DNA, 2876 bp, Homo sapiens
cggccgccttagctgtgcccgaagctcccagcccgagagggagcagggagagagtttgaactcagaggaggctcagagacgcggggcggggcctggcgcctttggggcgctcctgtccgctcgaggtgaggaaactgaggcaggaatagagagggaactccttcgggggtttcctggcaggcattgcgtggtgcatgggcgcccccccaccattggcgccaatggggctgggagatgggggagctgaggagggcgcctatgggccacccgtgagactccgccccaccccccacccccacccccccgggctgcggtccggtagggtcttgggagggggcgccgaggtgacagcaggctggggaggcttggagggatctcccgccaacacacagctacgttccccacaaacttcgcgtcacgcgtggaggcgccgaccccctcggaggcacagagaggacggccggcacttccaagagtcgcttggcgcccgcggggagagtcgtgcgcctagtgggcacgcaccaccccgcaaagcctcgccgccccgacgaggctgcgtcccccagcgtggctgggccggggtgggggggtctgtcttctccttttccccgtgtggacctcaggatctggacgctgcccccaggtgaccagaagtcagcagcttcccagaagccccgaagccggggcatcctccactcactcttctgctgtgtctgccgggatgatggggaggccctgcctgctcacagcggggcgcccctgcttgtggaggagaatggcgccatccctacagaccccagtccaatacctgctccctgaggccaaggcccaggactcagacaagatctgcgtggtcatcgacctggacgagaccctggtgcacagctccttcaagccagtgaacaacgcggacttcatcatccctgtggagattgatggggtggtccaccaggtctacgtgttgaagcgtcctcatgtggatgagttcctgcagcgaatgggcgagctctttgaatgtgtgctgttcactgctagcctcgccaagtacgcagacccagtagctgacctgctggacaaatggggggccttccgggcccggctgtttcgagagtcctgcgtcttccaccgggggaactacgtgaaggacctgagccggttgggtcgagacctgcggcgggtgctcatcctggacaattcacctgcctcctatgtcttccatccagacaatgctgtaccggtggcctcgtggtttgacaacatgagtgacacagagctccacgacctcctccccttcttcgagcaactcagccgtgtggacgacgtgtactcagtgctcaggcagccacggccagggagctagtgagggtgatggggccaggacctgcccctgaccaatgatacccacacctcctcccaggaagactgcccaggcctttgttaggaaaacccatgggccgccgccacactcagtgccatggggaagcgggcgtctcccccaccagccccaccaggcggtgtaggggcagcaggctgcactgaggaccgtgagctccaggccccgtgtcagtgccttcaaacctcctcccctattctcaggggacctggggggccctgcctgctgctccctttttctgtctctgtccatgctgccatgtttctctgctgccaaattgggccccttggccccttccggttctgcttcctgggggcagggttcctgccttggacccccagtctgggaacggtggacatcaagtgccttgcatagagccccctcttccccgcccagctttcccaggggcacagctctaggctgggaggggagaaccagcccctccccctgccccacctcctcccttgggactgagagggcccctaccaacctttgcctctgccttggagggaggggaggtctgttaccactggggaaggcagcaggagtctgtccttcaggccccacagtgcagcttctccagggccgacagctgagggctgctccctgcatcatccaagcaatgacctcagacttctgccttaaccagccccggggcttggctcccccagctctgagcgtgggggcataggcaggaccccccttgtggtgccatataaatatgtacatgtgtatatagatttttaggggaaggagagagggaagggtcagggtagagacacccctcccttgcccctttcctgggcccagaagttggggggagggagggaaaggatttttacattttttaaactgctattttctgaatggaacaagctgggccaaggggcccaggccctgtcctctgtccctcacacccctttgctccgttcattcattcaaaaaaacatttcttgagcaccttctgtgcccagcatatgctaggcccaccagctaagtgtgtgtggggggtctctacgccagctcatcagtgcctccttgcccatccttcaccggtgcctttgggggatctgtaggaggtgggaccttctgtggggtttggggatctccaggaagcccgaccaagctgtccccttcccctgtgccaacccatctcctacagccccctgcctgatcccctgctggctgggggcagctcccaggatatcctgccttccaactgtttctgaagcccctcctcctaacatggcgattccggaggtcaaggccttgggctctccccagggtctaacggttaaggggacccacataccagtgccaagggggatgtcaagtggtgatgtcgttgtgctcccctcccccagagcgggtgggcggggggtgaatatggttggcctgcatcaggtggccttcccatttaagtgccttctctgtgactgagagccctagtgtgatgagaactaaagagaaagccagaccccta

SEQ ID NO: 436831 - DNA, 2220 bp, Homo sapiens
attaggcgcgtctgcgtctccacagcataagcccctgccagcagggccagggtagcccctgtgatgtgcactcgccctggtacaccgcctgcctccatgtggttagccagtgtgacatcatgtgaccaaacgtcgtactgccacttctgcagcccgatgactccacgcagaacgcgcctaatggcgcgatctgcgtggtcatcgacctggacgagaccctggtgcacagctccttcaagccagtgaacaacgcggacttcatcatccctgtggagattgatggggtggtccaccaggtctacgtgttgaagcgtcctcatgtggatgagttcctgcagcgaatgggcgagctctttgaatgtgtgctgttcactgctagcctcgccaagtacgcagacccagtagctgacctgctggacaaatggggggccttccgggcccggctgtttcgagagtcctgcgtcttccaccgggggaactacgtgaaggacctgagccggttgggtcgagacctgcggcgggtgctcatcctggacaattcacctgcctcctatgtcttccatccagacaatgctgtaccggtggcctcgtggtttgacaacatgagtgacacagagctccacgacctcctccccttcttcgagcaactcagccgtgtggacgacgtgtactcagtgctcaggcagccacggccagggagctagtgagggtgatggggccaggacctgcccctgaccaatgatacccacacctcctcccaggaagactgcccaggcctttgttaggaaaacccatgggccgccgccacactcagtgccatggggaagcgggcgtctcccccaccagccccaccaggcggtgtaggggcagcaggctgcactgaggaccgtgagctccaggccccgtgtcagtgccttcaaacctcctcccctattctcaggggacctggggggccctgcctgctgctccctttttctgtctctgtccatgctgccatgtttctctgctgccaaattgggccccttggccccttccggttctgcttcctgggggcagggttcctgccttggacccccagtctgggaacggtggacatcaagtgccttgcatagagccccctcttccccgcccagctttcccaggggcacagctctaggctgggaggggagaaccagcccctccccctgccccacctcctcccttgggactgagagggcccctaccaacctttgcctctgccttggagggaggggaggtctgttaccactggggaaggcagcaggagtctgtccttcaggccccacagtgcagcttctccagggccgacagctgagggctgctccctgcatcatccaagcaatgacctcagacttctgccttaaccagccccggggcttggctcccccagctctgagcgtgggggcataggcaggaccccccttgtggtgccatataaatatgtacatgtgtatatagatttttaggggaaggagagagggaagggtcagggtagagacacccctcccttgcccctttcctgggcccagaagttggggggagggagggaaaggatttttacattttttaaactgctattttctgaatggaacaagctgggccaaggggcccaggccctgtcctctgtccctcacacccctttgctccgttcattcattcaaaaaaacatttcttgagcaccttctgtgcccagcatatgctaggcccaccagctaagtgtgtgtggggggtctctacgccagctcatcagtgcctccttgcccatccttcaccggtgcctttgggggatctgtaggaggtgggaccttctgtggggtttggggatctccaggaagcccgaccaagctgtccccttcccctgtgccaacccatctcctacagccccctgcctgatcccctgctggctgggggcagctcccaggatatcctgccttccaactgtttctgaagcccctcctcctaacatggcgattccggaggtcaaggccttgggctctccccagggtctaacggttaaggggacccacataccagtgccaagggggatgtcaagtggtgatgtcgttgtgctcccctcccccagagcgggtgggcggggggtgaatatggttggcctgcatcaggtggccttcccatttaagtgccttctctgtgactgagagccctagtgtgatgagaactaaagagaaagccagaccccta

SEQ ID NO: 436832 - DNA, 2600 bp, Homo sapiens
cgcctagccgcgccggtcccagaagtggcgaaagccgcagccgagtccaggtcacgccgaagccgttgcccttttaagggggagccttgaaacggcgcctgggttccatgtttgcatccgcctcgcgggaaggaaactccatgttgtaacaaagtttcctccgcgccccctccctccccctcccccctagaacctggctcccctcccctccggagctcgcggggatccctccctcccacccctcccctcccccccgcgccccgattccggccccagccgggggggaggccgggcgcccgggccagagtccggccggagcggagcgcgcccggccccatggacagctcggccgtcattactcagatcagcaaggaggaggctcggggcccgctgcggggcaaaggtgaccagaagtcagcagcttcccagaagccccgaagccggggcatcctccactcactcttctgctgtgtctgccgggatgatggggaggccctgcctgctcacagcggggcgcccctgcttgtggaggagaatggcgccatccctacagaccccagtccaatacctgctccctgaggccaaggcccaggactcagacaagatctgcgtggtcatcgacctggacgagaccctggtgcacagctccttcaagccagtgaacaacgcggacttcatcatccctgtggagattgatggggtggtccaccaggtctacgtgttgaagcgtcctcatgtggatgagttcctgcagcgaatgggcgagctctttgaatgtgtgctgttcactgctagcctcgccaagtacgcagacccagtagctgacctgctggacaaatggggggccttccgggcccggctgtttcgagagtcctgcgtcttccaccgggggaactacgtgaaggacctgagccggttgggtcgagacctgcggcgggtgctcatcctggacaattcacctgcctcctatgtcttccatccagacaatgctgtaccggtggcctcgtggtttgacaacatgagtgacacagagctccacgacctcctccccttcttcgagcaactcagccgtgtggacgacgtgtactcagtgctcaggcagccacggccagggagctagtgagggtgatggggccaggacctgcccctgaccaatgatacccacacctcctcccaggaagactgcccaggcctttgttaggaaaacccatgggccgccgccacactcagtgccatggggaagcgggcgtctcccccaccagccccaccaggcggtgtaggggcagcaggctgcactgaggaccgtgagctccaggccccgtgtcagtgccttcaaacctcctcccctattctcaggggacctggggggccctgcctgctgctccctttttctgtctctgtccatgctgccatgtttctctgcttcctgggggcagggttcctgccttggacccccagtctgggaacggtggacatcaagtgccttgcatagagccccctcttccccgcccagctttcccaggggcacagctctaggctgggaggggagaaccagcccctccccctgccccacctcctcccttgggactgagagggcccctaccaacctttgcctctgccttggagggaggggaggtctgttaccactggggaaggcagcaggagtctgtccttcaggccccacagtgcagcttctccagggccgacagctgagggctgctccctgcatcatccaagcaatgacctcagacttctgccttaaccagccccggggcttggctcccccagctctgagcgtgggggcataggcaggaccccccttgtggtgccatataaatatgtacatgtgtatatagatttttaggggaaggagagagggaagggtcagggtagagacacccctcccttgcccctttcctgggcccagaagttggggggagggagggaaaggatttttacattttttaaactgctattttctgaatggaacaagctgggccaaggggcccaggccctgtcctctgtccctcacacccctttgctccgttcattcattcaaaaaaacatttcttgagcaccttctgtgcccagcatatgctaggcccaccagctaagtgtgtgtggggggtctctacgccagctcatcagtgcctccttgcccatccttcaccggtgcctttgggggatctgtaggaggtgggaccttctgtggggtttggggatctccaggaagcccgaccaagctgtccccttcccctgtgccaacccatctcctacagccccctgcctgatcccctgctggctgggggcagctcccaggatatcctgccttccaactgtttctgaagcccctcctcctaacatggcgattccggaggtcaaggccttgggctctccccagggtctaacggttaaggggacccacataccagtgccaagggggatgtcaagtggtgatgtcgttgtgctcccctcccccagagcgggtgggcggggggtgaatatggttggcctgcatcaggtggccttcccatttaagtgccttctctgtgactgagagccctagtgtgatgagaactaaagagaaagccagaccccta

SEQ ID NO: 436833 - DNA, 1907 bp, Homo sapiens
gggcaacagagcaagaccctgcctcaaaaaaaaaaaaaagtatccgagtgcttcgcacagataaggttaggaattgtgaagcttttgcattgttacgttataaatgtgttttcctggggattgctgtcaaaaaagtttgaacactgtgggtgaggggttttcagaaactgcatgatctgagtagtggctacatagggctggcctggaaattctgcacccaggaccacctgcccccctcatcttcctacacccacttccccaggtaccggtggcctcgtggtttgacaacatgagtgacacagagctccacgacctcctccccttcttcgagcaactcagccgtgtggacgacgtgtactcagtgctcaggcagccacggccagggagctagtgagggtgatggggccaggacctgcccctgaccaatgatacccacacctcctcccaggaagactgcccaggcctttgttaggaaaacccatgggccgccgccacactcagtgccatggggaagcgggcgtctcccccaccagccccaccaggcggtgtaggggcagcaggctgcactgaggaccgtgagctccaggccccgtgtcagtgccttcaaacctcctcccctattctcaggggacctggggggccctgcctgctgctccctttttctgtctctgtccatgctgccatgtttctctgctgccaaattgggccccttggccccttccggttctgcttcctgggggcagggttcctgccttggacccccagtctgggaacggtggacatcaagtgccttgcatagagccccctcttccccgcccagctttcccaggggcacagctctaggctgggaggggagaaccagcccctccccctgccccacctcctcccttgggactgagagggcccctaccaacctttgcctctgccttggagggaggggaggtctgttaccactggggaaggcagcaggagtctgtccttcaggccccacagtgcagcttctccagggccgacagctgagggctgctccctgcatcatccaagcaatgacctcagacttctgccttaaccagccccggggcttggctcccccagctctgagcgtgggggcataggcaggaccccccttgtggtgccatataaatatgtacatgtgtatatagatttttaggggaaggagagagggaagggtcagggtagagacacccctcccttgcccctttcctgggcccagaagttggggggagggagggaaaggatttttacattttttaaactgctattttctgaatggaacaagctgggccaaggggcccaggccctgtcctctgtccctcacacccctttgctccgttcattcattcaaaaaaacatttcttgagcaccttctgtgcccagcatatgctaggcccaccagctaagtgtgtgtggggggtctctacgccagctcatcagtgcctccttgcccatccttcaccggtgcctttgggggatctgtaggaggtgggaccttctgtggggtttggggatctccaggaagcccgaccaagctgtccccttcccctgtgccaacccatctcctacagccccctgcctgatcccctgctggctgggggcagctcccaggatatcctgccttccaactgtttctgaagcccctcctcctaacatggcgattccggaggtcaaggccttgggctctccccagggtctaacggttaaggggacccacataccagtgccaagggggatgtcaagtggtgatgtcgttgtgctcccctcccccagagcgggtgggcggggggtgaatatggttggcctgcatcaggtggccttcccatttaagtgccttctctgtgactgagagccctagtgtgatgagaactaaagagaaagccagaccccta

SEQ ID NO: 436834 - DNA, 2016 bp, Homo sapiens
cgcctagccgcgccggtcccagaagtggcgaaagccgcagccgagtccaggtcacgccgaagccgttgcccttttaagggggagccttgaaacggcgcctgggttccatgtttgcatccgcctcgcgggaaggaaactccatgttgtaacaaagtttcctccgcgccccctccctccccctcccccctagaacctggctcccctcccctccggagctcgcggggatccctccctcccacccctcccctcccccccgcgccccgattccggccccagccgggggggaggccgggcgcccgggccagagtccggccggagcggagcgcgcccggccccatggacagctcggccgtcattactcagatcagcaaggaggaggctcggggcccgctgcggggcaaaggtgaccagaagtcagcagcttcccagaagccccgaagccggggcatcctccactcactcttctgctgtgtctgccgggatgatggggaggccctgcctgctcacagcggggcgcccctgcttgtggaggagaatggcgccatccctacagaccccagtccaatacctgctccctgaggccaaggcccaggactcagacaagatctgcgtggtcatcgacctggacgagaccctggtgcacagctccttcaagccagtgaacaacgcggacttcatcatccctgtggagattgatggggtggtccaccaggtctacgtgttgaagcgtcctcatgtggatgagttcctgcagcgaatgggcgagctctttgaatgtgtgctgttcactgctagcctcgccaagtacgcagacccagtagctgacctgctggacaaatggggggccttccgggcccggctgtttcgagagtcctgcgtcttccaccgggggaactacgtgaaggacctgagccggttgggtcgagacctgcggcgggtgctcatcctggacaattcacctgcctcctatgtcttccatccagacaatgctgtaccggtggcctcgtggtttgacaacatgagtgacacagagctccacgacctcctccccttcttcgagcaactcagccgtgtggacgacgtgtactcagtgctcaggcagccacggccagggagctagtgagggtgatggggccaggacctgcccctgaccaatgatacccacacctcctcccaggaagactgcccaggcctttgttaggaaaacccatgggccgccgccacactcagtgccatggggaagcgggcgtctcccccaccagccccaccaggcggtgtaggggcagcaggctgcactgaggaccgtgagctccaggccccgtgtcagtgccttcaaacctcctcccctattctcaggggacctggggggccctgcctgctgctccctttttctgtctctgtccatgctgccatgtttctgggcccaggccctgtcctctgtccctcacacccctttgctccgttcattcattcaaaaaaacatttcttgagcaccttctgtgcccagcatatgctaggcccaccagctaagtgtgtgtggggggtctctacgccagctcatcagtgcctccttgcccatccttcaccggtgcctttgggggatctgtaggaggtgggaccttctgtggggtttggggatctccaggaagcccgaccaagctgtccccttcccctgtgccaacccatctcctacagccccctgcctgatcccctgctggctgggggcagctcccaggatatcctgccttccaactgtttctgaagcccctcctcctaacatggcgattccggaggtcaaggccttgggctctccccagggtctaacggttaaggggacccacataccagtgccaagggggatgtcaagtggtgatgtcgttgtgctcccctcccccagagcgggtgggcggggggtgaatatggttggcctgcatcaggtggccttcccatttaagtgccttctctgtgactgagagccctagtgtgatgagaactaaagagaaagccagaccccta

SEQ ID NO: 436835 - DNA, 2557 bp, Homo sapiens
cgcctagccgcgccggtcccagaagtggcgaaagccgcagccgagtccaggtcacgccgaagccgttgcccttttaagggggagccttgaaacggcgcctgggttccatgtttgcatccgcctcgcgggaaggaaactccatgttgtaacaaagtttcctccgcgccccctccctccccctcccccctagaacctggctcccctcccctccggagctcgcggggatccctccctcccacccctcccctcccccccgcgccccgattccggccccagccgggggggaggccgggcgcccgggccagagtccggccggagcggagcgcgcccggccccatggacagctcggccgtcattactcagatcagcaaggaggaggctcggggcccgctgcggggcaaaggtgaccagaagtcagcagcttcccagaagccccgaagccggggcatcctccactcactcttctgctgtgtctgccgggatgatggggaggccctgcctgctcacagcggggcgcccctgcttgtggaggagaatggcgccatccctacagaccccagtccaatacctgctccctgaggccaaggcccaggactcagacaagatctgcgtggtcatcgacctggacgagaccctggtgcacagctccttcaagccagtgaacaacgcggacttcatcatccctgtggagattgatggggtggtccaccaggtctacgtgttgaagcgtcctcatgtggatgagttcctgcagcgaatgggcgagctctttgaatgtgtgctgttcactgctagcctcgccaagtacgcagacccagtagctgacctgctggacaaatggggggccttccgggcccggctgtttcgagagtcctgcgtcttccaccgggggaactacgtgaaggacctgagccggttgggtcgagacctgcggcgggtgctcatcctggacaattcacctgcctcctatgtcttccatccagacaatgctgtaccggtggcctcgtggtttgacaacatgagtgacacagagctccacgacctcctccccttcttcgagcaactcagccgtgtggacgacgtgtactcagtgctcaggcagccacggccagggagctagtgagggtgatggggccaggacctgcccctgaccaatgatacccacacctcctcccaggaagactgcccaggcctttgttaggaaaacccatgggccgccgccacactcagtgccatggggaagcgggcgtctcccccaccagccccaccaggcggtgtaggggcagcaggctgcactgaggaccgtgagctccaggccccgtgtcagtgccttcaaacctcctcccctattctcaggggacctggggggccctgcctgctgctccctttttctgtctctgtccatgctgccatgtttctctgctgccaaattgggccccttggccccttccggttctgcttcctgggggcagggttcctgccttggacccccagtctgggaacggtggacatcaagtgccttgcatagagccccctcttccccgcccagctttcccaggggcacagctctaggctgggaggggagaaccagcccctccccctgccccacctcctcccttgggactgagagggcccctaccaacctttgcctctgccttggagggaggggaggtctgttaccactggggaaggcagcaggagtctgtccttcaggccccacagtgcagcttctccagggccgacagctgagggctgctccctgcatcatccaagcaatgacctcagacttctgccttaaccagccccggggcttggctcccccagctctgagcgtgggggcataggcaggaccccccttgtggtgccatataaatatgtacatgtgtatatagatttttaggggaaggagagagggaagggtcagggtagagacacccctcccttgcccctttcctgggcccagaagttggggggagggagggaaaggatttttacattttttaaactgctattttctgaatggaacaagctgggccaaggggcccaggccctgtcctctgtccctcacacccctttgctccgttcattcattcaaaaaaacatttcttgagcaccttctgtgcccagcatatgctaggcccaccagctaagtgtgtgtggggggtctctacgccagctcatcagtgcctccttgcccatccttcaccggtgcctttgggggatctgtaggaggtgggaccttctgtggggtttggggatctccaggaagctcccaggatatcctgccttccaactgtttctgaagcccctcctcctaacatggcgattccggaggtcaaggccttgggctctccccagggtctaacggttaaggggacccacataccagtgccaagggggatgtcaagtggtgatgtcgttgtgctcccctcccccagagcgggtgggcggggggtgaatatggttggcctgcatcaggtggccttcccatttaagtgccttctctgtgactgagagccctagtgtgatgagaactaaagagaaagccagaccccta

SEQ ID NO: 436836 - DNA, 2169 bp, Homo sapiens
cgcctagccgcgccggtcccagaagtggcgaaagccgcagccgagtccaggtcacgccgaagccgttgcccttttaagggggagccttgaaacggcgcctgggttccatgtttgcatccgcctcgcgggaaggaaactccatgttgtaacaaagtttcctccgcgccccctccctccccctcccccctagaacctggctcccctcccctccggagctcgcggggatccctccctcccacccctcccctcccccccgcgccccgattccggccccagccgggggggaggccgggcgcccgggccagagtccggccggagcggagcgcgcccggccccatggacagctcggccgtcattactcagatcagcaaggaggaggctcggggcccgctgcggggcaaaggtgaccagaagtcagcagcttcccagaagccccgaagccggggcatcctccactcactcttctgctgtgtctgccgggatgatggggaggccctgcctgctcacagcggggcgcccctgcttgtggaggagaatggcgccatccctacagaccccagtccaatacctgctccctgaggccaaggcccaggactcagacaagatctgcgtggtcatcgacctggacgagaccctggtgcacagctccttcaagccagtgaacaacgcggacttcatcatccctgtggagattgatggggtggtccaccaggtctacgtgttgaagcgtcctcatgtggatgagttcctgcagcgaatgggcgagctctttgaatgtgtgctgttcactgctagcctcgccaagtacgcagacccagtagctgacctgctggacaaatggggggccttccgggcccggctgtttcgagagtcctgcgtcttccaccgggggaactacgtgaaggacctgagccggttgggtcgagacctgcggcgggtgctcatcctggacaattcacctgcctcctatgtcttccatccagacaatgctgtaccggtggcctcgtggtttgacaacatgagtgacacagagctccacgacctcctccccttcttcgagcaactcagccgtgtggacgacgtgtactcagtgctcaggcagccacggccagggagctagtgagggtgatggggccaggacctgcccctgaccaatgatacccacacctcctcccaggaagactgcccaggcctttgttaggaaaacccatgggccgccgccacactcagtgccatggggaagcgggcgtctcccccaccagccccaccaggcggtgtaggggcagcaggctgcactgaggaccgtgagctccaggccccgtgtcagtgccttcaaacctcctcccctattctcaggggacctggggggccctgcctgctgctccctttttctgtctctgtccatgctgccatgtttctctgctgccaaattgggccccttggccccttccggttctgcttcctgggggcagggttcctgccttggacccccagtctgggaacggtggacatcaagtgccttgcatagagccccctcttccccgcccagctttcccaggggcacagctctaggctgggaggggagaaccagcccctccccctgccccacctcctcccttgggactgagagggcccctaccaacctttgcctctgccttggagggaggggaggtctgttaccactggggaaggcagcaggagtctgtccttcaggccccacagtgcagcttctccagggccgacagctgagggctgctccctgcatcatccaagcaatgacctcagacttctgccagtgcctccttgcccatccttcaccggtgcctttgggggatctgtaggaggtgggaccttctgtggggtttggggatctccaggaagctcccaggatatcctgccttccaactgtttctgaagcccctcctcctaacatggcgattccggaggtcaaggccttgggctctccccagggtctaacggttaaggggacccacataccagtgccaagggggatgtcaagtggtgatgtcgttgtgctcccctcccccagagcgggtgggcggggggtgaatatggttggcctgcatcaggtggccttcccatttaagtgccttctctgtgactgagagccctagtgtgatgagaactaaagagaaagccagaccccta

SEQ ID NO: 436837 - DNA, 1929 bp, Homo sapiens
cttcttgtttgctcgtccttcccctccctcgtcctccgtctgtgtgcggtcgcctgtcgtttcttcttccgtctctctttctgtcttcggcgctttctctcccctctttcgtccctcccgtctattcttcttcctgtcacacacacgctctgcctgtctctctctctctgctcctccgccccccgccttgcgtccccttttctctccttctcgccccccgcgcgcccccgcggtgtgtcgttcttttttttctttctatatatataatacttgttttattttttttttttttttttttttatttatttttttatttttttttttttttgttttttattattttttattatatatttgtattttttattttttattttattttttttttttttttttttgtttgtcgggcttggcattattaatttttaaatggtgaacttacaaaatagtaacgacgagtgaaaagaacttcataaacgaggaaaaagaccaacccgcagacccacggcgcgcaccacggaggggcttgcagcgagaagacagggacctccgttcccaagtgcccagcactgcgccacaggccgggtggaacgggccttgagggcctctggtttgaggtcccccacggtcgggctttgggcccaccgcgtgcggcgccgtgctgggctcctaggatcggcagcgagtccagtgactcccaccgcacccccagtaatcacagggcggccggcgaccgcgggcaggggagggggtctgggaaggcccctggagaaggtggcatttcctcgaggtgaccagaagtcagcagcttcccagaagccccgaagccggggcatcctccactcactcttctgctgtgtctgccgggatgatggggaggccctgcctgctcacagcggggcgcccctgcttgtggaggagaatggcgccatccctacagaccccagtccaatacctgctccctgaggccaaggcccaggactcagacaagatctgcgtggtcatcgacctggacgagaccctggtgcacagctccttcaagccagtgaacaacgcggacttcatcatccctgtggagattgatggggtggtccaccaggtctacgtgttgaagcgtcctcatgtggatgagttcctgcagcgaatgggcgagctctttgaatgtgtgctgttcactgctagcctcgccaagtacgcagacccagtagctgacctgctggacaaatggggggccttccgggcccggctgtttcgagagtcctgcgtcttccaccgggggaactacgtgaaggacctgagccggttgggtcgagacctgcggcgggtgctcatcctggacaattcacctgcctcctatgtcttccatccagacaatgctgtgagtgcgggctggactgggactgggacaggagctgagacccaggaaggggtcagtccattcaggccaccttggcctcttggatccccagttggggggtgggtgccctcccagtccttcctgcattcattgcctgtgcctgccgcccactcccctcatccacctgccctgtagccatatggtcttttcccctcgcacaaagcagagcatctgccatgcacaggggcccccacagggcaacggagtttggaaagtttcaatttttcgaattgccagttgtgacctactgatggcccacagaattaatttagtgggttctgattgggaattttaacaaaatgaaatagaatagaaaatatccggtcgggtgcagtggctcatgcctgtaatcccagcactttgggaagctgaggtgggcaggtagctgagcccagtagttcaagaccagcctcggcaacatagtgaaaccttatgtctacaaaaaatacaaaaactagccaggcgtggtggcgcatgcctggagtcccggctatgcagaaggctgaggtagg

SEQ ID NO: 436838 - DNA, 649 bp, Homo sapiens
cagatccacttcaaggaaacactgacttgaaaactctcccccatggttttgtctgaactggctgccattctgcagcacacaccagatccaattgctggagtcgggaacccgagagatacactgcctctaggactgggacagatagccactgagtacctgcttcaaatcaccctgcacgttttctctttggaaagataagcactggagaaccatctcgttaccttcagcagaaatggaaacaaatcaagacattaagaatgccgcagtggacagcagttatgcaaggttcagcagaggaagttttcaagatggtgtgcctcactagccagaaatcagaaaagatcgaagctagccttttcatctcagctgctccttaaatcagtgcaacccctccaaattaatgtgaattgaaacttgcattgcttttcaacttaattgaatacttactatatgtgaaccactgcacaaaataggggaagaagatgtgggagacaaagatgtggagcctgtcttcaataaatttacagttagtttcagggtacattgtttttcttctgctgttaattaggtgtatccccaagacaataaatacatgggatgcggcctaattttttgttttttgtaataaatgaataacataaccgaccgg

SEQ ID NO: 436839 - DNA, 1340 bp, Homo sapiens
gtaatctgcaacgactctcttaatcctccacggctacacgtgaaacagtcgcaaatggaatttcaagaaacattctatatacactgcctctaggactgggacagatagccactgagtacctgcttcaaatcaccctgcacgttttctctttggaaagataagcactggagaaccatctcgttaccttcagcagaaatggaaacaaatcaagacattaagaatgccgcagtggacagcagttatgcaaggttcagcagaggaagttttcaagatggtgtgcctcactagccagaaatcagaaaagatcgaagctagccttttcatctcagctgctccttaaatcagtgcaacccctccaaattaatgtgaattgaaacttgcattgcttttcaacttaattgaatacttactatatgtgaaccactgcacaaaataggggaagaagatgtgggagacaaagatgtggagcctgtcttcaataaatttacagttagtttcagggtacattgtttttcttctgctgttaattaggtgtatccccaagacaataaatacatgaatggaaaagtatattctgtgttttaagtctctttaataaaaaacaaaacaaaatccaaaaaaactcctaacatggcaactcaggacattttaatccttttttttgttgttgggcttctgataggatccattttattgattccataaatatttagtagactttagacatattaatacattgtagtttgagttaatttgcattaaattctgtttttttccccttaggtatagattgtctgttggaaaaatatattgcttgtggatttcttggggagtgggaaggtgaattatacctgttgtctctacagtccactaccttccacaccctagggcagtggtccccaaccttcttggcaccagggatcagtttcctggaagacaatttttctgtggatggtgtggggatggttttgggatggaactgtccacctcagatcatcaggcattagttaggctctcataacgagtgcgcagcctagatccctcacatgcacagttcacagtagggtttgcgctgctatgagaatctaaggctgccactgatctgacaggaggcagaactcaggtggcaatgcttactggcccactgctcacctcttgctgtgcggcctggttcctaataggccatggacccccacagacgggtactagtctgcagcctgtggaccccagccctaggggcctgccattctgagtgagttattagcatgaagaagaggaagatctggatcaaacgtgggtgatggtactcagagacccaagataggatagggatggaacaa

SEQ ID NO: 436840 - DNA, 1377 bp, Homo sapiens
gtttttatattaaccacggattcagctaaggagaggccccggatcaggacagcagtttcctcagacgtgatgtggtgccccttgcatcctgctcagagaattctcagcagcacagatacactgcctctaggactgggacagatagccactgagtacctgcttcaaatcaccctgcacgttttctctttggaaagataagcactggagaaccatctcgttaccttcagcagaaatggaaacaaatcaagacattaagaatgccgcagtggacagcagttatgcaaggttcagcagaggaagttttcaagatggtgtgcctcactagccagaaatcagaaaagatcgaagctagccttttcatctcagctgctccttaaatcagtgcaacccctccaaattaatgtgaattgaaacttgcattgcttttcaacttaattgaatacttactatatgtgaaccactgcacaaaataggggaagaagatgtgggagacaaagatgtggagcctgtcttcaataaatttacagttagtttcagggtacattgtttttcttctgctgttaattaggtgtatccccaagacaataaatacatgaatggaaaagtatattctgtgttttaagtctctttaataaaaaacaaaacaaaatccaaaaaaactcctaacatggcaactcaggacattttaatccttttttttgttgttgggcttctgataggatccattttattgattccataaatatttagtagactttagacatattaatacattgtagtttgagttaatttgcattaaattctgtttttttccccttaggtatagattgtctgttggaaaaatatattgcttgtggatttcttggggagtgggaaggtgaattatacctgttgtctctacagtccactaccttccacaccctagggcagtggtccccaaccttcttggcaccagggatcagtttcctggaagacaatttttctgtggatggtgtggggatggttttgggatggaactgtccacctcagatcatcaggcattagttaggctctcataacgagtgcgcagcctagatccctcacatgcacagttcacagtagggtttgcgctgctatgagaatctaaggctgccactgatctgacaggaggcagaactcaggtggcaatgcttactggcccactgctcacctcttgctgtgcggcctggttcctaataggccatggacccccacagacgggtactagtctgcagcctgtggaccccagccctaggggcctgccattctgagtgagttattagcatgaagaagaggaagatctggatcaaacgtgggtgatggtactcagagacccaagataggatagggatggaacaa

SEQ ID NO: 436841 - DNA, 1750 bp, Homo sapiens
agcggaacgccgccgctgccgccgccgggggtgggagccgcgctcgcccgcccgcccctcgactcgcgagggcgtaaaagtttgtctcagctcgagcattcctagcgccaacacgccctcaggtaaaggtggaagtaaatggccacgctgtattgacagagcaggtagatgaaactcaagagaaaaggtgtggataaatgaaactagcccatgatgaacctgttttctccgtgaccaacaattattaaccaggatgaatggcggtggcagtgggcctgcatcacaggttgcagcagatgttctcaatatttctattaaaatttccttatttccatatgcaagaggagccacagagctgcatccttatggtagctaccatgccgtgatgtaagctgccattcactggggagctttggcaatagaattggctagatcaggaagcctatgtcaactatggaacaacaacttgcagctcatctctattgatgatacactgcctctaggactgggacagatagccactgagtacctgcttcaaatcaccctgcacgttttctctttggaaagataagcactggagaaccatctcgttaccttcagcagaaatggaaacaaatcaagacattaagaatgccgcagtggacagcagttatgcaaggttcagcagaggaagttttcaagatggtgtgcctcactagccagaaatcagaaaagatcgaagctagccttttcatctcagctgctccttaaatcagtgcaacccctccaaattaatgtgaattgaaacttgcattgcttttcaacttaattgaatacttactatatgtgaaccactgcacaaaataggggaagaagatgtgggagacaaagatgtggagcctgtcttcaataaatttacagttagtttcagggtacattgtttttcttctgctgttaattaggtgtatccccaagacaataaatacatgaatggaaaagtatattctgtgttttaagtctctttaataaaaaacaaaacaaaatccaaaaaaactcctaacatggcaactcaggacattttaatccttttttttgttgttgggcttctgataggatccattttattgattccataaatatttagtagactttagacatattaatacattgtagtttgagttaatttgcattaaattctgtttttttccccttaggtatagattgtctgttggaaaaatatattgcttgtggatttcttggggagtgggaaggtgaattatacctgttgtctctacagtccactaccttccacaccctagggcagtggtccccaaccttcttggcaccagggatcagtttcctggaagacaatttttctgtggatggtgtggggatggttttgggatggaactgtccacctcagatcatcaggcattagttaggctctcataacgagtgcgcagcctagatccctcacatgcacagttcacagtagggtttgcgctgctatgagaatctaaggctgccactgatctgacaggaggcagaactcaggtggcaatgcttactggcccactgctcacctcttgctgtgcggcctggttcctaataggccatggacccccacagacgggtactagtctgcagcctgtggaccccagccctaggggcctgccattctgagtgagttattagcatgaagaagaggaagatctggatcaaacgtgggtgatggtactcagagacccaagataggatagggatggaacaa

SEQ ID NO: 436842 - DNA, 1430 bp, Homo sapiens
gtaatctgcaacgactctcttaatcctccacggctacacgtgaaacagtcgcaaatggaatttcaagaaacattctatctaaggagaggccccggatcaggacagcagtttcctcagacgtgatgtggtgccccttgcatcctgctcagagaattctcagcagcacagatacactgcctctaggactgggacagatagccactgagtacctgcttcaaatcaccctgcacgttttctctttggaaagataagcactggagaaccatctcgttaccttcagcagaaatggaaacaaatcaagacattaagaatgccgcagtggacagcagttatgcaaggttcagcagaggaagttttcaagatggtgtgcctcactagccagaaatcagaaaagatcgaagctagccttttcatctcagctgctccttaaatcagtgcaacccctccaaattaatgtgaattgaaacttgcattgcttttcaacttaattgaatacttactatatgtgaaccactgcacaaaataggggaagaagatgtgggagacaaagatgtggagcctgtcttcaataaatttacagttagtttcagggtacattgtttttcttctgctgttaattaggtgtatccccaagacaataaatacatgaatggaaaagtatattctgtgttttaagtctctttaataaaaaacaaaacaaaatccaaaaaaactcctaacatggcaactcaggacattttaatccttttttttgttgttgggcttctgataggatccattttattgattccataaatatttagtagactttagacatattaatacattgtagtttgagttaatttgcattaaattctgtttttttccccttaggtatagattgtctgttggaaaaatatattgcttgtggatttcttggggagtgggaaggtgaattatacctgttgtctctacagtccactaccttccacaccctagggcagtggtccccaaccttcttggcaccagggatcagtttcctggaagacaatttttctgtggatggtgtggggatggttttgggatggaactgtccacctcagatcatcaggcattagttaggctctcataacgagtgcgcagcctagatccctcacatgcacagttcacagtagggtttgcgctgctatgagaatctaaggctgccactgatctgacaggaggcagaactcaggtggcaatgcttactggcccactgctcacctcttgctgtgcggcctggttcctaataggccatggacccccacagacgggtactagtctgcagcctgtggaccccagccctaggggcctgccattctgagtgagttattagcatgaagaagaggaagatctggatcaaacgtgggtgatggtactcagagacccaagataggatagggatggaacaa

SEQ ID NO: 436843 - DNA, 1366 bp, Homo sapiens
  misc_feature (11)..(11): n is a, c, g, or t
  misc_feature (20)..(20): n is a, c, g, or t
  misc_feature (39)..(39): n is a, c, g, or t
gttttaacccngcttggatnaaagccagctcgggacagnacacctttcctcagacgtgatgtggtgccccttgcatcctgctcagagaattctcagcagcacagatacactgcctctaggactgggacagatagccactgagtacctgcttcaaatcaccctgcacgttttctctttggaaagataagcactggagaaccatctcgttaccttcagcagaaatggaaacaaatcaagacattaagaatgccgcagtggacagcagttatgcaaggttcagcagaggaagttttcaagatggtgtgcctcactagccagaaatcagaaaagatcgaagctagccttttcatctcagctgctccttaaatcagtgcaacccctccaaattaatgtgaattgaaacttgcattgcttttcaacttaattgaatacttactatatgtgaaccactgcacaaaataggggaagaagatgtgggagacaaagatgtggagcctgtcttcaataaatttacagttagtttcagggtacattgtttttcttctgctgttaattaggtgtatccccaagacaataaatacatgaatggaaaagtatattctgtgttttaagtctctttaataaaaaacaaaacaaaatccaaaaaaactcctaacatggcaactcaggacattttaatccttttttttgttgttgggcttctgataggatccattttattgattccataaatatttagtagactttagacatattaatacattgtagtttgagttaatttgcattaaattctgtttttttccccttaggtatagattgtctgttggaaaaatatattgcttgtggatttcttggggagtgggaaggtgaattatacctgttgtctctacagtccactaccttccacaccctagggcagtggtccccaaccttcttggcaccagggatcagtttcctggaagacaatttttctgtggatggtgtggggatggttttgggatggaactgtccacctcagatcatcaggcattagttaggctctcataacgagtgcgcagcctagatccctcacatgcacagttcacagtagggtttgcgctgctatgagaatctaaggctgccactgatctgacaggaggcagaactcaggtggcaatgcttactggcccactgctcacctcttgctgtgcggcctggttcctaataggccatggacccccacagacgggtactagtctgcagcctgtggaccccagccctaggggcctgccattctgagtgagttattagcatgaagaagaggaagatctggatcaaacgtgggtgatggtactcagagacccaagataggatagggatggaacaa

SEQ ID NO: 436844 - DNA, 1836 bp, Homo sapiens
tccatgctgccctcatgggggctttcctacctagctgatgtttgaagttttcatgtgtgcctctgtctttgacccacctggctagttcagagcctttgctgaagaaaatgttctttgcttgtccgattgcttcacagcacgcttctctatctgcaactgttgtttcccagccatccatatggtgccacaggatgggacacaggcagggactttactattcacaaaggggtagggcctgggacctcgagtggggcttttcctgcttataaagacaaggaatgaaaatgcagaatccttacctggtaggggaactttcttttccaaatatgcaggtatgtatatttctgatttccttaggcttggatctgtgcctgggggtgagatggatttcaaagtcattatttaaagtagggagataaagctttagacaaccaccataagagatcctggttgtatttttgaaatgttgagcgaaataacattttagtgatcagtaaaagctaacctttgtacttctgaaaagttgttcttagaaaggcctggattaataattggtttcaatttgcccacagatatacactgcctctaggactgggacagatagccactgagtacctgcttcaaatcaccctgcacgttttctctttggaaagataagcactggagaaccatctcgttaccttcagcagaaatggaaacaaatcaagacattaagaatgccgcagtggacagcagttatgcaaggttcagcagaggaagttttcaagatggtgtgcctcactagccagaaatcagaaaagatcgaagctagccttttcatctcagctgctccttaaatcagtgcaacccctccaaattaatgtgaattgaaacttgcattgcttttcaacttaattgaatacttactatatgtgaaccactgcacaaaataggggaagaagatgtgggagacaaagatgtggagcctgtcttcaataaatttacagttagtttcagggtacattgtttttcttctgctgttaattaggtgtatccccaagacaataaatacatgaatggaaaagtatattctgtgttttaagtctctttaataaaaaacaaaacaaaatccaaaaaaactcctaacatggcaactcaggacattttaatccttttttttgttgttgggcttctgataggatccattttattgattccataaatatttagtagactttagacatattaatacattgtagtttgagttaatttgcattaaattctgtttttttccccttaggtatagattgtctgttggaaaaatatattgcttgtggatttcttggggagtgggaaggtgaattatacctgttgtctctacagtccactaccttccacaccctagggcagtggtccccaaccttcttggcaccagggatcagtttcctggaagacaatttttctgtggatggtgtggggatggttttgggatggaactgtccacctcagatcatcaggcattagttaggctctcataacgagtgcgcagcctagatccctcacatgcacagttcacagtagggtttgcgctgctatgagaatctaaggctgccactgatctgacaggaggcagaactcaggtggcaatgcttactggcccactgctcacctcttgctgtgcggcctggttcctaataggccatggacccccacagacgggtactagtctgcagcctgtggaccccagccctaggggcctgccattctgagtgagttattagcatgaagaagaggaagatctggatcaaacgtgggtgatggtactcagagacccaagataggatagggatggaacaa

SEQ ID NO: 436845 - DNA, 1309 bp, Homo sapiens
  misc_feature (25)..(25): n is a, c, g, or t
aaaaggaaatgttgtgttgatagtncggaaaagaaaataataactctatacactgcctctaggactgggacagatagccactgagtacctgcttcaaatcaccctgcacgttttctctttggaaagataagcactggagaaccatctcgttaccttcagcagaaatggaaacaaatcaagacattaagaatgccgcagtggacagcagttatgcaaggttcagcagaggaagttttcaagatggtgtgcctcactagccagaaatcagaaaagatcgaagctagccttttcatctcagctgctccttaaatcagtgcaacccctccaaattaatgtgaattgaaacttgcattgcttttcaacttaattgaatacttactatatgtgaaccactgcacaaaataggggaagaagatgtgggagacaaagatgtggagcctgtcttcaataaatttacagttagtttcagggtacattgtttttcttctgctgttaattaggtgtatccccaagacaataaatacatgaatggaaaagtatattctgtgttttaagtctctttaataaaaaacaaaacaaaatccaaaaaaactcctaacatggcaactcaggacattttaatccttttttttgttgttgggcttctgataggatccattttattgattccataaatatttagtagactttagacatattaatacattgtagtttgagttaatttgcattaaattctgtttttttccccttaggtatagattgtctgttggaaaaatatattgcttgtggatttcttggggagtgggaaggtgaattatacctgttgtctctacagtccactaccttccacaccctagggcagtggtccccaaccttcttggcaccagggatcagtttcctggaagacaatttttctgtggatggtgtggggatggttttgggatggaactgtccacctcagatcatcaggcattagttaggctctcataacgagtgcgcagcctagatccctcacatgcacagttcacagtagggtttgcgctgctatgagaatctaaggctgccactgatctgacaggaggcagaactcaggtggcaatgcttactggcccactgctcacctcttgctgtgcggcctggttcctaataggccatggacccccacagacgggtactagtctgcagcctgtggaccccagccctaggggcctgccattctgagtgagttattagcatgaagaagaggaagatctggatcaaacgtgggtgatggtactcagagacccaagataggatagggatggaacaa

SEQ ID NO: 436846 - DNA, 1436 bp, Homo sapiens
gtaatctgcaacgactctcttaatcctccacggctacacgtgaaacagtcgcaaatggaatttcaagaaacattctatcatcaggtattatctactgctgtctgcagaattcagacatggagggctcaatggtgtcccctggtctttggaacattctgtattttaatgatcatgatacactgcctctaggactgggacagatagccactgagtacctgcttcaaatcaccctgcacgttttctctttggaaagataagcactggagaaccatctcgttaccttcagcagaaatggaaacaaatcaagacattaagaatgccgcagtggacagcagttatgcaaggttcagcagaggaagttttcaagatggtgtgcctcactagccagaaatcagaaaagatcgaagctagccttttcatctcagctgctccttaaatcagtgcaacccctccaaattaatgtgaattgaaacttgcattgcttttcaacttaattgaatacttactatatgtgaaccactgcacaaaataggggaagaagatgtgggagacaaagatgtggagcctgtcttcaataaatttacagttagtttcagggtacattgtttttcttctgctgttaattaggtgtatccccaagacaataaatacatgaatggaaaagtatattctgtgttttaagtctctttaataaaaaacaaaacaaaatccaaaaaaactcctaacatggcaactcaggacattttaatccttttttttgttgttgggcttctgataggatccattttattgattccataaatatttagtagactttagacatattaatacattgtagtttgagttaatttgcattaaattctgtttttttccccttaggtatagattgtctgttggaaaaatatattgcttgtggatttcttggggagtgggaaggtgaattatacctgttgtctctacagtccactaccttccacaccctagggcagtggtccccaaccttcttggcaccagggatcagtttcctggaagacaatttttctgtggatggtgtggggatggttttgggatggaactgtccacctcagatcatcaggcattagttaggctctcataacgagtgcgcagcctagatccctcacatgcacagttcacagtagggtttgcgctgctatgagaatctaaggctgccactgatctgacaggaggcagaactcaggtggcaatgcttactggcccactgctcacctcttgctgtgcggcctggttcctaataggccatggacccccacagacgggtactagtctgcagcctgtggaccccagccctaggggcctgccattctgagtgagttattagcatgaagaagaggaagatctggatcaaacgtgggtgatggtactcagagacccaagataggatagggatggaacaa

SEQ ID NO: 436847 - DNA, 1315 bp, Homo sapiens
ttgtaggacctctaacaatgatattggaagaatagatactaagtcttggagagatacactgcctctaggactgggacagatagccactgagtacctgcttcaaatcaccctgcacgttttctctttggaaagataagcactggagaaccatctcgttaccttcagcagaaatggaaacaaatcaagacattaagaatgccgcagtggacagcagttatgcaaggttcagcagaggaagttttcaagatggtgtgcctcactagccagaaatcagaaaagatcgaagctagccttttcatctcagctgctccttaaatcagtgcaacccctccaaattaatgtgaattgaaacttgcattgcttttcaacttaattgaatacttactatatgtgaaccactgcacaaaataggggaagaagatgtgggagacaaagatgtggagcctgtcttcaataaatttacagttagtttcagggtacattgtttttcttctgctgttaattaggtgtatccccaagacaataaatacatgaatggaaaagtatattctgtgttttaagtctctttaataaaaaacaaaacaaaatccaaaaaaactcctaacatggcaactcaggacattttaatccttttttttgttgttgggcttctgataggatccattttattgattccataaatatttagtagactttagacatattaatacattgtagtttgagttaatttgcattaaattctgtttttttccccttaggtatagattgtctgttggaaaaatatattgcttgtggatttcttggggagtgggaaggtgaattatacctgttgtctctacagtccactaccttccacaccctagggcagtggtccccaaccttcttggcaccagggatcagtttcctggaagacaatttttctgtggatggtgtggggatggttttgggatggaactgtccacctcagatcatcaggcattagttaggctctcataacgagtgcgcagcctagatccctcacatgcacagttcacagtagggtttgcgctgctatgagaatctaaggctgccactgatctgacaggaggcagaactcaggtggcaatgcttactggcccactgctcacctcttgctgtgcggcctggttcctaataggccatggacccccacagacgggtactagtctgcagcctgtggaccccagccctaggggcctgccattctgagtgagttattagcatgaagaagaggaagatctggatcaaacgtgggtgatggtactcagagacccaagataggatagggatggaacaa

SEQ ID NO: 436848 - DNA, 1325 bp, Homo sapiens
  misc_feature (22)..(22): n is a, c, g, or t
  misc_feature (26)..(26): n is a, c, g, or t
  misc_feature (31)..(33): n is a, c, g, or t
aaatactccaaaataataatanaaanaaaannnttttgaatagaaattaggcaattgtccactatacactgcctctaggactgggacagatagccactgagtacctgcttcaaatcaccctgcacgttttctctttggaaagataagcactggagaaccatctcgttaccttcagcagaaatggaaacaaatcaagacattaagaatgccgcagtggacagcagttatgcaaggttcagcagaggaagttttcaagatggtgtgcctcactagccagaaatcagaaaagatcgaagctagccttttcatctcagctgctccttaaatcagtgcaacccctccaaattaatgtgaattgaaacttgcattgcttttcaacttaattgaatacttactatatgtgaaccactgcacaaaataggggaagaagatgtgggagacaaagatgtggagcctgtcttcaataaatttacagttagtttcagggtacattgtttttcttctgctgttaattaggtgtatccccaagacaataaatacatgaatggaaaagtatattctgtgttttaagtctctttaataaaaaacaaaacaaaatccaaaaaaactcctaacatggcaactcaggacattttaatccttttttttgttgttgggcttctgataggatccattttattgattccataaatatttagtagactttagacatattaatacattgtagtttgagttaatttgcattaaattctgtttttttccccttaggtatagattgtctgttggaaaaatatattgcttgtggatttcttggggagtgggaaggtgaattatacctgttgtctctacagtccactaccttccacaccctagggcagtggtccccaaccttcttggcaccagggatcagtttcctggaagacaatttttctgtggatggtgtggggatggttttgggatggaactgtccacctcagatcatcaggcattagttaggctctcataacgagtgcgcagcctagatccctcacatgcacagttcacagtagggtttgcgctgctatgagaatctaaggctgccactgatctgacaggaggcagaactcaggtggcaatgcttactggcccactgctcacctcttgctgtgcggcctggttcctaataggccatggacccccacagacgggtactagtctgcagcctgtggaccccagccctaggggcctgccattctgagtgagttattagcatgaagaagaggaagatctggatcaaacgtgggtgatggtactcagagacccaagataggatagggatggaacaa

SEQ ID NO: 436849 - DNA, 1368 bp, Homo sapiens
  misc_feature (24)..(24): n is a, c, g, or t
  misc_feature (30)..(32): n is a, c, g, or t
aataaaataaagagaaaaagaaanatgagnnngcagggagagatgaccaacaagtacaaatacaaatagatggagctaagtatttaaaaaaactcgaactataaggatacactgcctctaggactgggacagatagccactgagtacctgcttcaaatcaccctgcacgttttctctttggaaagataagcactggagaaccatctcgttaccttcagcagaaatggaaacaaatcaagacattaagaatgccgcagtggacagcagttatgcaaggttcagcagaggaagttttcaagatggtgtgcctcactagccagaaatcagaaaagatcgaagctagccttttcatctcagctgctccttaaatcagtgcaacccctccaaattaatgtgaattgaaacttgcattgcttttcaacttaattgaatacttactatatgtgaaccactgcacaaaataggggaagaagatgtgggagacaaagatgtggagcctgtcttcaataaatttacagttagtttcagggtacattgtttttcttctgctgttaattaggtgtatccccaagacaataaatacatgaatggaaaagtatattctgtgttttaagtctctttaataaaaaacaaaacaaaatccaaaaaaactcctaacatggcaactcaggacattttaatccttttttttgttgttgggcttctgataggatccattttattgattccataaatatttagtagactttagacatattaatacattgtagtttgagttaatttgcattaaattctgtttttttccccttaggtatagattgtctgttggaaaaatatattgcttgtggatttcttggggagtgggaaggtgaattatacctgttgtctctacagtccactaccttccacaccctagggcagtggtccccaaccttcttggcaccagggatcagtttcctggaagacaatttttctgtggatggtgtggggatggttttgggatggaactgtccacctcagatcatcaggcattagttaggctctcataacgagtgcgcagcctagatccctcacatgcacagttcacagtagggtttgcgctgctatgagaatctaaggctgccactgatctgacaggaggcagaactcaggtggcaatgcttactggcccactgctcacctcttgctgtgcggcctggttcctaataggccatggacccccacagacgggtactagtctgcagcctgtggaccccagccctaggggcctgccattctgagtgagttattagcatgaagaagaggaagatctggatcaaacgtgggtgatggtactcagagacccaagataggatagggatggaacaa

SEQ ID NO: 436850 - DNA, 1330 bp, Homo sapiens
  misc_feature (1)..(1): n is a, c, g, or t
  misc_feature (16)..(19): n is a, c, g, or t
  misc_feature (24)..(24): n is a, c, g, or t
  misc_feature (63)..(63): n is a, c, g, or t
naaaaaaaaaaaaaannnnaaaanaaaataaaaaaataaaatataaaaaaataaaaaaactantaaccatacactgcctctaggactgggacagatagccactgagtacctgcttcaaatcaccctgcacgttttctctttggaaagataagcactggagaaccatctcgttaccttcagcagaaatggaaacaaatcaagacattaagaatgccgcagtggacagcagttatgcaaggttcagcagaggaagttttcaagatggtgtgcctcactagccagaaatcagaaaagatcgaagctagccttttcatctcagctgctccttaaatcagtgcaacccctccaaattaatgtgaattgaaacttgcattgcttttcaacttaattgaatacttactatatgtgaaccactgcacaaaataggggaagaagatgtgggagacaaagatgtggagcctgtcttcaataaatttacagttagtttcagggtacattgtttttcttctgctgttaattaggtgtatccccaagacaataaatacatgaatggaaaagtatattctgtgttttaagtctctttaataaaaaacaaaacaaaatccaaaaaaactcctaacatggcaactcaggacattttaatccttttttttgttgttgggcttctgataggatccattttattgattccataaatatttagtagactttagacatattaatacattgtagtttgagttaatttgcattaaattctgtttttttccccttaggtatagattgtctgttggaaaaatatattgcttgtggatttcttggggagtgggaaggtgaattatacctgttgtctctacagtccactaccttccacaccctagggcagtggtccccaaccttcttggcaccagggatcagtttcctggaagacaatttttctgtggatggtgtggggatggttttgggatggaactgtccacctcagatcatcaggcattagttaggctctcataacgagtgcgcagcctagatccctcacatgcacagttcacagtagggtttgcgctgctatgagaatctaaggctgccactgatctgacaggaggcagaactcaggtggcaatgcttactggcccactgctcacctcttgctgtgcggcctggttcctaataggccatggacccccacagacgggtactagtctgcagcctgtggaccccagccctaggggcctgccattctgagtgagttattagcatgaagaagaggaagatctggatcaaacgtgggtgatggtactcagagacccaagataggatagggatggaacaa

SEQ ID NO: 436851 - DNA, 1469 bp, Homo sapiens
agttatttcttccactgacatcttgaacccctcagtcatccatgaggcttggaatcaacttcttccatatctcctgctcatgttgatattttgatctccttttatgaaacatggatgttttaatagcatctagaatgagaaatcttttccagaaggctttcaattgactttgcccagatccatcagaggaatcgctatctatgacggatacactgcctctaggactgggacagatagccactgagtacctgcttcaaatcaccctgcacgttttctctttggaaagataagcactggagaaccatctcgttaccttcagcagaaatggaaacaaatcaagacattaagaatgccgcagtggacagcagttatgcaaggttcagcagaggaagttttcaagatggtgtgcctcactagccagaaatcagaaaagatcgaagctagccttttcatctcagctgctccttaaatcagtgcaacccctccaaattaatgtgaattgaaacttgcattgcttttcaacttaattgaatacttactatatgtgaaccactgcacaaaataggggaagaagatgtgggagacaaagatgtggagcctgtcttcaataaatttacagttagtttcagggtacattgtttttcttctgctgttaattaggtgtatccccaagacaataaatacatgaatggaaaagtatattctgtgttttaagtctctttaataaaaaacaaaacaaaatccaaaaaaactcctaacatggcaactcaggacattttaatccttttttttgttgttgggcttctgataggatccattttattgattccataaatatttagtagactttagacatattaatacattgtagtttgagttaatttgcattaaattctgtttttttccccttaggtatagattgtctgttggaaaaatatattgcttgtggatttcttggggagtgggaaggtgaattatacctgttgtctctacagtccactaccttccacaccctagggcagtggtccccaaccttcttggcaccagggatcagtttcctggaagacaatttttctgtggatggtgtggggatggttttgggatggaactgtccacctcagatcatcaggcattagttaggctctcataacgagtgcgcagcctagatccctcacatgcacagttcacagtagggtttgcgctgctatgagaatctaaggctgccactgatctgacaggaggcagaactcaggtggcaatgcttactggcccactgctcacctcttgctgtgcggcctggttcctaataggccatggacccccacagacgggtactagtctgcagcctgtggaccccagccctaggggcctgccattctgagtgagttattagcatgaagaagaggaagatctggatcaaacgtgggtgatggtactcagagacccaagataggatagggatggaacaa

SEQ ID NO: 436852 - DNA, 1381 bp, Homo sapiens
ctcgtctggaaacactctcttaatgctccaccgctacaacatcaggtatcagaattcagacatggagggctcaatggtgtcccctggtctttggaacattctgtattttaatgatcatgatacactgcctctaggactgggacagatagccactgagtacctgcttcaaatcaccctgcacgttttctctttggaaagataagcactggagaaccatctcgttaccttcagcagaaatggaaacaaatcaagacattaagaatgccgcagtggacagcagttatgcaaggttcagcagaggaagttttcaagatggtgtgcctcactagccagaaatcagaaaagatcgaagctagccttttcatctcagctgctccttaaatcagtgcaacccctccaaattaatgtgaattgaaacttgcattgcttttcaacttaattgaatacttactatatgtgaaccactgcacaaaataggggaagaagatgtgggagacaaagatgtggagcctgtcttcaataaatttacagttagtttcagggtacattgtttttcttctgctgttaattaggtgtatccccaagacaataaatacatgaatggaaaagtatattctgtgttttaagtctctttaataaaaaacaaaacaaaatccaaaaaaactcctaacatggcaactcaggacattttaatccttttttttgttgttgggcttctgataggatccattttattgattccataaatatttagtagactttagacatattaatacattgtagtttgagttaatttgcattaaattctgtttttttccccttaggtatagattgtctgttggaaaaatatattgcttgtggatttcttggggagtgggaaggtgaattatacctgttgtctctacagtccactaccttccacaccctagggcagtggtccccaaccttcttggcaccagggatcagtttcctggaagacaatttttctgtggatggtgtggggatggttttgggatggaactgtccacctcagatcatcaggcattagttaggctctcataacgagtgcgcagcctagatccctcacatgcacagttcacagtagggtttgcgctgctatgagaatctaaggctgccactgatctgacaggaggcagaactcaggtggcaatgcttactggcccactgctcacctcttgctgtgcggcctggttcctaataggccatggacccccacagacgggtactagtctgcagcctgtggaccccagccctaggggcctgccattctgagtgagttattagcatgaagaagaggaagatctggatcaaacgtgggtgatggtactcagagacccaagataggatagggatggaacaa

SEQ ID NO: 436853 - DNA, 1302 bp, Homo sapiens
  misc_feature (37)..(37): n is a, c, g, or t
ggggaaagtcacgaccttgctgagtcagaataaccgntacatacactgcctctaggactgggacagatagccactgagtacctgcttcaaatcaccctgcacgttttctctttggaaagataagcactggagaaccatctcgttaccttcagcagaaatggaaacaaatcaagacattaagaatgccgcagtggacagcagttatgcaaggttcagcagaggaagttttcaagatggtgtgcctcactagccagaaatcagaaaagatcgaagctagccttttcatctcagctgctccttaaatcagtgcaacccctccaaattaatgtgaattgaaacttgcattgcttttcaacttaattgaatacttactatatgtgaaccactgcacaaaataggggaagaagatgtgggagacaaagatgtggagcctgtcttcaataaatttacagttagtttcagggtacattgtttttcttctgctgttaattaggtgtatccccaagacaataaatacatgaatggaaaagtatattctgtgttttaagtctctttaataaaaaacaaaacaaaatccaaaaaaactcctaacatggcaactcaggacattttaatccttttttttgttgttgggcttctgataggatccattttattgattccataaatatttagtagactttagacatattaatacattgtagtttgagttaatttgcattaaattctgtttttttccccttaggtatagattgtctgttggaaaaatatattgcttgtggatttcttggggagtgggaaggtgaattatacctgttgtctctacagtccactaccttccacaccctagggcagtggtccccaaccttcttggcaccagggatcagtttcctggaagacaatttttctgtggatggtgtggggatggttttgggatggaactgtccacctcagatcatcaggcattagttaggctctcataacgagtgcgcagcctagatccctcacatgcacagttcacagtagggtttgcgctgctatgagaatctaaggctgccactgatctgacaggaggcagaactcaggtggcaatgcttactggcccactgctcacctcttgctgtgcggcctggttcctaataggccatggacccccacagacgggtactagtctgcagcctgtggaccccagccctaggggcctgccattctgagtgagttattagcatgaagaagaggaagatctggatcaaacgtgggtgatggtactcagagacccaagataggatagggatggaacaa

SEQ ID NO: 436854 - DNA, 1332 bp, Homo sapiens
  misc_feature (9)..(9): n is a, c, g, or t
gtgttgttngtgttggggtttgtggcctgtacaatcgtgaagcgggaatgtcagggtgcccgtttcggccatacactgcctctaggactgggacagatagccactgagtacctgcttcaaatcaccctgcacgttttctctttggaaagataagcactggagaaccatctcgttaccttcagcagaaatggaaacaaatcaagacattaagaatgccgcagtggacagcagttatgcaaggttcagcagaggaagttttcaagatggtgtgcctcactagccagaaatcagaaaagatcgaagctagccttttcatctcagctgctccttaaatcagtgcaacccctccaaattaatgtgaattgaaacttgcattgcttttcaacttaattgaatacttactatatgtgaaccactgcacaaaataggggaagaagatgtgggagacaaagatgtggagcctgtcttcaataaatttacagttagtttcagggtacattgtttttcttctgctgttaattaggtgtatccccaagacaataaatacatgaatggaaaagtatattctgtgttttaagtctctttaataaaaaacaaaacaaaatccaaaaaaactcctaacatggcaactcaggacattttaatccttttttttgttgttgggcttctgataggatccattttattgattccataaatatttagtagactttagacatattaatacattgtagtttgagttaatttgcattaaattctgtttttttccccttaggtatagattgtctgttggaaaaatatattgcttgtggatttcttggggagtgggaaggtgaattatacctgttgtctctacagtccactaccttccacaccctagggcagtggtccccaaccttcttggcaccagggatcagtttcctggaagacaatttttctgtggatggtgtggggatggttttgggatggaactgtccacctcagatcatcaggcattagttaggctctcataacgagtgcgcagcctagatccctcacatgcacagttcacagtagggtttgcgctgctatgagaatctaaggctgccactgatctgacaggaggcagaactcaggtggcaatgcttactggcccactgctcacctcttgctgtgcggcctggttcctaataggccatggacccccacagacgggtactagtctgcagcctgtggaccccagccctaggggcctgccattctgagtgagttattagcatgaagaagaggaagatctggatcaaacgtgggtgatggtactcagagacccaagataggatagggatggaacaa

SEQ ID NO: 436855 - DNA, 613 bp, Homo sapiens
  misc_feature (563)..(564): n is a, c, g, or t
gtaatctgcaacgactctcttaatcctccacggctacacgtgaaacagtcgcaaatggaatttcaagaaacattctatatacactgcctctaggactgggacagatagccactgagtacctgcttcaaatcaccctgcacgttttctctttggaaagataagcactggagaaccatctcgttaccttcagcagaaatggaaacaaatcaagacattaagaatgccgcagtggacagcagttatgcaaggttcagcagaggaagttttcaagatggtgtgcctcactagccagaaatcagaaaagatcgaagctagccttttcatctcagctgctccttaaatcagtgcaacccctccaaattaatgtgaattgaaacttgcattgcttttcaacttaattgaatacttactatatgtgaaccactgcacaaaataggggaagaagatgtgggagacaaagatgtggagcctgtcttcaataaatttacagttagtttcagggtacattgtttttcttctgctgttaattaggtgtatccccaagacaataaatacatggatgnncccggaactttttaccgtttaccgtacccgcccgcaccccccacacaca

SEQ ID NO: 436856 - DNA, 615 bp, Homo sapiens
gtaatctgcaacgactctcttaatcctccacggctacacgtgaaacagtcgcaaatggaatttcaagaaacattctatatacactgcctctaggactgggacagatagccactgagtacctgcttcaaatcaccctgcacgttttctctttggaaagataagcactggagaaccatctcgttaccttcagcagaaatggaaacaaatcaagacattaagaatgccgcagtggacagcagttatgcaaggttcagcagaggaagttttcaagatggtgtgcctcactagccagaaatcagaaaagatcgaagctagccttttcatctcagctgctccttaaatcagtgcaacccctccaaattaatgtgaattgaaacttgcattgcttttcaacttaattgaatacttactatatgtgaaccactgcacaaaataggggaagaagatgtgggagacaaagatgtggagcctgtcttcaataaatttacagttagtttcagggtacattgtttttcttctgctgttaattaggtgtatccccaagacaataaatacatgcgatgcgaccggagaattacaatataaattaggagtgctagatgtggggaggatggg

SEQ ID NO: 436857 - DNA, 621 bp, Homo sapiens
  misc_feature (561)..(561): n is a, c, g, or t
gtaatctgcaacgactctcttaatcctccacggctacacgtgaaacagtcgcaaatggaatttcaagaaacattctatatacactgcctctaggactgggacagatagccactgagtacctgcttcaaatcaccctgcacgttttctctttggaaagataagcactggagaaccatctcgttaccttcagcagaaatggaaacaaatcaagacattaagaatgccgcagtggacagcagttatgcaaggttcagcagaggaagttttcaagatggtgtgcctcactagccagaaatcagaaaagatcgaagctagccttttcatctcagctgctccttaaatcagtgcaacccctccaaattaatgtgaattgaaacttgcattgcttttcaacttaattgaatacttactatatgtgaaccactgcacaaaataggggaagaagatgtgggagacaaagatgtggagcctgtcttcaataaatttacagttagtttcagggtacattgtttttcttctgctgttaattaggtgtatccccaagacaataaatacatgggngtcgcgccgcaagcccctctataaatttggaaaacgatgtgcgcatatcaaaatcatcat

SEQ ID NO: 436858 - DNA, 619 bp, Homo sapiens
  misc_feature (567)..(567): n is a, c, g, or t
gtaatctgcaacgactctcttaatcctccacggctacacgtgaaacagtcgcaaatggaatttcaagaaacattctatatacactgcctctaggactgggacagatagccactgagtacctgcttcaaatcaccctgcacgttttctctttggaaagataagcactggagaaccatctcgttaccttcagcagaaatggaaacaaatcaagacattaagaatgccgcagtggacagcagttatgcaaggttcagcagaggaagttttcaagatggtgtgcctcactagccagaaatcagaaaagatcgaagctagccttttcatctcagctgctccttaaatcagtgcaacccctccaaattaatgtgaattgaaacttgcattgcttttcaacttaattgaatacttactatatgtgaaccactgcacaaaataggggaagaagatgtgggagacaaagatgtggagcctgtcttcaataaatttacagttagtttcagggtacattgtttttcttctgctgttaattaggtgtatccccaagacaataaatacatgaacccagangcggccgaacatcactctctcgcacgatttggttcggtgatcgtcgggagga

SEQ ID NO: 436859 - DNA, 761 bp, Homo sapiens
gtaatctgcaacgactctcttaatcctccacggctacacgtgaaacagtcgcaaatggaatttcaagaaacattctatatacactgcctctaggactgggacagatagccactgagtacctgcttcaaatcaccctgcacgttttctctttggaaagataagcactggagaaccatctcgttaccttcagcagaaatggaaacaaatcaagacattaagaatgccgcagtggacagcagttatgcaaggttcagcagaggaagttttcaagatggtgtgcctcactagccagaaatcagaaaagatcgaagctagccttttcatctcagctgctccttaaatcagtgcaacccctccaaattaatgtgaattgaaacttgcattgcttttcaacttaattgaatacttactatatgtgaaccactgcacaaaataggggaagaagatgtgggagacaaagatgtggagcctgtcttcaataaatttacagttagtttcagggtacattgtttttcttctgctgttaattaggtgtatccccaagacaataaatacatggtaaaaacaagaatacaaatattatatcgcacccctattatccgagggagacacataaaatacaacgcgctcgtcggccctcgcggggaaactttgccggcgcttcccttttgggaggggaaatttaagatccttcgctcatgagctcgctgcgcttcgtcgtaccagctagggggagcggtattcacttactattagggggt

SEQ ID NO: 436860 - DNA, 612 bp, Homo sapiens
gtaatctgcaacgactctcttaatcctccacggctacacgtgaaacagtcgcaaatggaatttcaagaaacattctatatacactgcctctaggactgggacagatagccactgagtacctgcttcaaatcaccctgcacgttttctctttggaaagataagcactggagaaccatctcgttaccttcagcagaaatggaaacaaatcaagacattaagaatgccgcagtggacagcagttatgcaaggttcagcagaggaagttttcaagatggtgtgcctcactagccagaaatcagaaaagatcgaagctagccttttcatctcagctgctccttaaatcagtgcaacccctccaaattaatgtgaattgaaacttgcattgcttttcaacttaattgaatacttactatatgtgaaccactgcacaaaataggggaagaagatgtgggagacaaagatgtggagcctgtcttcaataaatttacagttagtttcagggtacattgtttttcttctgctgttaattaggtgtatccccaagacaataaatacatgggatgcggcctaattttttgttttttgtaataaatgaataacataaccgaccgg

SEQ ID NO: 436861 - DNA, 609 bp, Homo sapiens
gtaatctgcaacgactctcttaatcctccacggctacacgtgaaacagtcgcaaatggaatttcaagaaacattctatatacactgcctctaggactgggacagatagccactgagtacctgcttcaaatcaccctgcacgttttctctttggaaagataagcactggagaaccatctcgttaccttcagcagaaatggaaacaaatcaagacattaagaatgccgcagtggacagcagttatgcaaggttcagcagaggaagttttcaagatggtgtgcctcactagccagaaatcagaaaagatcgaagctagccttttcatctcagctgctccttaaatcagtgcaacccctccaaattaatgtgaattgaaacttgcattgcttttcaacttaattgaatacttactatatgtgaaccactgcacaaaataggggaagaagatgtgggagacaaagatgtggagcctgtcttcaataaatttacagttagtttcagggtacattgtttttcttctgctgttaattaggtgtatccccaagacaataaatacatgtacccgatgcggccgaagccacacttctaaaatcttgattaatgcaggtgc

SEQ ID NO: 436862 - DNA, 798 bp, Homo sapiens
gtttttatattaaccacggattcagctaaggagaggccccggatcaggacagcagtttcctcagacgtgatgtggtgccccttgcatcctgctcagagaattctcagcagcacagatacactgcctctaggactgggacagatagccactgagtacctgcttcaaatcaccctgcacgttttctctttggaaagataagcactggagaaccatctcgttaccttcagcagaaatggaaacaaatcaagacattaagaatgccgcagtggacagcagttatgcaaggttcagcagaggaagttttcaagatggtgtgcctcactagccagaaatcagaaaagatcgaagctagccttttcatctcagctgctccttaaatcagtgcaacccctccaaattaatgtgaattgaaacttgcattgcttttcaacttaattgaatacttactatatgtgaaccactgcacaaaataggggaagaagatgtgggagacaaagatgtggagcctgtcttcaataaatttacagttagtttcagggtacattgtttttcttctgctgttaattaggtgtatccccaagacaataaatacatggtaaaaacaagaatacaaatattatatcgcacccctattatccgagggagacacataaaatacaacgcgctcgtcggccctcgcggggaaactttgccggcgcttcccttttgggaggggaaatttaagatccttcgctcatgagctcgctgcgcttcgtcgtaccagctagggggagcggtattcacttactattagggggt

SEQ ID NO: 436863 - DNA, 711 bp, Homo sapiens
gtaatctgcaacgactctcttaatcctccacggctacacgtgaaacagtcgcaaatggaatttcaagaaacattctatcatcaggtattatctactgctgtctgcagaattcagacatggagggctcaatggtgtcccctggtctttggaacattctgtattttaatgatcatgatacactgcctctaggactgggacagatagccactgagtacctgcttcaaatcaccctgcacgttttctctttggaaagataagcactggagaaccatctcgttaccttcagcagaaatggaaacaaatcaagacattaagaatgccgcagtggacagcagttatgcaaggttcagcagaggaagttttcaagatggtgtgcctcactagccagaaatcagaaaagatcgaagctagccttttcatctcagctgctccttaaatcagtgcaacccctccaaattaatgtgaattgaaacttgcattgcttttcaacttaattgaatacttactatatgtgaaccactgcacaaaataggggaagaagatgtgggagacaaagatgtggagcctgtcttcaataaatttacagttagtttcagggtacattgtttttcttctgctgttaattaggtgtatccccaagacaataaatacatgcgatgcgaccggagaattacaatataaattaggagtgctagatgtggggaggatggg

SEQ ID NO: 436864 - DNA, 1764 bp, Homo sapiens
tccatgctgccctcatgggggctttcctacctagctgatgtttgaagttttcatgtgtgcctctgtctttgacccacctggctagttcagagcctttgctgaagaaaatgttctttgcttgtccgattgcttcacagcacgcttctctatctgcaactgttgtttcccagccatccatatggtgccacaggatgggacacaggcagggactttactattcacaaaggggtagggcctgggacctcgagtggggcttttcctgcttataaagacaaggaatgaaaatgcagaatccttacctggtaggggaactttcttttccaaatatgcaggtatgtatatttctgatttccttaggcttggatctgtgcctgggggtgagatggatttcaaagtcattatttaaagtagggagataaagctttagacaaccaccataagagatcctggttgtatttttgaaatgttgagcgaaataacattttagtgatcagtaaaagctaacctttgtacttctgaaaagttgttcttagaaaggcctggattaataattggtttcaatttgcccacagatatacactgcctctaggactgggacagatagccactgagtacctgcttcaaatcaccctgcacgttttctctttggaaagataagcactggagaaccatctcgttaccttcagcagaaatggaaacaaagcctcactagccagaaatcagaaaagatcgaagctagccttttcatctcagctgctccttaaatcagtgcaacccctccaaattaatgtgaattgaaacttgcattgcttttcaacttaattgaatacttactatatgtgaaccactgcacaaaataggggaagaagatgtgggagacaaagatgtggagcctgtcttcaataaatttacagttagtttcagggtacattgtttttcttctgctgttaattaggtgtatccccaagacaataaatacatgaatggaaaagtatattctgtgttttaagtctctttaataaaaaacaaaacaaaatccaaaaaaactcctaacatggcaactcaggacattttaatccttttttttgttgttgggcttctgataggatccattttattgattccataaatatttagtagactttagacatattaatacattgtagtttgagttaatttgcattaaattctgtttttttccccttaggtatagattgtctgttggaaaaatatattgcttgtggatttcttggggagtgggaaggtgaattatacctgttgtctctacagtccactaccttccacaccctagggcagtggtccccaaccttcttggcaccagggatcagtttcctggaagacaatttttctgtggatggtgtggggatggttttgggatggaactgtccacctcagatcatcaggcattagttaggctctcataacgagtgcgcagcctagatccctcacatgcacagttcacagtagggtttgcgctgctatgagaatctaaggctgccactgatctgacaggaggcagaactcaggtggcaatgcttactggcccactgctcacctcttgctgtgcggcctggttcctaataggccatggacccccacagacgggtactagtctgcagcctgtggaccccagccctaggggcctgccattctgagtgagttattagcatgaagaagaggaagatctggatcaaacgtgggtgatggtactcagagacccaagataggatagggatggaacaa

SEQ ID NO: 436865 - DNA, 1809 bp, Homo sapiens
gtaatctgcaacgactctcttaatcctccacggctacacgtgaaacagtcgcaaatggaatttcaagaaacattctatcatcaggtattatctactgctgtctgcagaattcagacatggagggctcaatggtgtcccctggtctttggaacattctgtattttaatgatcatgccttacacagcttgtagaatccatcacttcaacagagcagactgaattacttcgatgactggcaaatgggcaccacttgtggtgaaatgaaagcagtcagatacactgcctctaggactgggacagatagccactgagtacctgcttcaaatcaccctgcacgttttctctttggaaagataagcactggagaaccatctcgttaccttcagcagaaatggaaacaaatcaagacattaagaatgccgcagtggacagcagttatgcaaggttcagcagaggaagttttcaagatggtgtacatggagggctcaatggtgccccctggtctttggaacattctgtattctaatgatcatgccttacacagcttgtagaatccatcacttcaacagagcagactgaattacttccatgactggcaaatgggcaccacttgcggtgaaaggaaagcagtcagatacactgcctctaggactgggacagatagccactgagtacctgcttcaaatcaccctgcacgttttttttttggtaagataagcactggagaaccatttcgtacctttagcagcctcactagccagaaatcagaaaagatcgaagctagccttttcatctcagctgctccttaaatcagtgcaacccctccaaattaatgtgaattgaaacttgcattgcttttcaacttaattgaatacttactatatgtgaaccactgcacaaaataggggaagaagatgtgggagacaaagatgtggagcctgtcttcaataaatttacagttagtttcagggtacattgtttttcttctgctgttaattaggtgtatccccaagacaataaatacatgaatggaaaagtatattctgtgttttaagtctctttaataaaaaacaaaacaaaatccaaaaaaactcctaacatggcaactcaggacattttaatccttttttttgttgttgggcttctgataggatccattttattgattccataaatatttagtagactttagacatattaatacattgtagtttgagttaatttgcattaaattctgtttttttccccttaggtatagattgtctgttggaaaaatatattgcttgtggatttcttggggagtgggaaggtgaattatacctgttgtctctacagtccactaccttccacaccctagggcagtggtccccaaccttcttggcaccagggatcagtttcctggaagacaatttttctgtggatggtgtggggatggttttgggatggaactgtccacctcagatcatcaggcattagttaggctctcataacgagtgcgcagcctagatccctcacatgcacagttcacagtagggtttgcgctgctatgagaatctaaggctgccactgatctgacaggaggcagaactcaggtggcaatgcttactggcccactgctcacctcttgctgtgcggcctggttcctaataggccatggacccccacagacgggtactagtctgcagcctgtggaccccagccctaggggcctgccattctgagtgagttattagcatgaagaagaggaagatctggatcaaacgtgggtgatggtactcagagacccaagataggatagggatggaacaa

SEQ ID NO: 436866 - DNA, 1793 bp, Homo sapiens
tccatgctgccctcatgggggctttcctacctagctgatgtttgaagttttcatgtgtgcctctgtctttgacccacctggctagttcagagcctttgctgaagaaaatgttctttgcttgtccgattgcttcacagcacgcttctctatctgcaactgttgtttcccagccatccatatggtgccacaggatgggacacaggcagggactttactattcacaaaggggtagggcctgggacctcgagtggggcttttcctgcttataaagacaaggaatgaaaatgcagaatccttacctggtaggggaactttcttttccaaatatgcaggtatgtatatttctgatttccttaggcttggatctgtgcctgggggtgagatggatttcaaagtcattatttaaagtagggagataaagctttagacaaccaccataagagatcctggttgtatttttgaaatgttgagcgaaataacattttagtgatcagtaaaagctaacctttgtacttctgaaaagttgttcttagaaaggcctggattaataattggtttcaatttgcccacagatatacactgcctctaggactgggacagatagccactgagtacctgcttcaaatcaccctgcacgttttctctttggaaagataagcactggagaaccatctcgttactcaagacattaagaatgccgcagtggacagcagttatgcaaggttcagcagaggaagttttcaagatggtgtaaaagatcgaagctagccttttcatctcagctgctccttaaatcagtgcaacccctccaaattaatgtgaattgaaacttgcattgcttttcaacttaattgaatacttactatatgtgaaccactgcacaaaataggggaagaagatgtgggagacaaagatgtggagcctgtcttcaataaatttacagttagtttcagggtacattgtttttcttctgctgttaattaggtgtatccccaagacaataaatacatgaatggaaaagtatattctgtgttttaagtctctttaataaaaaacaaaacaaaatccaaaaaaactcctaacatggcaactcaggacattttaatccttttttttgttgttgggcttctgataggatccattttattgattccataaatatttagtagactttagacatattaatacattgtagtttgagttaatttgcattaaattctgtttttttccccttaggtatagattgtctgttggaaaaatatattgcttgtggatttcttggggagtgggaaggtgaattatacctgttgtctctacagtccactaccttccacaccctagggcagtggtccccaaccttcttggcaccagggatcagtttcctggaagacaatttttctgtggatggtgtggggatggttttgggatggaactgtccacctcagatcatcaggcattagttaggctctcataacgagtgcgcagcctagatccctcacatgcacagttcacagtagggtttgcgctgctatgagaatctaaggctgccactgatctgacaggaggcagaactcaggtggcaatgcttactggcccactgctcacctcttgctgtgcggcctggttcctaataggccatggacccccacagacgggtactagtctgcagcctgtggaccccagccctaggggcctgccattctgagtgagttattagcatgaagaagaggaagatctggatcaaacgtgggtgatggtactcagagacccaagataggatagggatggaacaa

SEQ ID NO: 436867 - DNA, 1272 bp, Homo sapiens
  misc_feature (28)..(28): n is a, c, g, or t
ctcagtctggacgactctcttaatctcncaccgctacacgtgaaactcaagaaacattctatatacactgcctctaggactgggacagatagccactgagtacctgcttcaaatcaccctgcacataagcactggagaaccatctcgttaccttcagcagaaatggaaacaaatcaagacattaagaatgccgcagtggacagcagttatgcctcactagccagaaatcagaaaagatcgaagctagccttttcatctcagctgctccttaaatcagtgcaacccctccaaattaatgtgaattgaaacttgcattgcttttcaacttaattgaatacttactatatgtgaaccactgcacaaaataggggaagaagatgtgggagacaaagatgtggagcctgtcttcaataaatttacagttagtttcagggtacattgtttttcttctgctgttaattaggtgtatccccaagacaataaatacatgaatggaaaagtatattctgtgttttaagtctctttaataaaaaacaaaacaaaatccaaaaaaactcctaacatggcaactcaggacattttaatccttttttttgttgttgggcttctgataggatccattttattgattccataaatatttagtagactttagacatattaatacattgtagtttgagttaatttgcattaaattctgtttttttccccttaggtatagattgtctgttggaaaaatatattgcttgtggatttcttggggagtgggaaggtgaattatacctgttgtctctacagtccactaccttccacaccctagggcagtggtccccaaccttcttggcaccagggatcagtttcctggaagacaatttttctgtggatggtgtggggatggttttgggatggaactgtccacctcagatcatcaggcattagttaggctctcataacgagtgcgcagcctagatccctcacatgcacagttcacagtagggtttgcgctgctatgagaatctaaggctgccactgatctgacaggaggcagaactcaggtggcaatgcttactggcccactgctcacctcttgctgtgcggcctggttcctaataggccatggacccccacagacgggtactagtctgcagcctgtggaccccagccctaggggcctgccattctgagtgagttattagcatgaagaagaggaagatctggatcaaacgtgggtgatggtactcagagacccaagataggatagggatggaacaa

SEQ ID NO: 436868 - DNA, 1065 bp, Homo sapiens
tccatgctgccctcatgggggctttcctacctagctgatgtttgaagttttcatgtgtgcctctgtctttgacccacctggctagttcagagcctttgctgaagaaaatgttctttgcttgtccgattgcttcacagcacgcttctctatctgcaactgttgtttcccagccatccatatggtgccacaggatgggacacaggcagggactttactattcacaaaggggtagggcctgggacctcgagtggggcttttcctgcttataaagacaaggaatgaaaatgcagaatccttacctggtaggggaactttcttttccaaatatgcaggtatgtatatttctgatttccttaggcttggatctgtgcctgggggtgagatggatttcaaagtcattatttaaagtagggagataaagctttagacaaccaccataagagatcctggttgtatttttgaaatgttgagcgaaataacattttagtgatcagtaaaagctaacctttgtacttctgaaaagttgttcttagaaaggcctggattaataattggtttcaatttgcccacagatatacactgcctctaggactgggacagatagccactgagtacctgcttcaaatcaccctgcacgttttctctttggaaagataagcactggagaaccatctcgttaccttcagcagaaatggaaacaaatcaagacattaagaatgccgcagtggacagcagttatgcaaggttcagcagaggaagttttcaagatggtgtgcctcactagccagaaatcagaaaagatcgaagctagccttttcatctcagctgctccttaaatcagtgcaacccctccaaattaatgtgaattgaaacttgcattgcttttcaacttaattgaatacttactatatgtgaaccactgcacaaaataggggaagaagatgtgggagacaaagatgtggagcctgtcttcaataaattcccccatacccctccaagctcactccccaacccccaactcggtgtggtaagcaacatggctttgatgataaacggctttactct

SEQ ID NO: 436869 - DNA, 532 bp, Homo sapiens
gagacgcaggtcagaatggaaatgggctgcagaccgggcagctattgtcagccgctggaactggcttcaggctcatgtttctgacttggaatatcgaattcgtcagcaaacagacatttacaaacagatacgtgctaataaggtaagggataagtatctgatgtttttaaatgctgccgaaaactatcaatatcgctggtctcaaactcttgacctcaagtgatcctccttgccttggcctcccagaagcactggcttgactcttacgttgttttttaaaatctcctcttctgactactctttgagattacacagctgtagctgaggatggaaatgttattgaggatgggaggtggaagagcattgaaacttttgaatagggaaggagttgaatgggaactgcagaagcttataacacctttctcttcaaaattttcataaagctgtaactggagctgttgtaactcgagctgttgtaactggcgctgttgtaactggggctgttgtaactggagctgttgtaactggagct

SEQ ID NO: 436870 - DNA, 663 bp, Homo sapiens
gagacgcaggtcagaatggaaatgggctgcagaccgggcagctattgtcagccgctggaactggcttcaggctcatgtttctgacttggaatatcgaattcgtcagcaaacagacatttacaaacagatacgtgctaataaggtaagggataagtatctgatgtttttaaatgctgccgaaaactatcaatatcgctggtctcaaactcttgacctcaagtgatcctccttgccttggcctcccagaagcactggcttgactcttacgttgttttttaaaatctcctcttctgactactctttgagattacacagctgtagctgaggatggaaatgttattgaggatgggaggtggaagagcattgaaacttttgaatagggaaggagttgaatgggaactgcagaagcttataacacctttctcttcaaaattttcataaagctgttgaagttctcatcttaatagggttttttaaagcactttagacaacttatcttttccaggtagcccagggtgattcttgtggaactggtctgcagtggggtcactggtttgtcttgagatgcatagggaagattgacctgatagagtgatgtaaggaagtatgtgaaattgcctgttagctgtattgcaaatacagttgagagagggttcatccaca

SEQ ID NO: 436871 - DNA, 328 bp, Homo sapiens
gagacgcaggtcagaatggaaatgggctgcagaccgggcagctattgtcagccgctggaactggcttcaggctcatgtttctgacttggaatatcgaattcgtcagcaaacagacatttacaaacagatacgtgctaataaggggttgatagttcttggggaggtacctcccccagagcatacaacagacttatttcttccacttagttctgaggtgaagacagatcatgggactgataaattgattgagtctgtttctcagccattggaaaaccatggtgcccctattattggtcatatttcagagtcactgtctaccaaatcatgt

SEQ ID NO: 436872 - DNA, 2522 bp, Homo sapiens
  misc_feature (14)..(14): n is a, c, g, or t
gatatattcaagangttaacatacctattctaaaagatcttttaaagtttggttccttcttgaatatatcttttagaataggtatgttaacttctcatcctaaccctatcaatatatcagaggctttatgaaggagactctacagataaccacaaatcttatcaagaaaattctccttaaaaaaagttatcctttattttgttgttaaatttcccagtttttaaaagtgttttatcaaaatgacttcataattgaagcaaataccttttggaagtatatatgttacataagactttcactaaatctgtgcgtaaagcttttataatctgagatattgttatgtattaggtttgtgcaaacctaatataaaagggttcatctgtaagtatcatttagaggcaaaataatttccccctcacatctaatgtggactcaaattttggcaactggaatgttatcctcttggtaggcattctaaattaatgaatactgctatgtggtgtagtaaacaaatttgccataaaatgccatttaaggattttctttttacctttatttcattataaaagtatatgagttgaagatcatataaaaaatatgaaactcctacacaggaaatccccaattttgtgatttaataggttgtaaaaagagttgttccaaattcagactacatctcatcatataaataatattatgaataataagggtaaaagattagccaacaaaagctaatctagtacaccccatagaggtactccaggtgtcttggttttggataaatttttatagtggagaaaggttactttgatctctcaataattgcttggtacacttcttcctaggcaatatgctcatgataccctcttcatgtgacctattcctcaaatgctgcattctccaaaacttccttacctgccttctatcccctagtcattcttatcaatacttccaaaatataacctatctcaagtgttagaaatttgctttaactaatttatattaaagtgttagtgactatagcccttttatctctcttaaagagaaatctgcattaaaagcaaacacattgctgttagctcaaattaatgtcagtgagtagaatcttaagctttaaaacaaaagtggaaataatttaaattagtgttgatgggactattttgaggcaagagataccattaagtgacctagcttggaaatctgccccctttgcccaaacccatgtgatgtctgaaactactgtatattttcaatgaccttgagaaagggagctagtcatttgtatttatgggccttatgaagtcagggcctgctgatcctgttttttaagttcaagcgcaatgcctgaagcatcctagatctccttcaccctcattctacctgacagacagctaggtctgtcttccagctctttctcattgatactacctttacataagaatactatccatgcttgttaaaaaaaaaaaaagtctttccccattttactgttacaatttttcaagagctataaaggtagaaaaagtattccttttcattattctaaaaaatatgtcatttttaaatagctggcacttagcagtttagttttccaaactttattctgaatcaaattgctgaggtgattctaaatgtctaatgttgatttatcatataaacatctaattagaaagtgtttatgctaaagacttgtattttgtggcattagttcttcatgtttcttttttatatgtttattaaaattgttcacttccaaatgagtggaaaagttgctgttgttgggatgtacagggcaagtgcacttggttagagcatgaactgggaatttcacattctctgatgtgctttgcactctgctcttgtagatttattttgtttacagtagactgatgtcagtttttgtaaatgttttttcttagcactttaactgtgagtgtacaaactgattttaaatgtagtggttgtatattttggttataaattggagatttttaataaaattaaataattctcttttctgtcattaaaaaaaaaaaaaaaaaaaaaaaaaaaaaaaaaaaaaaaaaaaaaaaaaaaaaaaaaaaaaaaaaaaaaaaaaaaaaaaaaaaaaaaaaaaaaaaaaaaaaaaaaaaaaaaagaaaaaaaaaaaaaaaaaaaaaagaggagggggcgggccagacataaaaaagcaaccggacggcgggcgccgcctggcacagaacgcacacgactgagagaatgcagccacggcgaggccgacaaatagaagcgagagagatagaaaaagagaagaggcgcagggcggctggagagagactaagaaaacgacagggacgacggagaggggaaaagacgcaaagagagagcgggtgcgagaagggagaggaacagagcacagtcgggggtggtggtatgggacatcgaaagagagcacccagagcaagacgcagaaagaaagagcggggaggcaaggaaacagactggagcgagcgaggtgggagacaacgcagagcggacaggag

SEQ ID NO: 436873 - DNA, 368 bp, Homo sapiens
atgctagcaatttcataatagatatattcaagaaggaaccaaactttaaaagatcttttagaataggtatgttaacttctcatcctaaccctatcaatatatcagaggctttatgaaggagactctacagataaccacaaatcttatcaagaaaattctccttaaaaaaagttatcctttattttgttgttaaatttcccagtttttaaaagtgttttatcaaaatgacttcataattgaagcaaataccttttggaagtatatatgttacataagactttcactaaatctgtgcgtaaagcttttataatctgagatattgttatgtattaggtttgtgcaaacctaatataaaagggttcatctgt

SEQ ID NO: 436874 - DNA, 414 bp, Homo sapiens
cattaaaagcaaacacattgctgttagctcaaattaatgtcagtgagtagaatcttaagctttaaaacaaaagtggaaataatttaaattagtgttgatgggactattttgaggcaagagataccattaagtgacctagcttggaaatctgccccctttgcccaaacccatgtgatgtctgaaactactgtatattttcaatgaccttgagaaagggagctagtcatttgtatttatgggccttatgaagtcagggcctgctgatcctgttttttaagttcaagcgcaatgcctgaagcatcctagatctccttcaccctcattctacctgacagacagctaggtctgtcttccagctctttctcattgatactacctttacataagaatactatccatgcttgttaaaaaaaa

SEQ ID NO: 436875 - DNA, 852 bp, Homo sapiens
ttgagatggagtcttgctctgtcgctgggctagagtgcagtggtttgatcttggccactacaacctccacctcctgggttcaagtgattcgcctgcctcagccttctgagtacctgggaatataggcactcgccaccatgcccagctaattacttctgtcttgtattttaatcttctctgctctttagatgtttgaagtgaggccaggcatgttggctcacgcctgtaatcccagcactttcggaggccaaggtgggagaatcacttgaggctaggagttggagaccagcctgggcaacatagcaagactgcatctctacaaaaaaaaagaaaagattcttgaagtgaatgtatactcatttcctggttgtttctttctgtaaggatgtctgacccagctaatttgtaaacaggaattctgcactcatttctgtttttgcattctcaaccccagttgggcacacaagtgtttaatgagtatttaactgatttgataagaataaattcattgatttctttgaaaaaaaaaaaaaaaaacaaaaaaaaaaacttgtgggggggctggggccctgagaaaaggtttttcaacaccccttcggttggggctgccgggggccccccataagggttaagcgtcagaaccgtggggcactaggcgcgcttccccagaggagaaaatccgcggcgaagcaaactagtgcggcgtgggtttctcccccaccaataacaaaggagcgcgcgggggcagccccgaagcggttgtggaaacaatctccagagggggagtccgggagaggacaacagaggagccgatcacgcgggaggtccaacaggaaccggaaataaattagc

SEQ ID NO: 436876 - DNA, 866 bp, Homo sapiens
agggggtgtgtgtgaggctggagcggactggggagcccagacctgccgagcgacgtgggcgagcggtgacctggaccacggcgcagacgcgggcgagctgcggctcggacgccagcggacacgcgggcgagatcactttgggaagcagtgacatccaacctgtatcaagtcttctaatctgtgaacatgagatgggtctcggctgtgttacctaagctggagtgcagtggctattcccagcacaatcatagtgcactacagtctccaactcctgggttcaggtgctccttgtgcctccgcctcctgaatagctgggattgcaggcatgtgccatcatgcctggctatgtgccttcaaaaagactacagttgtggatggagtgttttatcaatattagttggtttatgattgtgtttagttccatatcctagctgattttctatctgttctgtccattcttgaagagtccaactataattttgagtttgtctatttctcctcaagttctgtcagttttgctgtatatatttgaggtctgtttttagatgtgtacacattttaaatggtgttgggtctttaccattatgtaatgtccctcttaatctattgtaaatttccttgctttgaggtatagtttgtcttatgtaaatataatcagttcagttttcctttgaccagcatttacgtaacatatctttttccatttttaaacttataatctacctatattaaaatatatagtcaggccaggtgcagcggctcatgcgtgtaatcccagcactttgggaggccgaggcaagcagatcacttgaggccaggagtttgagaccagcctgggcaacgtgacgaaaacctgtctctaccaa

SEQ ID NO: 436877 - DNA, 1271 bp, Homo sapiens
agggggtgtgtgtgaggctggagcggactggggagcccagacctgccgagcgacgtgggcgagcggtgacctggaccacggcgcagacgcgggcgagctgcggctcggacgccagcggacacgcgggcgagtgcgcggcctctccgtccaacgtgctcgttgccggcatctccagcgcccggccgtgccccgacggcctgacctggatcacttcctggccgcctccctgtccggcggctcccctcggtccggctcccacttccccgtccaggatgctggctccgaagcaacatctgtggtcgcgcgggacccatcccaggacctccccggaacgcgccgggatgggacgctcggacccagaccacagcccccggccgcggcagggcgccgggatttgatcccgcgtcgccctggggggacagaagcgtcccggagttgggaggggatttgaagcctatggtcctgacttccaccccgtggctgagggcgaggctgcggggccggggttaggagcagaagtccctatttccgaaccgtctgggaggagagccgggggatgcccatcacggcagtttagggagagagagggaaggactctgccgctttggaggctaggtcataggcagctggcggtgtctcagcgcgagtgaccaatccttgtggttgggaaatgtgtcgtgggcgtccgtgggctcgttttgcctttgagattaaataggaaattttcccaggacgagtttaccggagcaccttgggagttggtttttggcttggagagctactttcccctctctaaatctaaaactgctttgtttttccttattatttttttcgagatgggatctcacaatgttacccaggcaggtgtcaaactcctggccttaagcgatcctcccgcctcggcctcccagagtgctgggattagagacgtgagccattgcgcggctttaactgctgttagtctgttccttaaaattgttgtaccaggaaacttgccagagatgcaagaagatgtgattatattgttaacatttaatgataaataacattttgcttttaagagttactgattcatatcctcaagattaagaaatgttcaggatatgaatatttaatgacctttccaatcagtcagtttctgctctctagaagttagccagttgaggagaagggacagtcaagatactttcagaacagtgtggtaaggagtgtgagctaagatggagcaccgaggaaggagccgggcatttaggccatgctgttgggtgtgg

SEQ ID NO: 436878 - DNA, 4639 bp, Homo sapiens
gcattcaggacgcagaggaattagtatttactgtttttaacattccttacatgggaatcacgtaaagaatcaggtaaacaggattcaatttgtgactcaaccattaatactttgtgacactggctaatttatttcacttctggatgtcggttatgttttttttgagacaggatctcgctctgctgtcacccggcctggagttcagtggagggatctctgcaccgtcaacttcctgggctatcaagcgatcctcccacctcagcctccctggtagttgggaccacaggtgcccgccatcatgtccggctgatttgtaaaatttcttttgtagagatggtgaccttgctctgtggcccaggctggtctcgaactcctggactcaagcgatcctcctgcctgggcctcctaaagattcagctgcttttggatcaaccgatcgccttaagaccttttaactcgaacacctgtcacatcctaggatccgcgaaggactgaaacagagtttctgaagcgtccctcggcgcagtagctccgctccacctcccattcgcgctaccaccgcggccgcagccccaggagtcgccgcggagccagcgtcgccctccagctgttgcgcgtcggaagccggaagcagggactgagcgacagactaggaaacgccggtttctccggggctccccagcgccccacctttaccccggaggccgccctcttccatttgctcttgggcgtcagggcggtaccccactccgctcgaccctttggatccgctcgcacttcctcccgtccagagtcaaaggccccggaagtgacgtttacgcgccgcgcgtaaacgtgcgttcgctggcggtgccgggggcggggcgagcaggagggtgggtgtgaggcgggagctggccgcggagcccagacctacccgggcgaagcgggcgagcggtggtttggacgccggcggagacgcgggcgagtggttagcaggaagaagatgagccttaagtctgaacgccgaggaattcatgtggatcaatcggatctcctgtgcaagaaaggatgtggttactacggcaaccctgcctggcagggtttctgctccaagtgctggagggaagagtaccacaaagccaggcagaagcagattcaggaggactgggagctggcggagcgactccagcgggaggaagaagaggcctttgccagcagtcagagcagccaaggggcccaatccctcacattctccaagtttgaagaaaagaaaaccaacgagaagacccgcaaggttaccacagtgaagaaattcttcagtgcatcttccagggtcggatcaaagaaggaaattcaggaagcaaaagctcccagtccttccataaaccggcaaaccagcattgaaacggatagagtgtctaaggagttcatagaatttctcaagaccttccacaagacaggccaagaaatctataaacagaccaagctgtttttggaaggaatgcattacaaaagggatctaagcattgaagaacagtcagagtgtgctcaggatttctaccacaatgtggccgaaaggatgcaaactcgtgggaaagtgcctccagaaagagtcgagaagataatggatcagattgaaaagtacatcatgactcgtctctataaatatgtattctgtccagaaactactgatgatgagaagaaagatcttgccattcaaaagagaatcagagccctgcgctgggttacgcctcagatgctgtgtgtccctgttaatgaagacatcccagaagtgtctgatatggtggtgaaggcgatcacagatatcattgaaatggattccaagcgtgtgcctcgagacaagctggcctgcatcaccaagtgcagcaagcacatcttcaatgccatcaagatcaccaagaatgagccggcgtcagcggatgacttcctccccaccctcatctacattgttttgaagggcaaccccccacgccttcagtctaatatccagtatatcacgcgcttctgcaatccaagccgactgatgactggagaggatggctactatttcaccaatctgtgctgtgctgtggctttcattgagaagctagacgcccagtctttgaatctaagtcaggaggattttgatcgctacatgtctggccagacctctcccaggaagcaagaagctgagagttggtctcctgatgcttgcttaggcgtcaagcaaatgtataagaacttggatctcttgtctcagttgaatgaacgacaagaaaggatcatgaatgaagccaagaaactggaaaaagacctcatagattggacagatggaattgcaagagaagttcaagacatcgttgagaaatacccactggaaattaagcctccgaatcaaccgttagcagctattgactctgaaaacgttgaaaatgataaacttcctccaccactgcaacctcaagtttatgcaggatgatcacaatttagtggagagtatttatttgagcctaaattgtaggtagcccttactacactcaactgattgggatctagaatgtaactaaattgcttataaatgtcagagcattttttaaaggtacagtatatggggattgtttcgtttttcctagcaggggaaccttagttaataataaaatactacttatttgagttactgatacagattcatttaaggcttgtgtgcaaattttgtctcaatcttttttccctccatgattttcctatgtgcttcctctggcattcactgtggttttggtaaataattgccttttaaaggattaaacaaatgaatgctacaaagtgtatgttcaagaaaattaaatggtaccactcttccacagtttggaataattttataattgtaaagatagaaattatattgataagtaaatatgtaaaattgtaaatatgtaaaaaaaagaatggtgtctgctgtgcatggcattttatatgttaattttttagtttaaaatgaagtatattgaatgtttgcctttagcaccattttatttggtttgtcccactaaaatgactcgagaagtgtttagacaaactccccttaagatgtgcactccatctttaagaacgtgttagccttaactttgaggttctatatagtcagagactatgacaccactaaggttcagaataaagtttaggccacataaaattgctgtttaatgtagtcgatggaagactttaaactatgcttctagcttatttttccctcattcattcagcaaatctctattgagttcttcagtgagaaggagcaggcactgggcctggaatggaaggcgggaatgaatgggcctctgatggtgagaggtgacggggtccctcagctgtgagatgcaaggggcgccttgcagcctccataatatacatttgactttgcaaacgtctagacatgttttctgaacctttttcaggacatttcaacctcgggactattcatattagtggcctgagaggtgtttgttgtggggccaccctgtgcatggtagaatgttcagcagcattcctgccatccatatccattaggtgccagtagcacccccgctagagctgtgaaaaattctctccagacatagtcagatgtctcctggggccatatcacccctccgttaagaaccactgatgtcttttacaaaccaggagttatcctcctggtggttaatatggtgtaaccaaagaatcttgcactcaatgcacagtgtgatgttaactaaaacgagttaaatatttaggaggcttgacagctacctgcattgtagaaccttttcttatctcagtggaaccttctataacctaaatataccattgatgattcttcttccattcagtgacatccacagattatgcagctatacttgtgaaatcgtgcatgaggccccagggcaccgttctagaacaacgtcacttcacacaggcagctgagaaaggttctcttgcttttccagtatcttcctaaggatggagcccaaaattgcagagcagtaactttggaataaaaccagggtgggtataaaacttcttattcttaaatttacatataagatctattaagcttgacacatctgtgtcatcacgcactgaagacaggaagcagttcactgagtcagctggttcccaagctcgcacagaaggtgataagttactatcaaatgccagtgagaatcttcttatagaataacctgggcccaagtgattttagtacaaaacttgcccttctttggtttaattttctatgtgcttttaggtgtgaatccagatatgcggtcttaattcctttggaaatacacagttcgtttagttactgtacactctgtttgttcaataaactgcatatcaacttcccacaaaagctgacttttttgggtctcttacatataaagtaggttattgagttgatttttttggaggtatctcatattggtcgaattcttctggtatggactcttgccttatatagaggcttctatttctcttaagtcagcatcaatacaacggccggagtttctgtttttgcaataagaagatgttggtattttatgtagggtaaatgtgactggaatacacctttggaacggaattctttatcaataaagtttcacaatccgtccctcttcca

SEQ ID NO: 436879 - DNA, 4834 bp, Homo sapiens
gcattcaggacgcagaggaattagtatttactgtttttaacattccttacatgggaatcacgtaaagaatcaggtaaacaggattcaatttgtgactcaaccattaatactttgtgacactggctaatttatttcacttctggatgtcggttatgttttttttgagacaggatctcgctctgctgtcacccggcctggagttcagtggagggatctctgcaccgtcaacttcctgggctatcaagcgatcctcccacctcagcctccctggtagttgggaccacaggtgcccgccatcatgtccggctgatttgtaaaatttcttttgtagagatggtgaccttgctctgtggcccaggctggtctcgaactcctggactcaagcgatcctcctgcctgggcctcctaaagattcagctgcttttggatcaaccgatcgccttaagaccttttaactcgaacacctgtcacatcctaggatccgcgaaggactgaaacagagtttctgaagcgtccctcggcgcagtagctccgctccacctcccattcgcgctaccaccgcggccgcagccccaggagtcgccgcggagccagcgtcgccctccagctgttgcgcgtcggaagccggaagcagggactgagcgacagactaggaaacgccggtttctccggggctccccagcgccccacctttaccccggaggccgccctcttccatttgctcttgggcgtcagggcggtaccccactccgctcgaccctttggatccgctcgcacttcctcccgtccagagtcaaaggccccggaagtgacgtttacgcgccgcgcgtaaacgtgcgttcgctggcggtgccgggggcggggcgagcaggagggtgggtgtgaggcgggagctggccgcggagcccagacctacccgggcgaagcgggcgagcggtggtttggacgccggcggagacgcgggcgagaaaactgtggatttagttactccactctgccatgtctttccaccactgcctgcacatttgagaccaaggatagagattgggaaaaattgatagttctcctgcctcagagtttggctcctgcactctcatttcagccatagctgcagacaaagcacacgattgctgggcactgtggctcaagagaaggaggagatgtggttagcaggaagaagatgagccttaagtctgaacgccgaggaattcatgtggatcaatcggatctcctgtgcaagaaaggatgtggttactacggcaaccctgcctggcagggtttctgctccaagtgctggagggaagagtaccacaaagccaggcagaagcagattcaggaggactgggagctggcggagcgactccagcgggaggaagaagaggcctttgccagcagtcagagcagccaaggggcccaatccctcacattctccaagtttgaagaaaagaaaaccaacgagaagacccgcaaggttaccacagtgaagaaattcttcagtgcatcttccagggtcggatcaaagaaggaaattcaggaagcaaaagctcccagtccttccataaaccggcaaaccagcattgaaacggatagagtgtctaaggagttcatagaatttctcaagaccttccacaagacaggccaagaaatctataaacagaccaagctgtttttggaaggaatgcattacaaaagggatctaagcattgaagaacagtcagagtgtgctcaggatttctaccacaatgtggccgaaaggatgcaaactcgtgggaaagtgcctccagaaagagtcgagaagataatggatcagattgaaaagtacatcatgactcgtctctataaatatgtattctgtccagaaactactgatgatgagaagaaagatcttgccattcaaaagagaatcagagccctgcgctgggttacgcctcagatgctgtgtgtccctgttaatgaagacatcccagaagtgtctgatatggtggtgaaggcgatcacagatatcattgaaatggattccaagcgtgtgcctcgagacaagctggcctgcatcaccaagtgcagcaagcacatcttcaatgccatcaagatcaccaagaatgagccggcgtcagcggatgacttcctccccaccctcatctacattgttttgaagggcaaccccccacgccttcagtctaatatccagtatatcacgcgcttctgcaatccaagccgactgatgactggagaggatggctactatttcaccaatctgtgctgtgctgtggctttcattgagaagctagacgcccagtctttgaatctaagtcaggaggattttgatcgctacatgtctggccagacctctcccaggaagcaagaagctgagagttggtctcctgatgcttgcttaggcgtcaagcaaatgtataagaacttggatctcttgtctcagttgaatgaacgacaagaaaggatcatgaatgaagccaagaaactggaaaaagacctcatagattggacagatggaattgcaagagaagttcaagacatcgttgagaaatacccactggaaattaagcctccgaatcaaccgttagcagctattgactctgaaaacgttgaaaatgataaacttcctccaccactgcaacctcaagtttatgcaggatgatcacaatttagtggagagtatttatttgagcctaaattgtaggtagcccttactacactcaactgattgggatctagaatgtaactaaattgcttataaatgtcagagcattttttaaaggtacagtatatggggattgtttcgtttttcctagcaggggaaccttagttaataataaaatactacttatttgagttactgatacagattcatttaaggcttgtgtgcaaattttgtctcaatcttttttccctccatgattttcctatgtgcttcctctggcattcactgtggttttggtaaataattgccttttaaaggattaaacaaatgaatgctacaaagtgtatgttcaagaaaattaaatggtaccactcttccacagtttggaataattttataattgtaaagatagaaattatattgataagtaaatatgtaaaattgtaaatatgtaaaaaaaagaatggtgtctgctgtgcatggcattttatatgttaattttttagtttaaaatgaagtatattgaatgtttgcctttagcaccattttatttggtttgtcccactaaaatgactcgagaagtgtttagacaaactccccttaagatgtgcactccatctttaagaacgtgttagccttaactttgaggttctatatagtcagagactatgacaccactaaggttcagaataaagtttaggccacataaaattgctgtttaatgtagtcgatggaagactttaaactatgcttctagcttatttttccctcattcattcagcaaatctctattgagttcttcagtgagaaggagcaggcactgggcctggaatggaaggcgggaatgaatgggcctctgatggtgagaggtgacggggtccctcagctgtgagatgcaaggggcgccttgcagcctccataatatacatttgactttgcaaacgtctagacatgttttctgaacctttttcaggacatttcaacctcgggactattcatattagtggcctgagaggtgtttgttgtggggccaccctgtgcatggtagaatgttcagcagcattcctgccatccatatccattaggtgccagtagcacccccgctagagctgtgaaaaattctctccagacatagtcagatgtctcctggggccatatcacccctccgttaagaaccactgatgtcttttacaaaccaggagttatcctcctggtggttaatatggtgtaaccaaagaatcttgcactcaatgcacagtgtgatgttaactaaaacgagttaaatatttaggaggcttgacagctacctgcattgtagaaccttttcttatctcagtggaaccttctataacctaaatataccattgatgattcttcttccattcagtgacatccacagattatgcagctatacttgtgaaatcgtgcatgaggccccagggcaccgttctagaacaacgtcacttcacacaggcagctgagaaaggttctcttgcttttccagtatcttcctaaggatggagcccaaaattgcagagcagtaactttggaataaaaccagggtgggtataaaacttcttattcttaaatttacatataagatctattaagcttgacacatctgtgtcatcacgcactgaagacaggaagcagttcactgagtcagctggttcccaagctcgcacagaaggtgataagttactatcaaatgccagtgagaatcttcttatagaataacctgggcccaagtgattttagtacaaaacttgcccttctttggtttaattttctatgtgcttttaggtgtgaatccagatatgcggtcttaattcctttggaaatacacagttcgtttagttactgtacactctgtttgttcaataaactgcatatcaacttcccacaaaagctgacttttttgggtctcttacatataaagtaggttattgagttgatttttttggaggtatctcatattggtcgaattcttctggtatggactcttgccttatatagaggcttctatttctcttaagtcagcatcaatacaacggccggagtttctgtttttgcaataagaagatgttggtattttatgtagggtaaatgtgactggaatacacctttggaacggaattctttatcaataaagtttcacaatccgtccctcttcca

SEQ ID NO: 436880 - DNA, 4418 bp, Homo sapiens
gcattcaggacgcagaggaattagtatttactgtttttaacattccttacatgggaatcacgtaaagaatcaggtaaacaggattcaatttgtgactcaaccattaatactttgtgacactggctaatttatttcacttctggatgtcggttatgttttttttgagacaggatctcgctctgctgtcacccggcctggagttcagtggagggatctctgcaccgtcaacttcctgggctatcaagcgatcctcccacctcagcctccctggtagttgggaccacaggtgcccgccatcatgtccggctgatttgtaaaatttcttttgtagagatggtgaccttgctctgtggcccaggctggtctcgaactcctggactcaagcgatcctcctgcctgggcctcctaaagattcagctgcttttggatcaaccgatcgccttaagaccttttaactcgaacacctgtcacatcctaggatccgcgaaggactgaaacagagtttctgaagcgtccctcggcgcagtagctccgctccacctcccattcgcgctaccaccgcggccgcagccccaggagtcgccgcggagccagcgtcgccctccagctgttgcgcgtcggaagccggaagcagggactgagcgacagactaggaaacgccggtttctccggggctccccagcgccccacctttaccccggaggccgccctcttccatttgctcttgggcgtcagggcggtaccccactccgctcgaccctttggatccgctcgcacttcctcccgtccagagtcaaaggccccggaagtgacgtttacgcgccgcgcgtaaacgtgcgttcgctggcggtgccgggggcggggcgagcaggagggtgggtgtgaggcgggagctggccgcggagcccagacctacccgggcgaagcgggcgagcggtggtttggacgccggcggagacgcgggcgagtggttagcaggaagaagatgagccttaagtctgaacgccgaggaattcatgtggatcaatcggatctcctgtgcaagaaaggatgtggttactacggcaaccctgcctggcagggtttctgctccaagtgctggagggaagagtaccacaaagccaggcagaagcagtccttccataaaccggcaaaccagcattgaaacggatagagtgtctaaggagttcatagaatttctcaagaccttccacaagacaggccaagaaatctataaacagaccaagctgtttttggaaggaatgcattacaaaagggatctaagcattgaagaacagtcagagtgtgctcaggatttctaccacaatgtggccgaaaggatgcaaactcgtgggaaagtgcctccagaaagagtcgagaagataatggatcagattgaaaagtacatcatgactcgtctctataaatatgtattctgtccagaaactactgatgatgagaagaaagatcttgccattcaaaagagaatcagagccctgcgctgggttacgcctcagatgctgtgtgtccctgttaatgaagacatcccagaagtgtctgatatggtggtgaaggcgatcacagatatcattgaaatggattccaagcgtgtgcctcgagacaagctggcctgcatcaccaagtgcagcaagcacatcttcaatgccatcaagatcaccaagaatgagccggcgtcagcggatgacttcctccccaccctcatctacattgttttgaagggcaaccccccacgccttcagtctaatatccagtatatcacgcgcttctgcaatccaagccgactgatgactggagaggatggctactatttcaccaatctgtgctgtgctgtggctttcattgagaagctagacgcccagtctttgaatctaagtcaggaggattttgatcgctacatgtctggccagacctctcccaggaagcaagaagctgagagttggtctcctgatgcttgcttaggcgtcaagcaaatgtataagaacttggatctcttgtctcagttgaatgaacgacaagaaaggatcatgaatgaagccaagaaactggaaaaagacctcatagattggacagatggaattgcaagagaagttcaagacatcgttgagaaatacccactggaaattaagcctccgaatcaaccgttagcagctattgactctgaaaacgttgaaaatgataaacttcctccaccactgcaacctcaagtttatgcaggatgatcacaatttagtggagagtatttatttgagcctaaattgtaggtagcccttactacactcaactgattgggatctagaatgtaactaaattgcttataaatgtcagagcattttttaaaggtacagtatatggggattgtttcgtttttcctagcaggggaaccttagttaataataaaatactacttatttgagttactgatacagattcatttaaggcttgtgtgcaaattttgtctcaatcttttttccctccatgattttcctatgtgcttcctctggcattcactgtggttttggtaaataattgccttttaaaggattaaacaaatgaatgctacaaagtgtatgttcaagaaaattaaatggtaccactcttccacagtttggaataattttataattgtaaagatagaaattatattgataagtaaatatgtaaaattgtaaatatgtaaaaaaaagaatggtgtctgctgtgcatggcattttatatgttaattttttagtttaaaatgaagtatattgaatgtttgcctttagcaccattttatttggtttgtcccactaaaatgactcgagaagtgtttagacaaactccccttaagatgtgcactccatctttaagaacgtgttagccttaactttgaggttctatatagtcagagactatgacaccactaaggttcagaataaagtttaggccacataaaattgctgtttaatgtagtcgatggaagactttaaactatgcttctagcttatttttccctcattcattcagcaaatctctattgagttcttcagtgagaaggagcaggcactgggcctggaatggaaggcgggaatgaatgggcctctgatggtgagaggtgacggggtccctcagctgtgagatgcaaggggcgccttgcagcctccataatatacatttgactttgcaaacgtctagacatgttttctgaacctttttcaggacatttcaacctcgggactattcatattagtggcctgagaggtgtttgttgtggggccaccctgtgcatggtagaatgttcagcagcattcctgccatccatatccattaggtgccagtagcacccccgctagagctgtgaaaaattctctccagacatagtcagatgtctcctggggccatatcacccctccgttaagaaccactgatgtcttttacaaaccaggagttatcctcctggtggttaatatggtgtaaccaaagaatcttgcactcaatgcacagtgtgatgttaactaaaacgagttaaatatttaggaggcttgacagctacctgcattgtagaaccttttcttatctcagtggaaccttctataacctaaatataccattgatgattcttcttccattcagtgacatccacagattatgcagctatacttgtgaaatcgtgcatgaggccccagggcaccgttctagaacaacgtcacttcacacaggcagctgagaaaggttctcttgcttttccagtatcttcctaaggatggagcccaaaattgcagagcagtaactttggaataaaaccagggtgggtataaaacttcttattcttaaatttacatataagatctattaagcttgacacatctgtgtcatcacgcactgaagacaggaagcagttcactgagtcagctggttcccaagctcgcacagaaggtgataagttactatcaaatgccagtgagaatcttcttatagaataacctgggcccaagtgattttagtacaaaacttgcccttctttggtttaattttctatgtgcttttaggtgtgaatccagatatgcggtcttaattcctttggaaatacacagttcgtttagttactgtacactctgtttgttcaataaactgcatatcaacttcccacaaaagctgacttttttgggtctcttacatataaagtaggttattgagttgatttttttggaggtatctcatattggtcgaattcttctggtatggactcttgccttatatagaggcttctatttctcttaagtcagcatcaatacaacggccggagtttctgtttttgcaataagaagatgttggtattttatgtagggtaaatgtgactggaatacacctttggaacggaattctttatcaataaagtttcacaatccgtccctcttcca

SEQ ID NO: 436881 - DNA, 3916 bp, Homo sapiens
ggctagcaggagggtgtgtgtggggcgggagcggacaacggagaccagacctactgcagccacgcgggcgagcggctgtgtggatgtcggcgaagccgcgggcgagggccttgggaactccaagacagaatggcccgaggcctggacactctctgaggacatctctgcaaaggccccagcggcccagatcactttgggaagcagtgacatccaacctgtatcaagtcttctaatctgtgaacatgtggttagcaggaagaagatgagccttaagtctgaacgccgaggaattcatgtggatcaatcggatctcctgtgcaagaaaggatgtggttactacggcaaccctgcctggcagggtttctgctccaagtgctggagggaagagtaccacaaagccaggcagaagcagattcaggaggactgggagctggcggagcgactccagcgggaggaagaagaggcctttgccagcagtcagagcagccaaggggcccaatccctcacattctccaagtttgaagaaaagaaaaccaacgagaagacccgcaaggttaccacagtgaagaaattcttcagtgcatcttccagggtcggatcaaagaaggaaattcaggaagcaaaagctcccagtccttccataaaccggcaaaccagcattgaaacggatagagtgtctaaggagttcatagaatttctcaagaccttccacaagacaggccaagaaatctataaacagaccaagctgtttttggaaggaatgcattacaaaagggatctaagcattgaagaacagtcagagtgtgctcaggatttctaccacaatgtggccgaaaggatgcaaactcgtgggaaagtgcctccagaaagagtcgagaagataatggatcagattgaaaagtacatcatgactcgtctctataaatatgtattctgtccagaaactactgatgatgagaagaaagatcttgccattcaaaagagaatcagagccctgcgctgggttacgcctcagatgctgtgtgtccctgttaatgaagacatcccagaagtgtctgatatggtggtgaaggcgatcacagatatcattgaaatggattccaagcgtgtgcctcgagacaagctggcctgcatcaccaagtgcagcaagcacatcttcaatgccatcaagatcaccaagaatgagccggcgtcagcggatgacttcctccccaccctcatctacattgttttgaagggcaaccccccacgccttcagtctaatatccagtatatcacgcgcttctgcaatccaagccgactgatgactggagaggatggctactatttcaccaatctgtgctgtgctgtggctttcattgagaagctagacgcccagtctttgaatctaagtcaggaggattttgatcgctacatgtctggccagacctctcccaggaagcaagaagctgagagttggtctcctgatgcttgcttaggcgtcaagcaaatgtataagaacttggatctcttgtctcagttgaatgaacgacaagaaaggatcatgaatgaagccaagaaactggaaaaagacctcatagattggacagatggaattgcaagagaagttcaagacatcgttgagaaatacccactggaaattaagcctccgaatcaaccgttagcagctattgactctgaaaacgttgaaaatgataaacttcctccaccactgcaacctcaagtttatgcaggatgatcacaatttagtggagagtatttatttgagcctaaattgtaggtagcccttactacactcaactgattgggatctagaatgtaactaaattgcttataaatgtcagagcattttttaaaggtacagtatatggggattgtttcgtttttcctagcaggggaaccttagttaataataaaatactacttatttgagttactgatacagattcatttaaggcttgtgtgcaaattttgtctcaatcttttttccctccatgattttcctatgtgcttcctctggcattcactgtggttttggtaaataattgccttttaaaggattaaacaaatgaatgctacaaagtgtatgttcaagaaaattaaatggtaccactcttccacagtttggaataattttataattgtaaagatagaaattatattgataagtaaatatgtaaaattgtaaatatgtaaaaaaaagaatggtgtctgctgtgcatggcattttatatgttaattttttagtttaaaatgaagtatattgaatgtttgcctttagcaccattttatttggtttgtcccactaaaatgactcgagaagtgtttagacaaactccccttaagatgtgcactccatctttaagaacgtgttagccttaactttgaggttctatatagtcagagactatgacaccactaaggttcagaataaagtttaggccacataaaattgctgtttaatgtagtcgatggaagactttaaactatgcttctagcttatttttccctcattcattcagcaaatctctattgagttcttcagtgagaaggagcaggcactgggcctggaatggaaggcgggaatgaatgggcctctgatggtgagaggtgacggggtccctcagctgtgagatgcaaggggcgccttgcagcctccataatatacatttgactttgcaaacgtctagacatgttttctgaacctttttcaggacatttcaacctcgggactattcatattagtggcctgagaggtgtttgttgtggggccaccctgtgcatggtagaatgttcagcagcattcctgccatccatatccattaggtgccagtagcacccccgctagagctgtgaaaaattctctccagacatagtcagatgtctcctggggccatatcacccctccgttaagaaccactgatgtcttttacaaaccaggagttatcctcctggtggttaatatggtgtaaccaaagaatcttgcactcaatgcacagtgtgatgttaactaaaacgagttaaatatttaggaggcttgacagctacctgcattgtagaaccttttcttatctcagtggaaccttctataacctaaatataccattgatgattcttcttccattcagtgacatccacagattatgcagctatacttgtgaaatcgtgcatgaggccccagggcaccgttctagaacaacgtcacttcacacaggcagctgagaaaggttctcttgcttttccagtatcttcctaaggatggagcccaaaattgcagagcagtaactttggaataaaaccagggtgggtataaaacttcttattcttaaatttacatataagatctattaagcttgacacatctgtgtcatcacgcactgaagacaggaagcagttcactgagtcagctggttcccaagctcgcacagaaggtgataagttactatcaaatgccagtgagaatcttcttatagaataacctgggcccaagtgattttagtacaaaacttgcccttctttggtttaattttctatgtgcttttaggtgtgaatccagatatgcggtcttaattcctttggaaatacacagttcgtttagttactgtacactctgtttgttcaataaactgcatatcaacttcccacaaaagctgacttttttgggtctcttacatataaagtaggttattgagttgatttttttggaggtatctcatattggtcgaattcttctggtatggactcttgccttatatagaggcttctatttctcttaagtcagcatcaatacaacggccggagtttctgtttttgcaataagaagatgttggtattttatgtagggtaaatgtgactggaatacacctttggaacggaattctttatcaataaagtttcacaatccgtccctcttcca

SEQ ID NO: 436882 - DNA, 4109 bp, Homo sapiens
gcattcaggacgcagaggaattagtatttactgtttttaacattccttacatgggaatcacgtaaagaatcaggtaaacaggattcaatttgtgactcaaccattaatactttgtgacactggctaatttatttcacttctggatgtcggttatgttttttttgagacaggatctcgctctgctgtcacccggcctggagttcagtggagggatctctgcaccgtcaacttcctgggctatcaagcgatcctcccacctcagcctccctggtagttgggaccacaggtgcccgccatcatgtccggctgatttgtaaaatttcttttgtagagatggtgaccttgctctgtggcccaggctggtctcgaactcctggactcaagcgatcctcctgcctgggcctcctaaagattcagctgcttttggatcaaccgatcgccttaagaccttttaactcgaacacctgtcacatcctaggatccgcgaaggactgaaacagagtttctgaagcgtccctcggcgcagtagctccgctccacctcccattcgcgctaccaccgcggccgcagccccaggagtcgccgcggagccagcgtcgccctccagctgttgcgcgtcggaagccggaagcagggactgagcgacagactaggaaacgccggtttctccggggctccccagcgccccacctttaccccggaggccgccctcttccatttgctcttgggcgtcagggcggtaccccactccgctcgaccctttggatccgctcgcacttcctcccgtccagagtcaaaggccccggaagtgacgtttacgcgccgcgcgtaaacgtgcgttcgctggcggtgccgggggcggggcgagcaggagggtgggtgtgaggcgggagctggccgcggagcccagacctacccgggcgaagcgggcgagcggtggtttggacgccggcggagacgcgggcgaggatctaagcattgaagaacagtcagagtgtgctcaggatttctaccacaatgtggccgaaaggatgcaaactcgtgggaaagtgcctccagaaagagtcgagaagataatggatcagattgaaaagtacatcatgactcgtctctataaatatgtattctgtccagaaactactgatgatgagaagaaagatcttgccattcaaaagagaatcagagccctgcgctgggttacgcctcagatgctgtgtgtccctgttaatgaagacatcccagaagtgtctgatatggtggtgaaggcgatcacagatatcattgaaatggattccaagcgtgtgcctcgagacaagctggcctgcatcaccaagtgcagcaagcacatcttcaatgccatcaagatcaccaagaatgagccggcgtcagcggatgacttcctccccaccctcatctacattgttttgaagggcaaccccccacgccttcagtctaatatccagtatatcacgcgcttctgcaatccaagccgactgatgactggagaggatggctactatttcaccaatctgtgctgtgctgtggctttcattgagaagctagacgcccagtctttgaatctaagtcaggaggattttgatcgctacatgtctggccagacctctcccaggaagcaagaagctgagagttggtctcctgatgcttgcttaggcgtcaagcaaatgtataagaacttggatctcttgtctcagttgaatgaacgacaagaaaggatcatgaatgaagccaagaaactggaaaaagacctcatagattggacagatggaattgcaagagaagttcaagacatcgttgagaaatacccactggaaattaagcctccgaatcaaccgttagcagctattgactctgaaaacgttgaaaatgataaacttcctccaccactgcaacctcaagtttatgcaggatgatcacaatttagtggagagtatttatttgagcctaaattgtaggtagcccttactacactcaactgattgggatctagaatgtaactaaattgcttataaatgtcagagcattttttaaaggtacagtatatggggattgtttcgtttttcctagcaggggaaccttagttaataataaaatactacttatttgagttactgatacagattcatttaaggcttgtgtgcaaattttgtctcaatcttttttccctccatgattttcctatgtgcttcctctggcattcactgtggttttggtaaataattgccttttaaaggattaaacaaatgaatgctacaaagtgtatgttcaagaaaattaaatggtaccactcttccacagtttggaataattttataattgtaaagatagaaattatattgataagtaaatatgtaaaattgtaaatatgtaaaaaaaagaatggtgtctgctgtgcatggcattttatatgttaattttttagtttaaaatgaagtatattgaatgtttgcctttagcaccattttatttggtttgtcccactaaaatgactcgagaagtgtttagacaaactccccttaagatgtgcactccatctttaagaacgtgttagccttaactttgaggttctatatagtcagagactatgacaccactaaggttcagaataaagtttaggccacataaaattgctgtttaatgtagtcgatggaagactttaaactatgcttctagcttatttttccctcattcattcagcaaatctctattgagttcttcagtgagaaggagcaggcactgggcctggaatggaaggcgggaatgaatgggcctctgatggtgagaggtgacggggtccctcagctgtgagatgcaaggggcgccttgcagcctccataatatacatttgactttgcaaacgtctagacatgttttctgaacctttttcaggacatttcaacctcgggactattcatattagtggcctgagaggtgtttgttgtggggccaccctgtgcatggtagaatgttcagcagcattcctgccatccatatccattaggtgccagtagcacccccgctagagctgtgaaaaattctctccagacatagtcagatgtctcctggggccatatcacccctccgttaagaaccactgatgtcttttacaaaccaggagttatcctcctggtggttaatatggtgtaaccaaagaatcttgcactcaatgcacagtgtgatgttaactaaaacgagttaaatatttaggaggcttgacagctacctgcattgtagaaccttttcttatctcagtggaaccttctataacctaaatataccattgatgattcttcttccattcagtgacatccacagattatgcagctatacttgtgaaatcgtgcatgaggccccagggcaccgttctagaacaacgtcacttcacacaggcagctgagaaaggttctcttgcttttccagtatcttcctaaggatggagcccaaaattgcagagcagtaactttggaataaaaccagggtgggtataaaacttcttattcttaaatttacatataagatctattaagcttgacacatctgtgtcatcacgcactgaagacaggaagcagttcactgagtcagctggttcccaagctcgcacagaaggtgataagttactatcaaatgccagtgagaatcttcttatagaataacctgggcccaagtgattttagtacaaaacttgcccttctttggtttaattttctatgtgcttttaggtgtgaatccagatatgcggtcttaattcctttggaaatacacagttcgtttagttactgtacactctgtttgttcaataaactgcatatcaacttcccacaaaagctgacttttttgggtctcttacatataaagtaggttattgagttgatttttttggaggtatctcatattggtcgaattcttctggtatggactcttgccttatatagaggcttctatttctcttaagtcagcatcaatacaacggccggagtttctgtttttgcaataagaagatgttggtattttatgtagggtaaatgtgactggaatacacctttggaacggaattctttatcaataaagtttcacaatccgtccctcttcca

SEQ ID NO: 436883 - DNA, 1811 bp, Homo sapiens
gcattcaggacgcagaggaattagtatttactgtttttaacattccttacatgggaatcacgtaaagaatcaggtaaacaggattcaatttgtgactcaaccattaatactttgtgacactggctaatttatttcacttctggatgtcggttatgttttttttgagacaggatctcgctctgctgtcacccggcctggagttcagtggagggatctctgcaccgtcaacttcctgggctatcaagcgatcctcccacctcagcctccctggtagttgggaccacaggtgcccgccatcatgtccggctgatttgtaaaatttcttttgtagagatggtgaccttgctctgtggcccaggctggtctcgaactcctggactcaagcgatcctcctgcctgggcctcctaaagattcagctgcttttggatcaaccgatcgccttaagaccttttaactcgaacacctgtcacatcctaggatccgcgaaggactgaaacagagtttctgaagcgtccctcggcgcagtagctccgctccacctcccattcgcgctaccaccgcggccgcagccccaggagtcgccgcggagccagcgtcgccctccagctgttgcgcgtcggaagccggaagcagggactgagcgacagactaggaaacgccggtttctccggggctccccagcgccccacctttaccccggaggccgccctcttccatttgctcttgggcgtcagggcggtaccccactccgctcgaccctttggatccgctcgcacttcctcccgtccagagtcaaaggccccggaagtgacgtttacgcgccgcgcgtaaacgtgcgttcgctggcggtgccgggggcggggcgagcaggagggtgggtgtgaggcgggagctggccgcggagcccagacctacccgggcgaagcgggcgagcggtggtttggacgccggcggagacgcgggcgaggtacggagcggacggactggggctgagagctgctcggctctcagctacaggagcggggcggcggggcgtctcgggctgggggtggcagggcggtcggtccgtgccatccgcgcggctggggcagttgcgcgtcggtgcctcccgctgtccttcgtcccacattccgtctccgtcagcgccgccttccccgttccaggccgccctcggctcccttaatcctcagagtgcggcctctccgtcccagacgctagttgccgggatctccagcgccagccgagccccgacggcctgacgcggagcatttcctggccgcctccctctccggcggctcccctcgccccggctcccaccttccgtccaggccgctggctccgaagcagcgtctgtggtcgcacggggcccctcccacaacctccccggaaagcgctggtatgggacgctcggacccagaccacagcccccggccgcggcaggggcgcggggacttgatcccacgtcaccctagggggcagaagtgtcccggagttgggaggggatttgaagcctgtggtcctgacttccaccccgtggctgagggcgaggctgcggggccggggttaggagcagaagtccctgcttccgaaccgtctgggaggagagccgagggatgcccatcacggcagtttagggagagagagggagggactctgccgctttggaggctaggtcataggcagctggcggtgtctcagcgcgggtgaccaatccttgcggttgggaaatgtgtcgtgggcgcccgtgggctcgttttgcctttgagattaggtaggaaattttcccaggacgagtttaccggagcacctt

SEQ ID NO: 436884 - DNA, 846 bp, Homo sapiens
  misc_feature (762)..(762): n is a, c, g, or t
gcattcaggacgcagaggaattagtatttactgtttttaacattccttacatgggaatcacgtaaagaatcaggtaaacaggattcaatttgtgactcaaccattaatactttgtgacactggctaatttatttcacttctggatgtcggttatgttttttttgagacaggatctcgctctgctgtcacccggcctggagttcagtggagggatctctgcaccgtcaacttcctgggctatcaagcgatcctcccacctcagcctccctggtagttgggaccacaggtgcccgccatcatgtccggctgatttgtaaaatttcttttgtagagatggtgaccttgctctgtggcccaggctggtctcgaactcctggactcaagcgatcctcctgcctgggcctcctaaagattcagctgcttttggatcaaccgatcgccttaagaccttttaactcgaacacctgtcacatcctaggatccgcgaaggactgaaacagagtttctgaagcgtccctcggcgcagtagctccgctccacctcccattcgcgctaccaccgcggccgcagccccaggagtcgccgcggagccagcgtcgccctccagctgttgcgcgtcggaagccggaagcagggactgagcgacagactaggaaacgccggtttctccggggctccccagcgccccacctttaccccggaggccgccctcttccatttgctcttgggcgtcagggtgggtggggttgggaagggaccggngtgcgggagcggctgccgggagtgcctggggagccggggctgctgtagccgtggcgatcccctgatttggggaggttcaccaga

SEQ ID NO: 436885 - DNA, 1213 bp, Homo sapiens
agggggtgtgtgtgaggctggagcggactggggagcccagacctgccgagcgacgtgggcgagcggtgacctggaccacggcgcagacgcgggcgagctgcggctcggacgccagcggacacgcgggcgagatcactttgggaagcagtgacatccaacctgtatcaagtcttctaatctgtgaacatggctggagtgcagtgtcgtgatcacagcccactgcagcctcgacctcccgggctgaagggatcctcgcacctcagcctcctgagtagctgagactataggctggagtaccatgacaggatcctagctcactgcatcctcaaactcatgggctcaagtgattctcctgctttagtctcccgagtagctgggactacagagatgggtctcggctgtgttacctaagctggagtgcagtggctattcccagcacaatcatagtgcactacagtctccaactcctgggttcaggtgctccttgtgcctccgcctcctgaatagctgggattgcaggcatgtgccatcatgcctggctatgtgccttcaaaaagactacagttgtggatggagtgttttatcaatattagttggtttatgattgtgtttagttccatatcctagctgattttctatctgttctgtccattcttgaagagtccaactataattttgagtttgtctatttctcctcaagttctatatttgaggtctgtttttagatgtgtacacattttaaatggtgttgggtctttaccattatgtaatgtccctcttaatctattgtaaatttccttgctttgaggtatagtttgtcttatgtaaatataatcagttcagttttcctttgaccagcatttacgtaacatatctttttccatttttaaacttataatctacctatattaaaatatatagtcaggccaggtgctgggattacaggcgtgagccactgcatgtggctgctctctgttttttatgcctcactgtttcctttcctgccttcttttgggttatttgactattgcttagtattcaattttaatttatcaattgattattttattatatctctttgtgtagtgttctttagtggtggctctaagaattacagtatgtacaccaaactttttactttctgcttagaattaatattttaccacttgtaaaatgtaggaacctggctatcatgtaggttcctttcccctgt

SEQ ID NO: 436886 - DNA, 511 bp, Homo sapiens
ggctagcaggagggtgtgtgtggggcgggagcggacaacggagaccagacctactgcagccacgcgggcgagcggctgtgtggatgtcggcgaagccgcgggcgagggccttgggaactccaagacagaatggcccgaggcctggacactctctgaggacatctctgcaaaggccccagcggcccagatcactttgggaagcagtgacatccaacctgtatcaagtcttctaatctgtgaacatgagatgggtctcggctgtgttacctaagctggagtgcagtggctattcccagcacaatcatagtgcactacagtctccaactcctgggttcaggtgctccttgtgcctccgcctcctgaatagctgggattcaccatgctcagctaatttttgtatgtttaatagagacgaggttttgccatgttggccaggctggtctcaaactcctgccctcaggtgatccacccgcctcagcctcccaaagtgctgggattataggtgtgagcc

SEQ ID NO: 436887 - DNA, 513 bp, Homo sapiens
gtgacactctgtctcaaaaacaaccaaaaaaaggatcctatttatcctttaagacctcacccaaacatcaccgttgtaaagcctcgtcagactcccccagcagattgagttgttctttcctgtgttctcacagcactcaacttttactctctgatgtagcagctgtcccattctgtagcagttgtttacttacctttttgtctgttccagccttgagcttgttagggaaaaggattagacttgatttctttcatgtaaccctagagcagtagctgaatgagtatgagaagaccccatttgaaatctgtagtgcatgaagagccgtccatcctgtagcaatgtgagacctcagactgatttggcatatttagtctctaggtctaaaatctttagatcctcctgaattaatggagtaataaccttcacatacagagaaaccttggagaatatctaggtcattctaatcctctcttgaattgcagactccagcgggaggaagaagaggcctttgcc

SEQ ID NO: 436888 - DNA, 183 bp, Homo sapiens
gatgagaagaaagatcttgccattcaaaagagaatcaggtagttgcttattttgttttgctttgtagttactaccttctaatggaagaacacactggggggaaaataatgcacctgtgtttcaaaccttaagggaaagcaatagctcatgttcctgcttccttagagtggaagcagctctgtt

SEQ ID NO: 436889 - DNA, 283 bp, Homo sapiens
gtttgttttgtttactttagcttctgttttaaatggtctgtgatcaaaagatttttacaaatcgactcgagtatgcatagctttcctaatatgactgtattaacgtcctcttcttgtagtgctgtgctgtggctttcattgagaagctagacgcccagtctttgaatctaagtcaggaggattttgatcgctacatgtctggccagacctctcccaggaagcaagaagctgagagttggtctcctgatgcttgcttaggcgtcaagcaaatgtataagaactt

SEQ ID NO: 436890 - DNA, 723 bp, Homo sapiens
agggggtgtgtgtgaggctggagcggactggggagcccagacctgccgagcgacgtgggcgagcggtgacctggaccacggcgcagacgcgggcgagctgcggctcggacgccagcggacacgcgggcgagatgtttgaagtgaggccaggcatgttggctcacgcctgtaatcccagcactttcggaggccaaggtgggagaatcacttgaggctaggagttggagaccagcctgggcaacatagcaagactgcatctctacaaaaaaaaagaaaagattcttgaagtgaatgtatactcatttcctggttgtttctttctgtaaggatgtctgacccagctaatttgtaaacaggaattctgcactcatttctgtttttgcattctcaaccccagttgggcacacaagtgtttaatgagtatttaactgatttgataagaataaattcattgatttctttgatttttgttgctggttttcagtgaacaaaatgttaccagtacttactcattgtgatgtctacatatacaactaagattctgtttacctatgtcagtctctggctagagacatagaatttcagtcttgactgtgtgagtttaatttctggcacgtggggttttattggctgcagagcaaacatctctagcagagatgacctatccctcaaatgtaggaaatacctgtgtaaacctaacacctgtgactcagaatagaaatg

SEQ ID NO: 436891 - DNA, 4859 bp, Homo sapiens
gcattcaggacgcagaggaattagtatttactgtttttaacattccttacatgggaatcacgtaaagaatcaggtaaacaggattcaatttgtgactcaaccattaatactttgtgacactggctaatttatttcacttctggatgtcggttatgttttttttgagacaggatctcgctctgctgtcacccggcctggagttcagtggagggatctctgcaccgtcaacttcctgggctatcaagcgatcctcccacctcagcctccctggtagttgggaccacaggtgcccgccatcatgtccggctgatttgtaaaatttcttttgtagagatggtgaccttgctctgtggcccaggctggtctcgaactcctggactcaagcgatcctcctgcctgggcctcctaaagattcagctgcttttggatcaaccgatcgccttaagaccttttaactcgaacacctgtcacatcctaggatccgcgaaggactgaaacagagtttctgaagcgtccctcggcgcagtagctccgctccacctcccattcgcgctaccaccgcggccgcagccccaggagtcgccgcggagccagcgtcgccctccagctgttgcgcgtcggaagccggaagcagggactgagcgacagactaggaaacgccggtttctccggggctccccagcgccccacctttaccccggaggccgccctcttccatttgctcttgggcgtcagggcggtaccccactccgctcgaccctttggatccgctcgcacttcctcccgtccagagtcaaaggccccggaagtgacgtttacgcgccgcgcgtaaacgtgcgttcgctggcggtgccgggggcggggcgagcaggagggtgggtgtgaggcgggagctggccgcggagcccagacctacccgggcgaagcgggcgagcggtggtttggacgccggcggagacgcgggcgagtggttagcaggaagaagatgagccttaagtctgaacgccgaggaattcatgtggatcaatcggatctcctgtgcaagaaaggatgtggttactacggcaaccctgcctggcagggtttctgctccaagtgctggagggaagagtaccacaaagccaggcagaagcagattcaggaggactgggagctggcggagcgactccagcgggaggaagaagaggcctttgccagcagtcagagcagccaaggggcccaatccctcacattctccaagtttgaagaaaagaaaaccaacgagaagacccgcaaggttaccacagtgaagaaattcttcagtgcatcttccagggtcggatcaaagaaggaaattcaggaagcaaaagctcccagtccttccataaaccggcaaaccagcattgaaacggatagagtgtctaaggagttcatagaatttctcaagaccttccacaagacaggccaagaaatctataaacagaccaagctgtttttggaaggaatgcattacaaaagggatctaagcattgaagaacagtcagagtgtgctcaggatttctaccacaatgtggccgaaaggatgcaaactcgtgggaaagtgcctccagaaagagtcgagaagataatggatcagattgaaaagtacatcatgactcgtctctataaatatgtattctgtccagaaactactgatgatgagaagaaagatcttgccattcaaaagagaatcagagccctgcgctgggttacgcctcagatgctgtgtgtccctgttaatgaagacatcccagaagtgtctgatatggtggtgaaggcgatcacagatatcattgaaatggattccaagcgtgtgcctcgagacaagctggcctgcatcaccaagtgcagcaagcacatcttcaatgccatcaagatcaccaagaatgagccggcgtcagcggatgacttcctccccaccctcatctacattgttttgaagggcaaccccccacgccttcagtctaatatccagtatatcacgcgcttctgcaatccaagccgactgatgactggagaggatggctactatttcaccaatctgtgctgtgctgtggctttcattgagaagctagacgcccagtctttgaatctaagtcaggaggattttgatcgctacatgtctggccagacctctcccaggaagcaagaagctgagagttggtctcctgatgcttgcttaggcgtcaagcaaatgtataagaacttggatctcttgtctcagttgaatgaacgacaagaaaggatcatgaatgaagccaagaaactggaaaaagacctcatagattggacagatggaattgcaagagaagttcaagacatcgttgagaaatacccactggaaattaagcctccgaatcaaccgttagcagctattgactctgaaaacgttgaaaatgataaacttcctccaccactgcaacctcaagtttatgcaggatgatcacaatttagtggagagtatttatttgagcctaaattgtaggtagcccttactacactcaactgattgggatctagaatgtaactaaattgcttataaatgtcagagcattttttaaaggtacagtatatggggattgtttcgtttttcctagcaggggaaccttagttaataataaaatactacttatttgagttactgatacagattcatttaaggcttgtgtgcaaattttgtctcaatcttttttccctccatgattttcctatgtgcttcctctggcattcactgtggttttggtaaataattgccttttaaaggattaaacaaatgaatgctacaaagtgtatgttcaagaaaattaaatggtaccactcttccacagtttggaataattttataattgtaaagatagaaattatattgataagtaaatatgtaaaattgtaaatatgtaaaaaaaagaatggtgtctgctgtgcatggcattttatatgttaattttttagtttaaaatgaagtatattgaatgtttgcctttagcaccattttatttggtttgtcccactaaaatgactcgagaagtgtttagacaaactccccttaagatgtgcactccatctttaagaacgtgttagccttaactttgaggttctatatagtcagagactatgacaccactaaggttcagaataaagtttaggccacataaaattgctgtttaatgtagtcgatggaagactttaaactatgcttctagcttatttttccctcattcattcagcaaatctctattgagttcttcagtgagaaggagcaggcactgggcctggaatggaaggcgggaatgaatgggcctctgatggtgagaggtgacggggtccctcagctgtgagatgcaaggggcgccttgcagcctccataatatacatttgactttgcaaacgtctagacatgttttctgaacctttttcaggacatttcaacctcgggactattcatattagtggcctgagaggtgtttgttgtggggccaccctgtgcatggtagaatgttcagcagcattcctgccatccatatccattaggtgccagtagcacccccgctagagctgtgaaaaattctctccagacatagtcagatgtctcctggggccatatcacccctccgttaagaaccactgatgtcttttacaaaccaggagttatcctcctggtggttaatatggtgtaaccaaagaatcttgcactcaatgcacagtgtgatgttaactaaaacgagttaaatatttaggaggcttgacagctacctgcattgtagaaccttttcttatctcagtggaaccttctataacctaaatataccattgatgattcttcttccattcagtgacatccacagattatgcagctatacttgtgaaatcgtgcatgaggccccagggcaccgttctagaacaacgtcacttcacacaggcagctgagaaaggttctcttgcttttccagtatcttcctaaggatggagcccaaaattgcagagcagtaactttggaataaaaccagggtgggtataaaacttcttattcttaaatttacatataagatctattaagcttgacacatctgtgtcatcacgcactgaagacaggaagcagttcactgagtcagctggttcccaagctcgcacagaaggtgataagttactatcaaatgccagtgagaatcttcttatagaataacctgggcccaagtgattttagtacaaaacttgcccttctttggtttaattttctatgtgcttttaggtgtgaatccagatatgcggtcttaattcctttggaaatacacagttcgtttagttactgtacactctgtttgttcaataaactgcatatcaacttcccacaaaagctgacttttttgggtctcttacatataaagtaggttattgagttgatttttttggaggtatctcatattggtcgaattcttctggtatggactcttgccttatatagaggcttctatttctcttaagtcagcatcaatacaacggccggagtttctgtttttgcaataagaagatgttggtattttatgtagggtaaatgtgactggaatacacctttggaacggaattctttatcaataaagtttcacaatccgtccctcttccaaaaattgatttggttctttcttaggaaaatatacattattattaatattctcatgctacagaggttttctggttaagctatacctaaaaatgaaacattagagacatttgtcagttaaaattaagaagacaagaatatttgctgtcaccacaatcaatcaaccttgttcttgcagttctaccaaggtactcagtcttcaaacagacataaaagtagagaa

SEQ ID NO: 436892 - DNA, 5068 bp, Homo sapiens
gcattcaggacgcagaggaattagtatttactgtttttaacattccttacatgggaatcacgtaaagaatcaggtaaacaggattcaatttgtgactcaaccattaatactttgtgacactggctaatttatttcacttctggatgtcggttatgttttttttgagacaggatctcgctctgctgtcacccggcctggagttcagtggagggatctctgcaccgtcaacttcctgggctatcaagcgatcctcccacctcagcctccctggtagttgggaccacaggtgcccgccatcatgtccggctgatttgtaaaatttcttttgtagagatggtgaccttgctctgtggcccaggctggtctcgaactcctggactcaagcgatcctcctgcctgggcctcctaaagattcagctgcttttggatcaaccgatcgccttaagaccttttaactcgaacacctgtcacatcctaggatccgcgaaggactgaaacagagtttctgaagcgtccctcggcgcagtagctccgctccacctcccattcgcgctaccaccgcggccgcagccccaggagtcgccgcggagccagcgtcgccctccagctgttgcgcgtcggaagccggaagcagggactgagcgacagactaggaaacgccggtttctccggggctccccagcgccccacctttaccccggaggccgccctcttccatttgctcttgggcgtcagggcggtaccccactccgctcgaccctttggatccgctcgcacttcctcccgtccagagtcaaaggccccggaagtgacgtttacgcgccgcgcgtaaacgtgcgttcgctggcggtgccgggggcggggcgagcaggagggtgggtgtgaggcgggagctggccgcggagcccagacctacccgggcgaagcgggcgagcggtggtttggacgccggcggagacgcgggcgaggtacggagcggacggactggggctgagagctgctcggctctcagctacaggagcggggcggcggggcgtctcgggctgggggtggcagggcggtcggtccgtgccatccgcgcggctggggcagttgcgcgtcggtgcctcccgctgtccttcgtcccacattccgtctccgtcagcgccgccttccccgttccaggccgccctcggctcccttaatcctcagagtgcggcctctccgtcccagacgctagttgccgggatctccagcgccagccgagccccgacggcctgacgcggagcatttcctggccgcctccctctccggcggctcccctcgccccggctcccaccttccgtccaggccgctggctccgaagcagcgtctgtggtcgcacggggcccctcccacaacctccccggaaagcgctgtggttagcaggaagaagatgagccttaagtctgaacgccgaggaattcatgtggatcaatcggatctcctgtgcaagaaaggatgtggttactacggcaaccctgcctggcagggtttctgctccaagtgctggagggaagagtaccacaaagccaggcagaagcagattcaggaggactgggagctggcggagcgactccagcgggaggaagaagaggcctttgccagcagtcagagcagccaaggggcccaatccctcacattctccaagtttgaagaaaagaaaaccaacgagaagacccgcaaggttaccacagtgaagaaattcttcagtgcatcttccagggtcggatcaaagaaggaaattcaggaagcaaaagctcccagtccttccataaaccggcaaaccagcattgaaacggatagagtgtctaaggagttcatagaatttctcaagaccttccacaagacaggccaagaaatctataaacagaccaagctgtttttggaaggaatgcattacaaaagggatctaagcattgaagaacagtcagagtgtgctcaggatttctaccacaatgtggccgaaaggatgcaaactcgtgggaaagtgcctccagaaagagtcgagaagataatggatcagattgaaaagtacatcatgactcgtctctataaatatgtattctgtccagaaactactgatgatgagaagaaagatcttgccattcaaaagagaatcagagccctgcgctgggttacgcctcagatgctgtgtgtccctgttaatgaagacatcccagaagtgtctgatatggtggtgaaggcgatcacagatatcattgaaatggattccaagcgtgtgcctcgagacaagctggcctgcatcaccaagtgcagcaagcacatcttcaatgccatcaagatcaccaagaatgagccggcgtcagcggatgacttcctccccaccctcatctacattgttttgaagggcaaccccccacgccttcagtctaatatccagtatatcacgcgcttctgcaatccaagccgactgatgactggagaggatggctactatttcaccaatctgtgctgtgctgtggctttcattgagaagctagacgcccagtctttgaatctaagtcaggaggattttgatcgctacatgtctggccagacctctcccaggaagcaagaagctgagagttggtctcctgatgcttgcttaggcgtcaagcaaatgtataagaacttggatctcttgtctcagttgaatgaacgacaagaaaggatcatgaatgaagccaagaaactggaaaaagacctcatagattggacagatggaattgcaagagaagttcaagacatcgttgagaaatacccactggaaattaagcctccgaatcaaccgttagcagctattgactctgaaaacgttgaaaatgataaacttcctccaccactgcaacctcaagtttatgcaggatgatcacaatttagtggagagtatttatttgagcctaaattgtaggtagcccttactacactcaactgattgggatctagaatgtaactaaattgcttataaatgtcagagcattttttaaaggtacagtatatggggattgtttcgtttttcctagcaggggaaccttagttaataataaaatactacttatttgagttactgatacagattcatttaaggcttgtgtgcaaattttgtctcaatcttttttccctccatgattttcctatgtgcttcctctggcattcactgtggttttggtaaataattgccttttaaaggattaaacaaatgaatgctacaaagtgtatgttcaagaaaattaaatggtaccactcttccacagtttggaataattttataattgtaaagatagaaattatattgataagtaaatatgtaaaattgtaaatatgtaaaaaaaagaatggtgtctgctgtgcatggcattttatatgttaattttttagtttaaaatgaagtatattgaatgtttgcctttagcaccattttatttggtttgtcccactaaaatgactcgagaagtgtttagacaaactccccttaagatgtgcactccatctttaagaacgtgttagccttaactttgaggttctatatagtcagagactatgacaccactaaggttcagaataaagtttaggccacataaaattgctgtttaatgtagtcgatggaagactttaaactatgcttctagcttatttttccctcattcattcagcaaatctctattgagttcttcagtgagaaggagcaggcactgggcctggaatggaaggcgggaatgaatgggcctctgatggtgagaggtgacggggtccctcagctgtgagatgcaaggggcgccttgcagcctccataatatacatttgactttgcaaacgtctagacatgttttctgaacctttttcaggacatttcaacctcgggactattcatattagtggcctgagaggtgtttgttgtggggccaccctgtgcatggtagaatgttcagcagcattcctgccatccatatccattaggtgccagtagcacccccgctagagctgtgaaaaattctctccagacatagtcagatgtctcctggggccatatcacccctccgttaagaaccactgatgtcttttacaaaccaggagttatcctcctggtggttaatatggtgtaaccaaagaatcttgcactcaatgcacagtgtgatgttaactaaaacgagttaaatatttaggaggcttgacagctacctgcattgtagaaccttttcttatctcagtggaaccttctataacctaaatataccattgatgattcttcttccattcagtgacatccacagattatgcagctatacttgtgaaatcgtgcatgaggccccagggcaccgttctagaacaacgtcacttcacacaggcagctgagaaaggttctcttgcttttccagtatcttcctaaggatggagcccaaaattgcagagcagtaactttggaataaaaccagggtgggtataaaacttcttattcttaaatttacatataagatctattaagcttgacacatctgtgtcatcacgcactgaagacaggaagcagttcactgagtcagctggttcccaagctcgcacagaaggtgataagttactatcaaatgccagtgagaatcttcttatagaataacctgggcccaagtgattttagtacaaaacttgcccttctttggtttaattttctatgtgcttttaggtgtgaatccagatatgcggtcttaattcctttggaaatacacagttcgtttagttactgtacactctgtttgttcaataaactgcatatcaacttcccacaaaagctgacttttttgggtctcttacatataaagtaggttattgagttgatttttttggaggtatctcatattggtcgaattcttctggtatggactcttgccttatatagaggcttctatttctcttaagtcagcatcaatacaacggccggagtttctgtttttgcaataagaagatgttggtattttatgtagggtaaatgtgactggaatacacctttggaacggaattctttatcaataaagtttcacaatccgtccctcttcca

SEQ ID NO: 436893 - DNA, 4369 bp, Homo sapiens
gcattcaggacgcagaggaattagtatttactgtttttaacattccttacatgggaatcacgtaaagaatcaggtaaacaggattcaatttgtgactcaaccattaatactttgtgacactggctaatttatttcacttctggatgtcggttatgttttttttgagacaggatctcgctctgctgtcacccggcctggagttcagtggagggatctctgcaccgtcaacttcctgggctatcaagcgatcctcccacctcagcctccctggtagttgggaccacaggtgcccgccatcatgtccggctgatttgtaaaatttcttttgtagagatggtgaccttgctctgtggcccaggctggtctcgaactcctggactcaagcgatcctcctgcctgggcctcctaaagattcagctgcttttggatcaaccgatcgccttaagaccttttaactcgaacacctgtcacatcctaggatccgcgaaggactgaaacagagtttctgaagcgtccctcggcgcagtagctccgctccacctcccattcgcgctaccaccgcggccgcagccccaggagtcgccgcggagccagcgtcgccctccagctgttgcgcgtcggaagccggaagcagggactgagcgacagactaggaaacgccggtttctccggggctccccagcgccccacctttaccccggaggccgccctcttccatttgctcttgggcgtcagggcggtaccccactccgctcgaccctttggatccgctcgcacttcctcccgtccagagtcaaaggccccggaagtgacgtttacgcgccgcgcgtaaacgtgcgttcgctggcggtgccgggggcggggcgagcaggagggtgggtgtgaggcgggagctggccgcggagcccagacctacccgggcgaagcgggcgagcggtggtttggacgccggcggagacgcgggcgagtggttagcaggaagaagatgagccttaagtctgaacgccgaggaattcatgtggatcaatcggatctcctgtgcaagaaaggatgtggttactacggcaaccctgcctggcagggtttctgctccaagtgctggagggaagagtaccacaaagccaggcagaagcagattcaggaggactgggagctggcggagcgactccagcgggaggaagaagaggcctttgccagcagtcagagcagccaaggggcccaatccctcacattctccaagtttgaagaaaagaaaaccaacgagaagacccgcaaggttaccacagtgaagaaattcttcagtgcatcttccagggtcggatcaaagaaggaaattcaggaagcaaaagctcccagtccttccataaaccggcaaaccagcattgaaacggatagagtgtctaaggagttcatagaatttctcaagaccttccacaagacaggccaagaaatctataaacagaccaagctgtttttggaaggaatgcattacaaaagggatctaagcattgaagaacagtcagagtgtgctcaggatttctaccacaatgtggccgaaaggatgcaaactcgtgggaaagtgcctccagaaagagtcgagaagataatggatcagattgaaaagtacatcatgactcgtctctataaatatgtattctgtccagaaactactgatgatgagaagaaagatcttgccattcaaaagagaatcagagccctgcgctgggttacgcctcagatgctgtgtgtccctgttaatgaagacatcccagaagtgtctgatatggtggtgaaggcgatcacagatatcattgaaatggattccaagcgtgtgcctcgagacaagctggcctgcatcaccaagtgcagcaagcacatcttcaatgccatcaagatcaccaagaatgagccggcgtcagcggatgacttcctccccaccctcatctacattgttttgaagggcaaccccccacgccttcagtctaatatccagtatatcacgcgcttctgcaatccaagccgactgatgactggagaggatggctactatttcaccaatctgtgctgtgctgtggctttcattgagaagctagacgcccagtctttgaatctaagtcaggaggattttgatcgctacatgtctggccagacctctcccaggaagcaagaagctgagagttggtctcctgatgcttgcttaggcgtcaagcaaatgtataagaacttggatctcttgtctcagttgaatgaacgacaagaaaggatcatgaatgaagccaagaaactggaaaaagacctcatagattggacagatggaattgcaagagaagttcaagacatcgttgagaaatacccactggaaattaagcctccgaatcaaccgttagcagctattgactctgaaaacgttgaaaatgataaacttcctccaccactgcaacctcaagtttatgcaggatgatcacaatttagtggagagtatttatttgagcctaaattgtaggtagcccttactacactcaactgattgggatctagaatgtaactaaattgcttataaatgtcagagcattttttaaaggtacagtatatggggattgtttcgtttttcctagcaggggaaccttagttaataataaaatactacttatttgagttactgatacagattcatttaaggcttgtgtgcaaattttgtctcaatcttttttccctccatgattttcctatgtgcttcctctggcattcactgtggttttggtaaataattgccttttaaaggattaaacaaatgaatgctacaaagtgtatgttcaagaaaattaaatggtaccactcttccacagtttggaataattttataattgtaaagatagaaattatattgataagtaaatatgtaaaattgtaaatatgtaaaaaaaagaatggtgtctgctgtgcatggcattttatatgttaattttttagtttaaaatgaagtatattgaatgtttgcctttagcaccattttatttggtttgtcccactaaaatgactcgagaagtgtttagacaaactccccttaagatgtgcactccatctttaagaacgtgttagccttaactttgaggttctatatagtcagagactatgacaccactaaggttcagaataaagtttaggccacataaaattgctgtttaatgtagtcgatggaagactttaaactatgcttctagcttatttttccctcattcattcagcaaatctctattgagttcttcagtgagaaggagcaggcactgggcctggaatggaaggcgggaatgaatgggcctctgatggtgagaggtgacggggtccctcagctgtgagatgcaaggggcgccttgcagcctccataatatacatttgactttgcaaacgtctagacatgttttctgaacctttttcaggacatttcaacctcgggactattcatattagtggcctgagaggtgtttgttgtggggccaccctgtgcatggtagaatgttcagcagcattcctgccatccatatccattaggtgccagtagcacccccgctagagctgtgaaaaattctctccagacatagtcagatgtctcctggggccatatcacccctccgttaagaaccactgatgtcttttacaaaccaggagttatcctcctggtggttaatatggtgtaaccaaagaatcttgcactcaatgcacagtgtgatgttaactaaaacgagttaaatatttaggaggcttgacagctacctgcattgtagaaccttttcttatctcagtggaaccttctataacctaaatataccattgatgattcttcttccattcagtgacatccacagattatgcagctatacttgtgaaatcgtgcatgaggccccagggcaccgttctagaacaacgtcacttcacacaggcagctgagaaaggttctcttgcttttccagtatcttcctaaggatggagcccaaaattgcagagcagtaactttggaataaaaccagggtgggtataaaacttcttattcttaaatttacatataagatctattaagcttgacacatctgtgtcatcacgcactgaagacaggaagcagttcactgagtcagctggttcccaagctcgcacagaaggtgataagttactatcaaatgccagtgagaatcttcttatagaataacctgggcccaagtgattttagtacaaaacttgcccttctttggtttaattttctatgtgcttttaggtgtgaatccagatatgcggtcttaattcctttggaaatacacagttcgtttagttactgtacactctgtttgttcaataaactgcatatcaacttcccaca

SEQ ID NO: 436894 - DNA, 4557 bp, Homo sapiens
gcattcaggacgcagaggaattagtatttactgtttttaacattccttacatgggaatcacgtaaagaatcaggtaaacaggattcaatttgtgactcaaccattaatactttgtgacactggctaatttatttcacttctggatgtcggttatgttttttttgagacaggatctcgctctgctgtcacccggcctggagttcagtggagggatctctgcaccgtcaacttcctgggctatcaagcgatcctcccacctcagcctccctggtagttgggaccacaggtgcccgccatcatgtccggctgatttgtaaaatttcttttgtagagatggtgaccttgctctgtggcccaggctggtctcgaactcctggactcaagcgatcctcctgcctgggcctcctaaagattcagctgcttttggatcaaccgatcgccttaagaccttttaactcgaacacctgtcacatcctaggatccgcgaaggactgaaacagagtttctgaagcgtccctcggcgcagtagctccgctccacctcccattcgcgctaccaccgcggccgcagccccaggagtcgccgcggagccagcgtcgccctccagctgttgcgcgtcggaagccggaagcagggactgagcgacagactaggaaacgccggtttctccggggctccccagcgccccacctttaccccggaggccgccctcttccatttgctcttgggcgtcagggcggtaccccactccgctcgaccctttggatccgctcgcacttcctcccgtccagagtcaaaggccccggaagtgacgtttacgcgccgcgcgtaaacgtgcgttcgctggcggtgccgggggcggggcgagcaggagggtgggtgtgaggcgggagctggccgcggagcccagacctacccgggcgaagcgggcgagcggtggtttggacgccggcggagacgcgggcgagtggttagcaggaagaagatgagccttaagtctgaacgccgaggaattcatgtggatcaatcggatctcctgtgcaagaaaggatgtggttactacggcaaccctgcctggcagggtttctgctccaagtgctggagggaagagtaccacaaagccaggcagaagcagattcaggaggactgggagctggcggagcgactccagcgggaggaagaagaggcctttgccagcagtcagagcagccaaggggcccaatccctcacattctccaagtttgaagaaaagaaaaccaacgagaagacccgcaaggttaccacagtgaagaaattcttcagtgcatcttccagggtcggatcaaagaaggaaattcaggaagcaaaagctcccagtccttccataaaccggcaaaccagcattgaaacggatagagtgtctaaggagttcatagaatttctcaagaccttccacaagacaggccaagaaatctataaacagaccaagctgtttttggaaggaatgcattacaaaaggtgcctccagaaagagtcgagaagataatggatcagattgaaaagtacatcatgactcgtctctataaatatgtattctgtccagaaactactgatgatgagaagaaagatcttgccattcaaaagagaatcagagccctgcgctgggttacgcctcagatgctgtgtgtccctgttaatgaagacatcccagaagtgtctgatatggtggtgaaggcgatcacagatatcattgaaatggattccaagcgtgtgcctcgagacaagctggcctgcatcaccaagtgcagcaagcacatcttcaatgccatcaagatcaccaagaatgagccggcgtcagcggatgacttcctccccaccctcatctacattgttttgaagggcaaccccccacgccttcagtctaatatccagtatatcacgcgcttctgcaatccaagccgactgatgactggagaggatggctactatttcaccaatctgtgctgtgctgtggctttcattgagaagctagacgcccagtctttgaatctaagtcaggaggattttgatcgctacatgtctggccagacctctcccaggaagcaagaagctgagagttggtctcctgatgcttgcttaggcgtcaagcaaatgtataagaacttggatctcttgtctcagttgaatgaacgacaagaaaggatcatgaatgaagccaagaaactggaaaaagacctcatagattggacagatggaattgcaagagaagttcaagacatcgttgagaaatacccactggaaattaagcctccgaatcaaccgttagcagctattgactctgaaaacgttgaaaatgataaacttcctccaccactgcaacctcaagtttatgcaggatgatcacaatttagtggagagtatttatttgagcctaaattgtaggtagcccttactacactcaactgattgggatctagaatgtaactaaattgcttataaatgtcagagcattttttaaaggtacagtatatggggattgtttcgtttttcctagcaggggaaccttagttaataataaaatactacttatttgagttactgatacagattcatttaaggcttgtgtgcaaattttgtctcaatcttttttccctccatgattttcctatgtgcttcctctggcattcactgtggttttggtaaataattgccttttaaaggattaaacaaatgaatgctacaaagtgtatgttcaagaaaattaaatggtaccactcttccacagtttggaataattttataattgtaaagatagaaattatattgataagtaaatatgtaaaattgtaaatatgtaaaaaaaagaatggtgtctgctgtgcatggcattttatatgttaattttttagtttaaaatgaagtatattgaatgtttgcctttagcaccattttatttggtttgtcccactaaaatgactcgagaagtgtttagacaaactccccttaagatgtgcactccatctttaagaacgtgttagccttaactttgaggttctatatagtcagagactatgacaccactaaggttcagaataaagtttaggccacataaaattgctgtttaatgtagtcgatggaagactttaaactatgcttctagcttatttttccctcattcattcagcaaatctctattgagttcttcagtgagaaggagcaggcactgggcctggaatggaaggcgggaatgaatgggcctctgatggtgagaggtgacggggtccctcagctgtgagatgcaaggggcgccttgcagcctccataatatacatttgactttgcaaacgtctagacatgttttctgaacctttttcaggacatttcaacctcgggactattcatattagtggcctgagaggtgtttgttgtggggccaccctgtgcatggtagaatgttcagcagcattcctgccatccatatccattaggtgccagtagcacccccgctagagctgtgaaaaattctctccagacatagtcagatgtctcctggggccatatcacccctccgttaagaaccactgatgtcttttacaaaccaggagttatcctcctggtggttaatatggtgtaaccaaagaatcttgcactcaatgcacagtgtgatgttaactaaaacgagttaaatatttaggaggcttgacagctacctgcattgtagaaccttttcttatctcagtggaaccttctataacctaaatataccattgatgattcttcttccattcagtgacatccacagattatgcagctatacttgtgaaatcgtgcatgaggccccagggcaccgttctagaacaacgtcacttcacacaggcagctgagaaaggttctcttgcttttccagtatcttcctaaggatggagcccaaaattgcagagcagtaactttggaataaaaccagggtgggtataaaacttcttattcttaaatttacatataagatctattaagcttgacacatctgtgtcatcacgcactgaagacaggaagcagttcactgagtcagctggttcccaagctcgcacagaaggtgataagttactatcaaatgccagtgagaatcttcttatagaataacctgggcccaagtgattttagtacaaaacttgcccttctttggtttaattttctatgtgcttttaggtgtgaatccagatatgcggtcttaattcctttggaaatacacagttcgtttagttactgtacactctgtttgttcaataaactgcatatcaacttcccacaaaagctgacttttttgggtctcttacatataaagtaggttattgagttgatttttttggaggtatctcatattggtcgaattcttctggtatggactcttgccttatatagaggcttctatttctcttaagtcagcatcaatacaacggccggagtttctgtttttgcaataagaagatgttggtattttatgtagggtaaatgtgactggaatacacctttggaacggaattctttatcaataaagtttcacaatccgtccctcttcca

SEQ ID NO: 436895 - DNA, 3359 bp, Homo sapiens
cacgcgtcggcacgcgtcgctgtgcatcttccagggtcggatcaaagaaggaaattcaggaagcaaaagctcccagtccttccataaaccggcaaaccagcattgaaacggatagagtgtctaaggagttcatagaatttctcaagaccttccacaagacaggccaagaaatctataaacagaccaagctgtttttggaaggaatgcattacaaaagggatctaagcattgaagaacagtcagagtgtgctcaggatttctaccacaatgtggccgaaaggatgcaaactcgtgggaaagtgcctccagaaagagtcgagaagataatggatcagattgaaaagtacatcatgactcgtctctataaatatgtattctgtccagaaactactgatgatgagaagaaagatcttgccattcaaaagagaatcagagccctgcgctgggttacgcctcagatgctgtgtgtccctgttaatgaagacatcccagaagtgtctgatatggtggtgaaggcgatcacagatatcattgaaatggattccaagcgtgtgcctcgagacaagctggcctgcatcaccaagtgcagcaagcacatcttcaatgccatcaagatcaccaagaatgagccggcgtcagcggatgacttcctccccaccctcatctacattgttttgaagggcaaccccccacgccttcagtctaatatccagtatatcacgcgcttctgcaatccaagccgactgatgactggagaggatggctactatttcaccaatctgtgctgtgctgtggctttcattgagaagctagacgcccagtctttgaatctaagtcaggaggattttgatcgctacatgtctggccagacctctcccaggaagcaagaagctgagagttggtctcctgatgcttgcttaggcgtcaagcaaatgtataagaacttggatctcttgtctcagttgaatgaacgacaagaaaggatcatgaatgaagccaagaaactggaaaaagacctcatagattggacagatggaattgcaagagaagttcaagacatcgttgagaaatacccactggaaattaagcctccgaatcaaccgttagcagctattgactctgaaaacgttgaaaatgataaacttcctccaccactgcaacctcaagtttatgcaggatgatcacaatttagtggagagtatttatttgagcctaaattgtaggtagcccttactacactcaactgattgggatctagaatgtaactaaattgcttataaatgtcagagcattttttaaaggtacagtatatggggattgtttcgtttttcctagcaggggaaccttagttaataataaaatactacttatttgagttactgatacagattcatttaaggcttgtgtgcaaattttgtctcaatcttttttccctccatgattttcctatgtgcttcctctggcattcactgtggttttggtaaataattgccttttaaaggattaaacaaatgaatgctacaaagtgtatgttcaagaaaattaaatggtaccactcttccacagtttggaataattttataattgtaaagatagaaattatattgataagtaaatatgtaaaattgtaaatatgtaaaaaaaagaatggtgtctgctgtgcatggcattttatatgttaattttttagtttaaaatgaagtatattgaatgtttgcctttagcaccattttatttggtttgtcccactaaaatgactcgagaagtgtttagacaaactccccttaagatgtgcactccatctttaagaacgtgttagccttaactttgaggttctatatagtcagagactatgacaccactaaggttcagaataaagtttaggccacataaaattgctgtttaatgtagtcgatggaagactttaaactatgcttctagcttatttttccctcattcattcagcaaatctctattgagttcttcagtgagaaggagcaggcactgggcctggaatggaaggcgggaatgaatgggcctctgatggtgagaggtgacggggtccctcagctgtgagatgcaaggggcgccttgcagcctccataatatacatttgactttgcaaacgtctagacatgttttctgaacctttttcaggacatttcaacctcgggactattcatattagtggcctgagaggtgtttgttgtggggccaccctgtgcatggtagaatgttcagcagcattcctgccatccatatccattaggtgccagtagcacccccgctagagctgtgaaaaattctctccagacatagtcagatgtctcctggggccatatcacccctccgttaagaaccactgatgtcttttacaaaccaggagttatcctcctggtggttaatatggtgtaaccaaagaatcttgcactcaatgcacagtgtgatgttaactaaaacgagttaaatatttaggaggcttgacagctacctgcattgtagaaccttttcttatctcagtggaaccttctataacctaaatataccattgatgattcttcttccattcagtgacatccacagattatgcagctatacttgtgaaatcgtgcatgaggccccagggcaccgttctagaacaacgtcacttcacacaggcagctgagaaaggttctcttgcttttccagtatcttcctaaggatggagcccaaaattgcagagcagtaactttggaataaaaccagggtgggtataaaacttcttattcttaaatttacatataagatctattaagcttgacacatctgtgtcatcacgcactgaagacaggaagcagttcactgagtcagctggttcccaagctcgcacagaaggtgataagttactatcaaatgccagtgagaatcttcttatagaataacctgggcccaagtgattttagtacaaaacttgcccttctttggtttaattttctatgtgcttttaggtgtgaatccagatatgcggtcttaattcctttggaaatacacagttcgtttagttactgtacactctgtttgttcaataaactgcatatcaacttcccacaaaagctgacttttttgggtctcttacatataaagtaggttattgagttgatttttttggaggtatctcatattggtcgaattcttctggtatggactcttgccttatatagaggcttctatttctcttaagtcagcatcaatacaacggccggagtttctgtttttgcaataagaagatgttggtattttatgtagggtaaatgtgactggaatacacctttggaacggaattctttatcaataaagtttcacaatccgtccctcttcca

SEQ ID NO: 436896 - DNA, 1089 bp, Homo sapiens
ggctagcaggagggtgtgtgtggggcgggagcggacaacggagaccagacctactgcagccacgcgggcgagcggctgtgtggatgtcggcgaagccgcgggcgagggccttgggaactccaagacagaatggcccgaggcctggacactctctgaggacatctctgcaaaggccccagcggcccagatcactttgggaagcagtgacatccaacctgtatcaagtcttctaatctgtgaacatgagatgggtctcggctgtgttacctaagctggagtgcagtggctattcccagcacaatcatagtgcactacagtctccaactcctgggttcaggtgctccttgtgcctccgcctcctgaatagctgggattgcaggcatgtgccatcatgcctggctatgtgccttcaaaaagactacagttgtggatggagtgttttatcaatattagttggtttatgattgtgtttagttccatatcctagctgattttctatctgttctgtccattcttgaagagtccaactataattttgagtttgtctatttctcctcaagttctgtcagttttgctgtatatatttgaggtctgtttttagatgtgtacacattttaaatggtgttgggtctttaccattatgtaatgtccctcttaatctattgtaaatttccttgctttgaggtatagtttgtcttatgtaaatataatcagttcagttttcctttgaccagcatttacgtaacatatctttttccatttttaaacttataatctacctatattaaaatatatagtcaggccaggtgctgggattacaggcgtgagccactgcatgtggctgctctctgttttttatgcctcactgtttcctttcctgccttcttttgggttatttgactattgcttagtattcaattttaatttatcaattgattattttattatatctctttgtgtagtgttctttagtggtggctctaagaattacagtatgtacaccaaactttttactttctgcttagaattaatattttaccacttgtaaaatgtaggaacctggctatcatgtaggttcctttcccctgt

SEQ ID NO: 436897 - DNA, 854 bp, Homo sapiens
ggctagcaggagggtgtgtgtggggcgggagcggacaacggagaccagacctactgcagccacgcgggcgagcggctgtgtggatgtcggcgaagccgcgggcgagggccttgggaactccaagacagaatggcccgaggcctggacactctctgaggacatctctgcaaaggccccagcggcccagatcactttgggaagcagtgacatccaacctgtatcaagtcttctaatctgtgaacatggctggagtgcagtgtcgtgatcacagcccactgcagcctcgacctcccgggctgaagggatcctcgcacctcagcctcctgagtagctgagactataggctggagtaccatgacaggatcctagctcactgcatcctcaaactcatgggctcaagtgattctcctgctttagtctcccgagtagctgggactacagagatgggtctcggctgtgttacctaagctggagtgcagtggctattcccagcacaatcatagtgcactacagtctccaactcctgggttcaggtgctccttgtgcctccgcctcctgaatagctgggattgtgctgggattacaggcgtgagccactgcatgtggctgctctctgttttttatgcctcactgtttcctttcctgccttcttttgggttatttgactattgcttagtattcaattttaatttatcaattgattattttattatatctctttgtgtagtgttctttagtggtggctctaagaattacagtatgtacaccaaactttttactttctgcttagaattaatattttaccacttgtaaaatgtaggaacctggctatcatgtaggttcctttcccctgt

SEQ ID NO: 436898 - DNA, 3081 bp, Homo sapiens
ggcgggcgccgggcgccgggcgcgcggtcctgcgaggagacgtggcagagtgcggctgcgctcgcgccggaccggaaagccggggaagtggccgaggagggagggctgcgagccatggcgaccaagacggcgggcgtggggcggtgggaggtagtgaagaagggtcggcggcctggggtcggcgccggcgccggcggccgaggaggcggcaggaaccgcagggcgctcggggaagcaaacggagtgtggaaatacgacctgacccctgcaatccagaccacaagcaccctttatgagcggggctttgagaatatcatgaagcggcagaataaggagcaggtcccaccccctgctgtggaacctaagaaaccagggaacaagaagcagccaaagaaggtggcaactcctcccaaccaaaaccagaagcagggccgcttccgcagcctggaggaagcactgaaagctctggatgtggcagacctgcagaaggaactggacaagagccagagtgtgttctctggaaacccatccatatggttgaaggacctggccagctatctcaactacaagctacaagctcctctaagtgaacccacgctgagccagcatactcatgattatccctacagcctggtgagccgggagctacgtgggatcatccgagggctgctggcgaaggcagcagggtctctggagctcttttttgaccactgtctgttcaccatgttgcaagagctggataagacaccaggggagtcactacatggttaccgcatctgtatccaggccatcctgcaagacaagcccaagattgccacggcaaacctaggcaagttcctggaactgctgaggtcccaccagagccgaccagcaaagtgtctcaccatcatgtgggccctgggtcaagcaggttttgccaacctcaccgagggactgaaagtgtggctggggatcatgctgcctgtgctgggcatcaagtctctgtctccctttgccatcacatacctggatcggctgctcctgatgcatcccaaccttaccaagggcttcggcatgattggccccaaggacttcttcccacttctggactttgcctatatgccgaacaactccctgacacccagcctgcaggagcagctgtgtcagctctacccccgactgaaagtgctggcatttggagcaaagccggattccaccctgcatacctacttcccttctttcctgtccagagccacccctagctgtccccctgagatgaagaaagagctcctgagcagcctgactgagtgcctgacggtggaccccctcagtgccagcgtctggaggcagctgtaccctaagcacctgtcacagtccagccttctgctggagcacttgctcagctcctgggagcagattcccaagaaggtacagaagtctttgcaagaaaccattcagtccctcaagcttaccaaccaggagctgctgaggaagggtagcagtaacaaccaggatgtcgtcacctgtgacatggcctgcaagggcctgttgcagcaggttcagggtcctcggctgccctggacgcggctcctcctgttgctgctggtcttcgctgtaggcttcctgtgccatgacctccggtcacacagctccttccaggcctcccttactggccggttgcttcgatcatctggcttcttacctgctagccaacaagcgtgtgccaagctctactcctacagtctgcaaggctacagctggctgggggagacactgccgctctggggctcccacctgctcaccgtggtgcggcccagcttgcagctggcctgggctcacaccaatgccacagtcagcttcctttctgcccactgtgcctctcaccttgcgtggtttggtgacagtctcaccagtctctctcagaggctacagatccagctccccgattccgtgaatcagctactccgctatctgagagagctgcccctgcttttccaccagaatgtgctgctgccactgtggcacctcttgcttgaggccctggcctgggcccaggagcactgccatgaggcatgcagaggtgaggtgacctgggactgcatgaagacacagctcagtgaggctgtccactggacctggctttgcctacaggacattacagtggctttcttggactgggcacttgccctgatatcccagcagtaggccctgccttcctggccactgatttctgcatgggtagaccatccaagactgcagcgggtagaaggtggcagttcttcatgggagtctttttaacttggtgcctgagttctctcctaggcaagtggccagttgcctccacctcagttcttccatctttggtggggacagggcccagcagcatctcagcctcctacccacaattccactgaacacttttctggccctactgcacatggcccccagcctccatccttgtgctggtagcctctcacaactccgcccttgccctctgccttccacttccttccatctcatttctaaaccccaaacagctcatctctaaaaagatagaactcccagcaggtggcttctgtgttcttctgacaaatgattcctgcttctccagactttagcagcctcctgttcccattcttggtcacagctctagccacagcagaaggaaaggggcttccagaagaatatagcaccgcattgggaaacagcagcctcacctccacctgaagcctgggtgtggctgtcagtggacatggggagctggatggaaatgcctctcacttcaaaatgcccagcctgccccaaatgcctctaagcccctccctgtcccctcccttgtagtcctacttcttccaactttccattccccatcatgctgggggtcttggtcacaaggctcagcttctctccactgtccatccctcctatcatctgtagagcagagcacaggcagttgtgtgccttgggcccagggaaccctccatcaacctgagacaggactcagtatatggttcttgggtatgccctaccaggtggaataaaggacagattcgagaacaacaaaacacagaagcgacgctcattggggacacaagtagaagg

SEQ ID NO: 436899 - DNA, 3057 bp, Homo sapiens
agggctgcgatccatggtgtccatcacggcggccgtggttgcggcgtgacgcgatagtgaatagatggtcaggtggtctgtattctgagctcggcgtccgtgcggtcgagggatgcgggatcgatatcctgacaggggctgcgtcgaggtgaagacaaactggatatgctgtgaaaattctaccgtgacccgcaatgctattcctatcatgctagcgaagtcgaccactatttatgcaagcagagaggtattcttgacgagataattatctagaagctggtaagagtaaagtgatgcaagagtcccaacaccctcgtggtatagtagtagatccataactaagactcgacgggaatagcatatgacatgcatgtgcagaagtaaggggtcgtgctaacttgacctacctcgaattcaatagaccagtaattctgggaccgcgtatcctggacatgactaggaggaagcactgaaagctctggatgtggcagacctgcagaaggaactggacaagagccagagtgtgttctctggaaacccatccatatggttgaaggacctggccagctatctcaactacaagctacaagctcctctaagtgaacccacgctgagccagcatactcatgattatccctacagcctggtgagccgggagctacgtgggatcatccgagggctgctggcgaaggcagcagggtctctggagctcttttttgaccactgtctgttcaccatgttgcaagagctggataagacaccaggggagtcactacatggttaccgcatctgtatccaggccatcctgcaagacaagcccaagattgccacggcaaacctaggcaagttcctggaactgctgaggtcccaccagagccgaccagcaaagtgtctcaccatcatgtgggccctgggtcaagcaggttttgccaacctcaccgagggactgaaagtgtggctggggatcatgctgcctgtgctgggcatcaagtctctgtctccctttgccatcacatacctggatcggctgctcctgatgcatcccaaccttaccaagggcttcggcatgattggccccaaggacttcttcccacttctggactttgcctatatgccgaacaactccctgacacccagcctgcaggagcagctgtgtcagctctacccccgactgaaagtgctggcatttggagcaaagccggattccaccctgcatacctacttcccttctttcctgtccagagccacccctagctgtccccctgagatgaagaaagagctcctgagcagcctgactgagtgcctgacggtggaccccctcagtgccagcgtctggaggcagctgtaccctaagcacctgtcacagtccagccttctgctggagcacttgctcagctcctgggagcagattcccaagaaggtacagaagtctttgcaagaaaccattcagtccctcaagcttaccaaccaggagctgctgaggaagggtagcagtaacaaccaggatgtcgtcacctgtgacatggcctgcaagggcctgttgcagcaggttcagggtcctcggctgccctggacgcggctcctcctgttgctgctggtcttcgctgtaggcttcctgtgccatgacctccggtcacacagctccttccaggcctcccttactggccggttgcttcgatcatctggcttcttacctgctagccaacaagcgtgtgccaagctctactcctacagtctgcaaggctacagctggctgggggagacactgccgctctggggctcccacctgctcaccgtggtgcggcccagcttgcagctggcctgggctcacaccaatgccacagtcagcttcctttctgcccactgtgcctctcaccttgcgtggtttggtgacagtctcaccagtctctctcagaggctacagatccagctccccgattccgtgaatcagctactccgctatctgagagagctgcccctgcttttccaccagaatgtgctgctgccactgtggcacctcttgcttgaggccctggcctgggcccaggagcactgccatgaggcatgcagaggtgaggtgacctgggactgcatgaagacacagctcagtgaggctgtccactggacctggctttgcctacaggacattacagtggctttcttggactgggcacttgccctgatatcccagcagtaggccctgccttcctggccactgatttctgcatgggtagaccatccaagactgcagcgggtagaaggtggcagttcttcatgggagtctttttaacttggtgcctgagttctctcctaggcaagtggccagttgcctccacctcagttcttccatctttggtggggacagggcccagcagcatctcagcctcctacccacaattccactgaacacttttctggccctactgcacatggcccccagcctccatccttgtgctggtagcctctcacaactccgcccttgccctctgccttccacttccttccatctcatttctaaaccccaaacagctcatctctaaaaagatagaactcccagcaggtggcttctgtgttcttctgacaaatgattcctgcttctccagactttagcagcctcctgttcccattcttggtcacagctctagccacagcagaaggaaaggggcttccagaagaatatagcaccgcattgggaaacagcagcctcacctccacctgaagcctgggtgtggctgtcagtggacatggggagctggatggaaatgcctctcacttcaaaatgcccagcctgccccaaatgcctctaagcccctccctgtcccctcccttgtagtcctacttcttccaactttccattccccatcatgctgggggtcttggtcacaaggctcagcttctctccactgtccatccctcctatcatctgtagagcagagcacaggcagttgtgtgccttgggcccagggaaccctccatcaacctgagacaggactcagtatatggttcttgggtatgccctaccaggtggaataaaggacacagatttgatttctagca

SEQ ID NO: 436900 - DNA, 2909 bp, Homo sapiens
ggcgggcgccgggcgccgggcgcgcggtcctgcgaggagacgtggcagagtgcggctgcgctcgcgccggaccggaaagccggggaagtggccgaggagggagggctgcgagccatggcgaccaagacggcgggcgtggggcggtgggaggtagtgaagaagggtcggcggcctggggtcggcgccggcgccggcggccgaggaggcggcaggaaccgcagggcgctcggggaagcaaacggagtgtggaaatacgacctgacccctgcaatccagaccacaagcaccctttatgagcggggctttgagaatatcatgaagcggcagaataaggagcaggtcccaccccctgctgtggaacctaagaaaccagggaacaagaagcagccaaagaaggtggcaactcctcccaaccaaaaccagaagcagggccgcttccgcagcctggaggaagcactgaaagctctggatgtggcagacctgcagaaggaactggacaagagccagagtgtgttctctggaaacccatccatatggttgaaggacctggccagctatctcaactacaagctacaagctcctctaagtgaacccacgctgagccagcatactcatggggagtcactacatggttaccgcatctgtatccaggccatcctgcaagacaagcccaagattgccacggcaaacctaggcaagttcctggaactgctgaggtcccaccagagccgaccagcaaagtgtctcaccatcatgtgggccctgggtcaagcaggttttgccaacctcaccgagggactgaaagtgtggctggggatcatgctgcctgtgctgggcatcaagtctctgtctccctttgccatcacatacctggatcggctgctcctgatgcatcccaaccttaccaagggcttcggcatgattggccccaaggacttcttcccacttctggactttgcctatatgccgaacaactccctgacacccagcctgcaggagcagctgtgtcagctctacccccgactgaaagtgctggcatttggagcaaagccggattccaccctgcatacctacttcccttctttcctgtccagagccacccctagctgtccccctgagatgaagaaagagctcctgagcagcctgactgagtgcctgacggtggaccccctcagtgccagcgtctggaggcagctgtaccctaagcacctgtcacagtccagccttctgctggagcacttgctcagctcctgggagcagattcccaagaaggtacagaagtctttgcaagaaaccattcagtccctcaagcttaccaaccaggagctgctgaggaagggtagcagtaacaaccaggatgtcgtcacctgtgacatggcctgcaagggcctgttgcagcaggttcagggtcctcggctgccctggacgcggctcctcctgttgctgctggtcttcgctgtaggcttcctgtgccatgacctccggtcacacagctccttccaggcctcccttactggccggttgcttcgatcatctggcttcttacctgctagccaacaagcgtgtgccaagctctactcctacagtctgcaaggctacagctggctgggggagacactgccgctctggggctcccacctgctcaccgtggtgcggcccagcttgcagctggcctgggctcacaccaatgccacagtcagcttcctttctgcccactgtgcctctcaccttgcgtggtttggtgacagtctcaccagtctctctcagaggctacagatccagctccccgattccgtgaatcagctactccgctatctgagagagctgcccctgcttttccaccagaatgtgctgctgccactgtggcacctcttgcttgaggccctggcctgggcccaggagcactgccatgaggcatgcagaggtgaggtgacctgggactgcatgaagacacagctcagtgaggctgtccactggacctggctttgcctacaggacattacagtggctttcttggactgggcacttgccctgatatcccagcagtaggccctgccttcctggccactgatttctgcatgggtagaccatccaagactgcagcgggtagaaggtggcagttcttcatgggagtctttttaacttggtgcctgagttctctcctaggcaagtggccagttgcctccacctcagttcttccatctttggtggggacagggcccagcagcatctcagcctcctacccacaattccactgaacacttttctggccctactgcacatggcccccagcctccatccttgtgctggtagcctctcacaactccgcccttgccctctgccttccacttccttccatctcatttctaaaccccaaacagctcatctctaaaaagatagaactcccagcaggtggcttctgtgttcttctgacaaatgattcctgcttctccagactttagcagcctcctgttcccattcttggtcacagctctagccacagcagaaggaaaggggcttccagaagaatatagcaccgcattgggaaacagcagcctcacctccacctgaagcctgggtgtggctgtcagtggacatggggagctggatggaaatgcctctcacttcaaaatgcccagcctgccccaaatgcctctaagcccctccctgtcccctcccttgtagtcctacttcttccaactttccattccccatcatgctgggggtcttggtcacaaggctcagcttctctccactgtccatccctcctatcatctgtagagcagagcacaggcagttgtgtgccttgggcccagggaaccctccatcaacctgagacaggactcagtatatggttcttgggtatgccctaccaggtggaataaaggacacagatttgatttctagca

SEQ ID NO: 436901 - DNA, 3122 bp, Homo sapiens
ggcgggcgccgggcgccgggcgcgcggtcctgcgaggagacgtggcagagtgcggctgcgctcgcgccggaccggaaagccggggaagtggccgaggagggagggctgcgagccatggcgaccaagacggcgggcgtggggcggtgggaggtagtgaagaagggtcggcggcctggggtcggcgccggcgccggcggccgaggaggcggcaggaaccgcagggcgctcggggaagcaaacggagtgtggaaatacgacctgacccctgcaatccagaccacaagcaccctttatgagcggggctttgagaatatcatgaagcggcagaataaggagcaggtcccaccccctgctgtggaacctaagaaaccagggaacaagaagcagccaaagaaggtggcaactcctcccaaccaaaaccagaagcagggccgcttccgcagcctggaggaagcactgaaagctctggatgtggcagacctgcagaaggaactggacaagagccagagtgtgttctctggaaacccatccatatggttgaaggacctggccagctatctcaactacaagctacaagctcctctaagtgaacccacgctgagccagcatactcatgattatccctacagcctggtgagccgggagctacgtgggatcatccgagggctgctggcgaaggcagcagggtctctggagctcttttttgaccactgtctgttcaccatgttgcaagagctggataagacaccaggggagtcactacatggttaccgcatctgtatccaggccatcctgcaagacaagcccaagattgccacggcaaacctaggcaagttcctggaactgctgaggtcccaccagagccgaccagcaaagtgtctcaccatcatgtgggccctgggtcaagcaggttttgccaacctcaccgagggactgaaagtgtggctggggatcatgctgcctgtgctgggcatcaagtctctgtctccctttgccatcacatacctggatcggctgctcctgatgcatcccaaccttaccaagggcttcggcatgattggccccaaggacttcttcccacttctggactttgcctatatgccgaacaactccctgacacccagcctgcaggagcagctgtgtcagctctacccccgactgaaagtgctggcatttggagcaaagccggattccaccctgcatacctacttcccttctttcctgtccagagccacccctagctgtccccctgagatgaagaaagagctccctgttgacagctgcctgccccgctcactcgagcttcaccctcagaagatggatcccaagagacagcacattcagctcctgagcagcctgactgagtgcctgacggtggaccccctcagtgccagcgtctggaggcagctgtaccctaagcacctgtcacagtccagccttctgctggagcacttgctcagctcctgggagcagattcccaagaaggtacagaagtctttgcaagaaaccattcagtccctcaagcttaccaaccaggagctgctgaggaagggtagcagtaacaaccaggatgtcgtcacctgtgacatggcctgcaagggcctgttgcagcaggttcagggtcctcggctgccctggacgcggctcctcctgttgctgctggtcttcgctgtaggcttcctgtgccatgacctccggtcacacagctccttccaggcctcccttactggccggttgcttcgatcatctggcttcttacctgctagccaacaagcgtgtgccaagctctactcctacagtctgcaaggctacagctggctgggggagacactgccgctctggggctcccacctgctcaccgtggtgcggcccagcttgcagctggcctgggctcacaccaatgccacagtcagcttcctttctgcccactgtgcctctcaccttgcgtggtttggtgacagtctcaccagtctctctcagaggctacagatccagctccccgattccgtgaatcagctactccgctatctgagagagctgcccctgcttttccaccagaatgtgctgctgccactgtggcacctcttgcttgaggccctggcctgggcccaggagcactgccatgaggcatgcagaggtgaggtgacctgggactgcatgaagacacagctcagtgaggctgtccactggacctggctttgcctacaggacattacagtggctttcttggactgggcacttgccctgatatcccagcagtaggccctgccttcctggccactgatttctgcatgggtagaccatccaagactgcagcgggtagaaggtggcagttcttcatgggagtctttttaacttggtgcctgagttctctcctaggcaagtggccagttgcctccacctcagttcttccatctttggtggggacagggcccagcagcatctcagcctcctacccacaattccactgaacacttttctggccctactgcacatggcccccagcctccatccttgtgctggtagcctctcacaactccgcccttgccctctgccttccacttccttccatctcatttctaaaccccaaacagctcatctctaaaaagatagaactcccagcaggtggcttctgtgttcttctgacaaatgattcctgcttctccagactttagcagcctcctgttcccattcttggtcacagctctagccacagcagaaggaaaggggcttccagaagaatatagcaccgcattgggaaacagcagcctcacctccacctgaagcctgggtgtggctgtcagtggacatggggagctggatggaaatgcctctcacttcaaaatgcccagcctgccccaaatgcctctaagcccctccctgtcccctcccttgtagtcctacttcttccaactttccattccccatcatgctgggggtcttggtcacaaggctcagcttctctccactgtccatccctcctatcatctgtagagcagagcacaggcagttgtgtgccttgggcccagggaaccctccatcaacctgagacaggactcagtatatggttcttgggtatgccctaccaggtggaataaaggacacagatttgatttctagca

SEQ ID NO: 436902 - DNA, 3234 bp, Homo sapiens
ggcgggcgccgggcgccgggcgcgcggtcctgcgaggagacgtggcagagtgcggctgcgctcgcgccggaccggaaagccggggaagtggccgaggagggagggctgcgagccatggcgaccaagacggcgggcgtggggcggtgggaggtagtgaagaagggtcggcggcctggggtcggcgccggcgccggcggccgaggaggcggcaggaaccgcagggcgctcggggaagcaaacggagtgtggaaatacgacctgacccctgcaatccagaccacaagcaccctttatgagcggggctttgagaatatcatgaagcggcagaataaggagcaggtcccaccccctgctgtggaacctaagaaaccagggaacaagaagcagccaaagaaggtggcaactcctcccaaccaaaaccagaagcagggccgcttccgcagcctggaggaagcactgaaagctctggatgtggcagacctgcagaaggaactggacaagagccagagtgtgttctctggaaacccatccatatggttgaaggacctggccagctatctcaactacaagctacaagctcctctaagtgaacccacgctgagccagcatactcatgattatccctacagcctggtgagccgggagctacgtgggatcatccgagggctgctggcgaaggcagcagggtctctggagctcttttttgaccactgtctgttcaccatgttgcaagagctggataagacaccaggggagtcactacatggttaccgcatctgtatccaggccatcctgcaagacaagcccaagattgccacggcaaacctaggcaagttcctggaactgctgaggtcccaccagagccgaccagcaaagtgtctcaccatcatgtgggccctgggtcaagcaggttttgccaacctcaccgagggactgaaagtgtggctggggatcatgctgcctgtgctgggcatcaagtctctgtctccctttgccatcacatacctggatcggctgctcctgatgcatcccaaccttaccaagggcttcggcatgattggccccaaggacttcttcccacttctggactttgcctatatgccgaacaactccctgacacccagcctgcaggagcagctgtgtcagctctacccccgactgaaagtgctggcatttggagcaaagccggattccaccctgcatacctacttcccttctttcctgtccagagccacccctagctgtccccctgagatgaagaaagaggtgaggatatggtgggaggctttttctccttccccaggggtcagctgtagcggtccctatctgctgacaaaggccttgccttcacagagcccattctgaggcttttccttagctccctgttgacagctgcctgccccgctcactcgagcttcaccctcagaagatggatcccaagagacagcacattcagctcctgagcagcctgactgagtgcctgacggtggaccccctcagtgccagcgtctggaggcagctgtaccctaagcacctgtcacagtccagccttctgctggagcacttgctcagctcctgggagcagattcccaagaaggtacagaagtctttgcaagaaaccattcagtccctcaagcttaccaaccaggagctgctgaggaagggtagcagtaacaaccaggatgtcgtcacctgtgacatggcctgcaagggcctgttgcagcaggttcagggtcctcggctgccctggacgcggctcctcctgttgctgctggtcttcgctgtaggcttcctgtgccatgacctccggtcacacagctccttccaggcctcccttactggccggttgcttcgatcatctggcttcttacctgctagccaacaagcgtgtgccaagctctactcctacagtctgcaaggctacagctggctgggggagacactgccgctctggggctcccacctgctcaccgtggtgcggcccagcttgcagctggcctgggctcacaccaatgccacagtcagcttcctttctgcccactgtgcctctcaccttgcgtggtttggtgacagtctcaccagtctctctcagaggctacagatccagctccccgattccgtgaatcagctactccgctatctgagagagctgcccctgcttttccaccagaatgtgctgctgccactgtggcacctcttgcttgaggccctggcctgggcccaggagcactgccatgaggcatgcagaggtgaggtgacctgggactgcatgaagacacagctcagtgaggctgtccactggacctggctttgcctacaggacattacagtggctttcttggactgggcacttgccctgatatcccagcagtaggccctgccttcctggccactgatttctgcatgggtagaccatccaagactgcagcgggtagaaggtggcagttcttcatgggagtctttttaacttggtgcctgagttctctcctaggcaagtggccagttgcctccacctcagttcttccatctttggtggggacagggcccagcagcatctcagcctcctacccacaattccactgaacacttttctggccctactgcacatggcccccagcctccatccttgtgctggtagcctctcacaactccgcccttgccctctgccttccacttccttccatctcatttctaaaccccaaacagctcatctctaaaaagatagaactcccagcaggtggcttctgtgttcttctgacaaatgattcctgcttctccagactttagcagcctcctgttcccattcttggtcacagctctagccacagcagaaggaaaggggcttccagaagaatatagcaccgcattgggaaacagcagcctcacctccacctgaagcctgggtgtggctgtcagtggacatggggagctggatggaaatgcctctcacttcaaaatgcccagcctgccccaaatgcctctaagcccctccctgtcccctcccttgtagtcctacttcttccaactttccattccccatcatgctgggggtcttggtcacaaggctcagcttctctccactgtccatccctcctatcatctgtagagcagagcacaggcagttgtgtgccttgggcccagggaaccctccatcaacctgagacaggactcagtatatggttcttgggtatgccctaccaggtggaataaaggacacagatttgatttctagca

SEQ ID NO: 436903 - DNA, 2151 bp, Homo sapiens
cagtaggtgcaagcctgaggcctccctcgtgacttttacccctgcagtgtggctggggatcatgctgcctgtgctgggcatcaagtctctgtctccctttgccatcacatacctggatcggctgctcctgatgcatcccaaccttaccaagggcttcggcatgattggccccaaggacttcttcccacttctggactttgcctatatgccgaacaactccctgacacccagcctgcaggagcagctgtgtcagctctacccccgactgaaagtgctggcatttggagcaaagccggattccaccctgcatacctacttcccttctttcctgtccagagccacccctagctgtccccctgagatgaagaaagagctcctgagcagcctgactgagtgcctgacggtggaccccctcagtgccagcgtctggaggcagctgtaccctaagcacctgtcacagtccagccttctgctggagcacttgctcagctcctgggagcagattcccaagaaggtacagaagtctttgcaagaaaccattcagtccctcaagcttaccaaccaggagctgctgaggaagggtagcagtaacaaccaggatgtcgtcacctgtgacatggcctgcaagggcctgttgcagcaggttcagggtcctcggctgccctggacgcggctcctcctgttgctgctggtcttcgctgtaggcttcctgtgccatgacctccggtcacacagctccttccaggcctcccttactggccggttgcttcgatcatctggcttcttacctgctagccaacaagcgtgtgccaagctctactcctacagtctgcaaggctacagctggctgggggagacactgccgctctggggctcccacctgctcaccgtggtgcggcccagcttgcagctggcctgggctcacaccaatgccacagtcagcttcctttctgcccactgtgcctctcaccttgcgtggtttggtgacagtctcaccagtctctctcagaggctacagatccagctccccgattccgtgaatcagctactccgctatctgagagagctgcccctgcttttccaccagaatgtgctgctgccactgtggcacctcttgcttgaggccctggcctgggcccaggagcactgccatgaggcatgcagaggtgaggtgacctgggactgcatgaagacacagctcagtgaggctgtccactggacctggctttgcctacaggacattacagtggctttcttggactgggcacttgccctgatatcccagcagtaggccctgccttcctggccactgatttctgcatgggtagaccatccaagactgcagcgggtagaaggtggcagttcttcatgggagtctttttaacttggtgcctgagttctctcctaggcaagtggccagttgcctccacctcagttcttccatctttggtggggacagggcccagcagcatctcagcctcctacccacaattccactgaacacttttctggccctactgcacatggcccccagcctccatccttgtgctggtagcctctcacaactccgcccttgccctctgccttccacttccttccatctcatttctaaaccccaaacagctcatctctaaaaagatagaactcccagcaggtggcttctgtgttcttctgacaaatgattcctgcttctccagactttagcagcctcctgttcccattcttggtcacagctctagccacagcagaaggaaaggggcttccagaagaatatagcaccgcattgggaaacagcagcctcacctccacctgaagcctgggtgtggctgtcagtggacatggggagctggatggaaatgcctctcacttcaaaatgcccagcctgccccaaatgcctctaagcccctccctgtcccctcccttgtagtcctacttcttccaactttccattccccatcatgctgggggtcttggtcacaaggctcagcttctctccactgtccatccctcctatcatctgtagagcagagcacaggcagttgtgtgccttgggcccagggaaccctccatcaacctgagacaggactcagtatatggttcttgggtatgccctaccaggtggaataaaggacacagatttgatttctagca

SEQ ID NO: 436904 - DNA, 2430 bp, Homo sapiens
  misc_feature (2416)..(2416): n is a, c, g, or t
ggcgggcgccgggcgccgggcgcgcggtcctgcgaggagacgtggcagagtgcggctgcgctcgcgccggaccggaaagccggggaagtggccgaggagggagggctgcgagccatggcgaccaagacggcgggcgtggggcggtgggaggtagtgaagaagggtcggcggcctggggtcggcgccggcgccggcggccgaggaggcggcaggaaccgcagggcgctcggggaagcaaacggagtgtggaaatacgacctgacccctgcaatccagaccacaagcaccctttatgagcggggctttgagaatatcatgaagcggcagaataaggagcaggtcccaccccctgctgtggaacctaagaaaccagggaacaagaagcagccaaagaaggtggcaactcctcccaaccaaaaccagaagcagggccgcttccgcagcctggaggaagcactgaaagctctggatgtggcagacctgcagaaggaactggacaagagccagagtgtgttctctggaaacccatccatatggttgaaggacctggccagctatctcaactacaagctacaagctcctctaagtgaacccacgctgagccagcatactcatgattatccctacagcctggtgagccgggagctacgtgggatcatccgagggctgctggcgaaggcagcagggtctctggagctcttttttgaccactgtctgttcaccatgttgcaagagctggataagacaccaggggagtcactacatggttaccgcatctgtatccaggccatcctgcaagacaagcccaagattgccacggcaaacctaggcaagttcctggaactgctgaggtcccaccagagccgaccagcaaagtgtctcaccatcatgtgggccctgggtcaagcaggttttgccaacctcaccgagggactgaaagtgtggctggggatcatgctgcctgtgctgggcatcaagtctctgtctccctttgccatcacatacctggatcggctgctcctgatgcatcccaaccttaccaagggcttcggcatgattggccccaaggacttcttcccacttctggactttgcctatatgccgaacaactccctgacacccagcctgcaggagcagctgtgtcagctctacccccgactgaaagtgctggcatttggagcaaagccggattccaccctgcatacctacttcccttctttcctgtccagagccacccctagctgtccccctgagatgaagaaagagctcctgagcagcctgactgagtgcctgacggtggaccccctcagtgccagcgtctggaggcagctgtaccctaagcacctgtcacagtccagccttctgctggagcacttgctcagctcctgggagcagattcccaagaaggtacagaagtctttgcaagaaaccattcagtccctcaagcttaccaaccaggagctgctgaggaagggtagcagtaacaaccaggatgtcgtcacctgtgacatggcctgcaagggcctgttgcagcaggttcagggtcctcggctgccctggacgcggctcctcctgttgctgctggtcttcgctgtaggcttcctgtgccatgacctccggtcacacagctccttccaggcctcccttactggccggttgcttcgatcatctggcttcttacctgctagccaacaagcgtgtgccaagctctactcctacagtctgcaaggctacagctggctgggggagacactgccgctctggggctcccacctgctcaccgtggtgcggcccagcttgcagctggcctgggctcacaccaatgccacagtcagcttcctttctgcccactgtgcctctcaccttgcgtggtttggtgacagtctcaccagtctctctcagaggctacagatccagctccccgattccgtgaatcagctactccgctatctgagagagctgcccctgcttttccaccagaatgtgctgctgccactgtggcacctcttgcttgaggccctggcctgggcccaggagcactgccatgaggcatgcagaggtgaggtgacctgggactgcatgaagacacagctcagtgaggctgtccactggacctggctttgcctacaggacattacagtggctttcttggactgggcacttgccctgatatcccagcagtaggccctgccttcctggccactgatttctgcatgggtagaccatccaagactgcagcgggtagaaggtggcagttcttcatgggagtctttttaacttggtgcctgagttctctcctaggcaagtggccagtgctcactcagtctcatcttgtgggaaggccagagataagctctacacatcatgaaattctgctatgaatgcccactcatctggtgtagcttaatcgctgctngtcatctatatcac

SEQ ID NO: 436905 - DNA, 1658 bp, Homo sapiens
ggcgggcgccgggcgccgggcgcgcggtcctgcgaggagacgtggcagagtgcggctgcgctcgcgccggaccggaaagccggggaagtggccgaggagggagggctgcgagccatggcgaccaagacggcgggcgtggggcggtgggaggtagtgaagaagggtcggcggcctggggtcggcgccggcgccggcggccgaggaggcggcaggaaccgcagggcgctcggggaagcaaacggagtgtggaaatacgacctgacccctgcaatccagaccacaagcaccctttatgagcggggctttgagaatatcatgaagcggcagaataaggagcaggtcccaccccctgctgtggaacctaagaaaccagggaacaagaagcagccaaagaaggtggcaactcctcccaaccaaaaccagaagcagggccgcttccgcagcctggaggaagcactgaaagctctggatgtggcagacctgcagaaggaactggacaagagccagagtgtgttctctggaaacccatccatatggttgaaggacctggccagctatctcaactacaagctacaagctcctctaagtgaacccacgctgagccagcatactcatgattatccctacagcctggtgagccgggagctacgtgggatcatccgagggctgctggcgaaggcagcagggtctctggagctcttttttgaccactgtctgttcaccatgttgcaagagctggataagacaccaggggagtcactacatggttaccgcatctgtatccaggccatcctgcaagacaagcccaagattgccacggcaaacctaggcaagttcctggaactgctgaggtcccaccagagccgaccagcaaagtgtctcaccatcatgtgggccctgggtcaagcaggttttgccaacctcaccgagggactgaaagtgtggctggggatcatgctgcctgtgctgggcatcaagtctctgtctccctttgccatcacatacctggatcggctgctcctgatgcatcccaaccttaccaagggcttcggcatgattggccccaaggacttcttcccacttctggactttgcctatatgccgaacaactccctgacacccagcctgcaggagcagctgtgtcagctctacccccgactgaaagtgctggcatttggagcaaagccggattccaccctgcatacctacttcccttctttcctgtccagagccacccctagctgtccccctgagatgaagaaagaggtgaggatatggtgggaggctttttctccttccccaggggtcagctgtagcggtccctatctgctgacaaaggccttgccttcacagagcccattctgaggcttttccttagctccctgttgacagctgcctgccccgctcactcgagcttcaccctcagaagatggatcccaagagacagcacattcaggtctgggtggtttctgatgcccgtctcttgcagatagtgatctttgagctcaaagctctagctcaggagccccagcctcctgctttacagcctctcagagagctttctggagtcttgacactttgcatccagagacactttgcatccagagacactttgcatccagagacactttgcatccagagacacttgcattccagag

SEQ ID NO: 436906 - DNA, 1231 bp, Homo sapiens
ggcgggcgccgggcgccgggcgcgcggtcctgcgaggagacgtggcagagtgcggctgcgctcgcgccggaccggaaagccggggaagtggccgaggagggagggctgcgagccatggcgaccaagacggcgggcgtggggcggtgggaggtagtgaagaagggtcggcggcctggggtcggcgccggcgccggcggccgaggaggcggcaggaaccgcagggcgctcggggaagcaaacggagtgtggaaatacgacctgacccctgcaatccagaccacaagcaccctttatgagcggggctttgagaatatcatgaagcggcagaataaggagcaggtcccaccccctgctgtggaacctaagaaaccagggaacaagaagcagccaaagaaggtggcaactcctcccaaccaaaaccagaagcagggccgcttccgcagcctggaggaagcactgaaagctctggatgtggcagacctgcagaaggaactggacaagagccagagtgtgttctctggaaacccatccatatggttgaaggacctggccagctatctcaactacaagctacaagctcctctaagtgaacccacgctgagccagcatactcatgattatccctacagcctggtgagccgggagctacgtgggatcatccgagggctgctggcgaaggcagcagggtctctggagctcttttttgaccactgtctgttcaccatgttgcaagagctggataagacaccaggggagtcactacatggttaccgcatctgtatccaggccatcctgcaagacaagcccaagattgccacggcaaacctaggcaagttcctggaactgctgaggtcccaccagagccgaccagcaaagtgtctcaccatcatgtgggccctgggtcaagcaggttttgccaacctcaccgagggactgaaagtgtggctggggatcatgctgcctgtgctgggcatcaagtctctgtctccctgtcccctcccttgtagtcctacttcttccaactttccattccccatcatgctgggggtcttggtcacaaggctcagcttctctccactgtccatccctcctatcatctgtagagcagagcacaggcagttgtgtgccttgggcccagggaaccctccatcaacctgagacaggactcagtatatggttcttgggtatgccctaccaggtggaataaaggacacagatttgatttctagca

SEQ ID NO: 436907 - DNA, 812 bp, Homo sapiens
ggcgggcgccgggcgccgggcgcgcggtcctgcgaggagacgtggcagagtgcggctgcgctcgcgccggaccggaaagccggggaagtggccgaggagggagggctgcgagccatggcgaccaagacggcgggcgtggggcggtgggaggtagtgaagaagggtcggcggcctggggtcggcgccggcgccggcggccgaggaggcggcaggaaccgcagggcgctcggggaagcaaacggagtgtggaaatacgacctgacccctgcaatccagaccacaagcaccctttatgagcggggctttgagaatatcatgaagcggcagaataaggagcaggtcccaccccctgctgtggaacctaagaaaccagggaacaagaagcagccaaagaaggtggcaactcctcccaaccaaaaccagaagcagggccgcttccgcagcctggaggaagcactgaaagctctggatgtggcagacctgcagaaggaactggacaagagccagagtgtgttctctggaaacccatccatatggttgaaggacctggccagctatctcaactacaagctacaagctcctctaagtgaacccacgctgagccagcatactcatggtaagtccttccagcttcctcaagctcagacaagttcaaataaattcaaaaagggtggtataacagatcccagtgccccacactgtcctgatttccatgggtgatttgggctggtctcaaatcatcgtgactgtgaatgtttctgggcctcattctgtgatcctccctctgggcctcctcagaggaaggatcccag

SEQ ID NO: 436908 - DNA, 507 bp, Homo sapiens
caaagtgtctcaccatcatgtgggccctgggtcaagcaggttttgccaacctcaccgagggactgaaaggtaacagggaaatagggaagaaagagggagggtctcggagctggaaaactcctctttgatgcccccagtaggtgcaagcctgaggcctccctcgtgacttttacccctgcagtgtggctggggatcatgctgcctgtgctgggcatcaagtctctgtctccctttgccatcacatacctggatcggctgctcctgtgagtaatgggagggcagcaaggggaaggctcagggtgtcccaagtggctgttatagcaaaatgggaggctatgatcttggtctccatggatatgaggaaaatcaggaccagcttctcccaccaccttagaatgtgatggtgaggaaggaagaagagggagctattaagggctggcagatggggtagagtttataccctttttcctagatgttggcttagctggggtcatggccaaaacagct

SEQ ID NO: 436909 - DNA, 3044 bp, Homo sapiens
ggcgggcgccgggcgccgggcgcgcggtcctgcgaggagacgtggcagagtgcggctgcgctcgcgccggaccggaaagccggggaagtggccgaggagggagggctgcgagccatggcgaccaagacggcgggcgtggggcggtgggaggtagtgaagaagggtcggcggcctggggtcggcgccggcgccggcggccgaggaggcggcaggaaccgcagggcgctcggggaagcaaacggagtgtggaaatacgacctgacccctgcaatccagaccacaagcaccctttatgagcggggctttgagaatatcatgaagcggcagaataaggagcaggtcccaccccctgctgtggaacctaagaaaccagggaacaagaagcagccaaagaaggtggcaactcctcccaaccaaaaccagaagcagggccgcttccgcagcctggaggaagcactgaaagctctggatgtggcagacctgcagaaggaactggacaagagccagagtgtgttctctggaaacccatccatatggttgaaggacctggccagctatctcaactacaagctacaagctcctctaagtgaacccacgctgagccagcatactcatgattatccctacagcctggtgagccgggagctacgtgggatcatccgagggctgctggcgaaggcagcagggtctctggagctcttttttgaccactgtctgttcaccatgttgcaagagctggataagacaccaggggagtcactacatggttaccgcatctgtatccaggccatcctgcaagacaagcccaagattgccacggcaaacctaggcaagttcctggaactgctgaggtcccaccagagccgaccagcaaagtgtctcaccatcatgtgggccctgggtcaagcaggttttgccaacctcaccgagggactgaaagtgtggctggggatcatgctgcctgtgctgggcatcaagtctctgtctccctttgccatcacatacctggatcggctgctcctgatgcatcccaaccttaccaagggcttcggcatgattggccccaaggacttcttcccacttctggactttgcctatatgccgaacaactccctgacacccagcctgcaggagcagctgtgtcagctctacccccgactgaaagtgctggcatttggagcaaagccggattccaccctgcatacctacttcccttctttcctgtccagagccacccctagctgtccccctgagatgaagaaagagctcctgagcagcctgactgagtgcctgacggtggaccccctcagtgccagcgtctggaggcagctgtaccctaagcacctgtcacagtccagccttctgctggagcacttgctcagctcctgggagcagattcccaagaaggtacagaagtctttgcaagaaaccattcagtccctcaagcttaccaaccaggagctgctgaggaagggtagcagtaacaaccaggatgtcgtcacctgtgacatggcctgcaagggcctgttgcagcaggttcagggtcctcggctgccctggacgcggctcctcctgttgctgctggtcttcgctgtaggcttcctgtgccatgacctccggtcacacagctccttccaggcctcccttactggccggttgcttcgatcatctggcttcttacctgctagccaacaagcgtgtgccaagctctactcctacagtctgcaaggctacagctggctgggggagacactgccgctctggggctcccacctgctcaccgtggtgcggcccagcttgcagctggcctgggctcacaccaatgccacagtcagcttcctttctgcccactgtgcctctcaccttgcgtggtttggtgacagtctcaccagtctctctcagaggctacagatccagctccccgattccgtgaatcagctactccgctatctgagagagctgcccctgcttttccaccagaatgtgctgctgccactgtggcacctcttgcttgaggccctggcctgggcccaggagcactgccatgaggcatgcagaggtgaggtgacctgggactgcatgaagacacagctcagtgaggctgtccactggacctggctttgcctacaggacattacagtggctttcttggactgggcacttgccctgatatcccagcagtaggccctgccttcctggccactgatttctgcatgggtagaccatccaagactgcagcgggtagaaggtggcagttcttcatgggagtctttttaacttggtgcctgagttctctcctaggcaagtggccagttgcctccacctcagttcttccatctttggtggggacagggcccagcagcatctcagcctcctacccacaattccactgaacacttttctggccctactgcacatggcccccagcctccatccttgtgctggtagcctctcacaactccgcccttgccctctgccttccacttccttccatctcatttctaaaccccaaacagctcatctctaaaaagatagaactcccagcaggtggcttctgtgttcttctgacaaatgattcctgcttctccagactttagcagcctcctgttcccattcttggtcacagctctagccacagcagaaggaaaggggcttccagaagaatatagcaccgcattgggaaacagcagcctcacctccacctgaagcctgggtgtggctgtcagtggacatggggagctggatggaaatgcctctcacttcaaaatgcccagcctgccccaaatgcctctaagcccctccctgtcccctcccttgtagtcctacttcttccaactttccattccccatcatgctgggggtcttggtcacaaggctcagcttctctccactgtccatccctcctatcatctgtagagcagagcacaggcagttgtgtgccttgggcccagggaaccctccatcaacctgagacaggactcagtatatggttcttgggtatgccctaccaggtggaataaaggacacagatttgatttctagca

SEQ ID NO: 436910 - DNA, 2872 bp, Homo sapiens
ccgtgcagctgaatgctgctggtcgtatctacgaggtatcccctggtagcgctcgggttaggccaacggagtgtggaaatacgaccttgacccctgcaatccagaccacaagcaccctttatgagcggggctttgagaatatcatgaagcggcagaataaggagcaggtcccaccccctgctgtggaacctaagaaaccagggaacaagaagcagccaaagaaggtggcaactcctcccaaccaaaaccagaagcagggccgcttccgcagcctggaggaagcactgaaagctctggatgtggcagacctgcagaaggaactggacaagagccagagtgtgttctctggaaacccatccatatggttgaaggacctggccagctatctcaactacaagctacaagctcctctaagtgaacccacgctgagccagcatactcatgattatccctacagcctggtgagccgggagctacgtgggatcatccgagggctgctggcgaaggcagcagggtctctggagctcttttttgaccactgtctgttcaccatgttgcaagagctggataagacaccaggggagtcactacatggttaccgcatctgtatccaggccatcctgcaagacaagcccaagattgccacggcaaacctaggcaagttcctggaactgctgaggtcccaccagagccgaccagcaaagtgtctcaccatcatgtgggccctgggtcaagcaggttttgccaacctcaccgagggactgaaagtgtggctggggatcatgctgcctgtgctgggcatcaagtctctgtctccctttgccatcacatacctggatcggctgctcctgatgcatcccaaccttaccaagggcttcggcatgattggccccaaggacttcttcccacttctggactttgcctatatgccgaacaactccctgacacccagcctgcaggagcagctgtgtcagctctacccccgactgaaagtgctggcatttggagcaaagccggattccaccctgcatacctacttcccttctttcctgtccagagccacccctagctgtccccctgagatgaagaaagagctcctgagcagcctgactgagtgcctgacggtggaccccctcagtgccagcgtctggaggcagctgtaccctaagcacctgtcacagtccagccttctgctggagcacttgctcagctcctgggagcagattcccaagaaggtacagaagtctttgcaagaaaccattcagtccctcaagcttaccaaccaggagctgctgaggaagggtagcagtaacaaccaggatgtcgtcacctgtgacatggcctgcaagggcctgttgcagcaggttcagggtcctcggctgccctggacgcggctcctcctgttgctgctggtcttcgctgtaggcttcctgtgccatgacctccggtcacacagctccttccaggcctcccttactggccggttgcttcgatcatctggcttcttacctgctagccaacaagcgtgtgccaagctctactcctacagtctgcaaggctacagctggctgggggagacactgccgctctggggctcccacctgctcaccgtggtgcggcccagcttgcagctggcctgggctcacaccaatgccacagtcagcttcctttctgcccactgtgcctctcaccttgcgtggtttggtgacagtctcaccagtctctctcagaggctacagatccagctccccgattccgtgaatcagctactccgctatctgagagagctgcccctgcttttccaccagaatgtgctgctgccactgtggcacctcttgcttgaggccctggcctgggcccaggagcactgccatgaggcatgcagaggtgaggtgacctgggactgcatgaagacacagctcagtgaggctgtccactggacctggctttgcctacaggacattacagtggctttcttggactgggcacttgccctgatatcccagcagtaggccctgccttcctggccactgatttctgcatgggtagaccatccaagactgcagcgggtagaaggtggcagttcttcatgggagtctttttaacttggtgcctgagttctctcctaggcaagtggccagttgcctccacctcagttcttccatctttggtggggacagggcccagcagcatctcagcctcctacccacaattccactgaacacttttctggccctactgcacatggcccccagcctccatccttgtgctggtagcctctcacaactccgcccttgccctctgccttccacttccttccatctcatttctaaaccccaaacagctcatctctaaaaagatagaactcccagcaggtggcttctgtgttcttctgacaaatgattcctgcttctccagactttagcagcctcctgttcccattcttggtcacagctctagccacagcagaaggaaaggggcttccagaagaatatagcaccgcattgggaaacagcagcctcacctccacctgaagcctgggtgtggctgtcagtggacatggggagctggatggaaatgcctctcacttcaaaatgcccagcctgccccaaatgcctctaagcccctccctgtcccctcccttgtagtcctacttcttccaactttccattccccatcatgctgggggtcttggtcacaaggctcagcttctctccactgtccatccctcctatcatctgtagagcagagcacaggcagttgtgtgccttgggcccagggaaccctccatcaacctgagacaggactcagtatatggttcttgggtatgccctaccaggtggaataaaggacacagatttgatttctagca

SEQ ID NO: 436911 - DNA, 2743 bp, Homo sapiens
agggagagcaccacagttctcagagctgatgggtgtctggtcctagcactcacattgaggcctatgggccttagattatccctacagcctggtgagccgggagctacgtgggatcatccgagggctgctggcgaaggcagcagggtctctggagctcttttttgaccactgtctgttcaccatgttgcaagagctggataagacaccaggtgaaaggggcacgggagggatgaccatcttgggagcctcctcctttttttcctgcttccagtaccactcagtggttctgtttccagcagagaaatgtgctaaccttaacactttttggaaagtgtggaggaagttaggagtcagtggacctggggcctgggctcaccgctgacaaatgggagatttcaggtttgggatgccaaataatgtgagtaggtgtgagaatgtgtatctctccaggggagtcactacatggttaccgcatctgtatccaggccatcctgcaagacaagcccaagattgccacggcaaacctaggcaagttcctggaactgctgaggtcccaccagagccgaccagcaaagtgtctcaccatcatgtgggccctgggtcaagcaggttttgccaacctcaccgagggactgaaagtgtggctggggatcatgctgcctgtgctgggcatcaagtctctgtctccctttgccatcacatacctggatcggctgctcctgatgcatcccaaccttaccaagggcttcggcatgattggccccaaggacttcttcccacttctggactttgcctatatgccgaacaactccctgacacccagcctgcaggagcagctgtgtcagctctacccccgactgaaagtgctggcatttggagcaaagccggattccaccctgcatacctacttcccttctttcctgtccagagccacccctagctgtccccctgagatgaagaaagagctcctgagcagcctgactgagtgcctgacggtggaccccctcagtgccagcgtctggaggcagctgtaccctaagcacctgtcacagtccagccttctgctggagcacttgctcagctcctgggagcagattcccaagaaggtacagaagtctttgcaagaaaccattcagtccctcaagcttaccaaccaggagctgctgaggaagggtagcagtaacaaccaggatgtcgtcacctgtgacatggcctgcaagggcctgttgcagcaggttcagggtcctcggctgccctggacgcggctcctcctgttgctgctggtcttcgctgtaggcttcctgtgccatgacctccggtcacacagctccttccaggcctcccttactggccggttgcttcgatcatctggcttcttacctgctagccaacaagcgtgtgccaagctctactcctacagtctgcaaggctacagctggctgggggagacactgccgctctggggctcccacctgctcaccgtggtgcggcccagcttgcagctggcctgggctcacaccaatgccacagtcagcttcctttctgcccactgtgcctctcaccttgcgtggtttggtgacagtctcaccagtctctctcagaggctacagatccagctccccgattccgtgaatcagctactccgctatctgagagagctgcccctgcttttccaccagaatgtgctgctgccactgtggcacctcttgcttgaggccctggcctgggcccaggagcactgccatgaggcatgcagaggtgaggtgacctgggactgcatgaagacacagctcagtgaggctgtccactggacctggctttgcctacaggacattacagtggctttcttggactgggcacttgccctgatatcccagcagtaggccctgccttcctggccactgatttctgcatgggtagaccatccaagactgcagcgggtagaaggtggcagttcttcatgggagtctttttaacttggtgcctgagttctctcctaggcaagtggccagttgcctccacctcagttcttccatctttggtggggacagggcccagcagcatctcagcctcctacccacaattccactgaacacttttctggccctactgcacatggcccccagcctccatccttgtgctggtagcctctcacaactccgcccttgccctctgccttccacttccttccatctcatttctaaaccccaaacagctcatctctaaaaagatagaactcccagcaggtggcttctgtgttcttctgacaaatgattcctgcttctccagactttagcagcctcctgttcccattcttggtcacagctctagccacagcagaaggaaaggggcttccagaagaatatagcaccgcattgggaaacagcagcctcacctccacctgaagcctgggtgtggctgtcagtggacatggggagctggatggaaatgcctctcacttcaaaatgcccagcctgccccaaatgcctctaagcccctccctgtcccctcccttgtagtcctacttcttccaactttccattccccatcatgctgggggtcttggtcacaaggctcagcttctctccactgtccatccctcctatcatctgtagagcagagcacaggcagttgtgtgccttgggcccagggaaccctccatcaacctgagacaggactcagtatatggttcttgggtatgccctaccaggtggaataaaggacacagatttgatttctagca

SEQ ID NO: 436912 - DNA, 3147 bp, Homo sapiens
ggcgggcgccgggcgccgggcgcgcggtcctgcgaggagacgtggcagagtgcggctgcgctcgcgccggaccggaaagccggggaagtggccgaggagggagggctgcgagccatggcgaccaagacggcgggcgtggggcggtgggaggtagtgaagaagggtcggcggcctggggtcggcgccggcgccggcggccgaggaggcggcaggaaccgcagggcgctcggggaagcaaacggagtgtggaaatacgacctgacccctgcaatccagaccacaagcaccctttatgagcggggctttgagaatatcatgaagcggcagaataaggagcaggtcccaccccctgctgtggaacctaagaaaccagggaacaagaagcagccaaagaaggtggcaactcctcccaaccaaaaccagaagcagggccgcttccgcagcctggaggaagcactgaaagctctggatgtggcagacctgcagaaggaactggacaagagccagagtgtgttctctggaaacccatccatatggttgaaggacctggccagctatctcaactacaagctacaagctcctctaagtgaacccacgctgagccagcatactcatgattatccctacagcctggtgagccgggagctacgtgggatcatccgagggctgctggcgaaggcagcagggtctctggagctcttttttgaccactgtctgttcaccatgttgcaagagctggataagacaccaggggagtcactacatggttaccgcatctgtatccaggccatcctgcaagacaagcccaagattgccacggcaaacctaggcaagttcctggaactgctgaggtcccaccagagccgaccagcaaagtgtctcaccatcatgtgggccctgggtcaagcaggttttgccaacctcaccgagggactgaaagtgtggctggggatcatgctgcctgtgctgggcatcaagtctctgtctccctttgccatcacatacctggatcggctgctcctgatgcatcccaaccttaccaagggcttcggcatgattggccccaaggacttcttcccacttctggactttgcctatatgccgaacaactccctgacacccagcctgcaggagcagctgtgtcagctctacccccgactgaaagtgctggcatttggagcaaagccggattccaccctgcatacctacttcccttctttcctgtccagagccacccctagctgtccccctgagatgaagaaagagagcccattctgaggcttttccttagctccctgttgacagctgcctgccccgctcactcgagcttcaccctcagaagatggatcccaagagacagcacattcagctcctgagcagcctgactgagtgcctgacggtggaccccctcagtgccagcgtctggaggcagctgtaccctaagcacctgtcacagtccagccttctgctggagcacttgctcagctcctgggagcagattcccaagaaggtacagaagtctttgcaagaaaccattcagtccctcaagcttaccaaccaggagctgctgaggaagggtagcagtaacaaccaggatgtcgtcacctgtgacatggcctgcaagggcctgttgcagcaggttcagggtcctcggctgccctggacgcggctcctcctgttgctgctggtcttcgctgtaggcttcctgtgccatgacctccggtcacacagctccttccaggcctcccttactggccggttgcttcgatcatctggcttcttacctgctagccaacaagcgtgtgccaagctctactcctacagtctgcaaggctacagctggctgggggagacactgccgctctggggctcccacctgctcaccgtggtgcggcccagcttgcagctggcctgggctcacaccaatgccacagtcagcttcctttctgcccactgtgcctctcaccttgcgtggtttggtgacagtctcaccagtctctctcagaggctacagatccagctccccgattccgtgaatcagctactccgctatctgagagagctgcccctgcttttccaccagaatgtgctgctgccactgtggcacctcttgcttgaggccctggcctgggcccaggagcactgccatgaggcatgcagaggtgaggtgacctgggactgcatgaagacacagctcagtgaggctgtccactggacctggctttgcctacaggacattacagtggctttcttggactgggcacttgccctgatatcccagcagtaggccctgccttcctggccactgatttctgcatgggtagaccatccaagactgcagcgggtagaaggtggcagttcttcatgggagtctttttaacttggtgcctgagttctctcctaggcaagtggccagttgcctccacctcagttcttccatctttggtggggacagggcccagcagcatctcagcctcctacccacaattccactgaacacttttctggccctactgcacatggcccccagcctccatccttgtgctggtagcctctcacaactccgcccttgccctctgccttccacttccttccatctcatttctaaaccccaaacagctcatctctaaaaagatagaactcccagcaggtggcttctgtgttcttctgacaaatgattcctgcttctccagactttagcagcctcctgttcccattcttggtcacagctctagccacagcagaaggaaaggggcttccagaagaatatagcaccgcattgggaaacagcagcctcacctccacctgaagcctgggtgtggctgtcagtggacatggggagctggatggaaatgcctctcacttcaaaatgcccagcctgccccaaatgcctctaagcccctccctgtcccctcccttgtagtcctacttcttccaactttccattccccatcatgctgggggtcttggtcacaaggctcagcttctctccactgtccatccctcctatcatctgtagagcagagcacaggcagttgtgtgccttgggcccagggaaccctccatcaacctgagacaggactcagtatatggttcttgggtatgccctaccaggtggaataaaggacacagatttgatttctagca

SEQ ID NO: 436913 - DNA, 2947 bp, Homo sapiens
ggcgggcgccgggcgccgggcgcgcggtcctgcgaggagacgtggcagagtgcggctgcgctcgcgccggaccggaaagccggggaagtggccgaggagggagggctgcgagccatggcgaccaagacggcgggcgtggggcggtgggaggtagtgaagaagggtcggcggcctggggtcggcgccggcgccggcggccgaggaggcggcaggaaccgcagggcgctcggggaagcaaacggagtgtggaaatacgacctgacccctgcaatccagaccacaagcaccctttatgagcggggctttgagaatatcatgaagcggcagaataaggagcaggtcccaccccctgctgtggaacctaagaaaccagggaacaagaagcagccaaagaaggtggcaactcctcccaaccaaaaccagaagcagggccgcttccgcagcctggaggaagcactgaaagctctggatgtggcagacctgcagaaggaactggacaagagccagagtgtgttctctggaaacccatccatatggttgaaggacctggccagctatctcaactacaagctacaagctcctctaagtgaacccacgctgagccagcatactcatgattatccctacagcctggtgagccgggagctacgtgggatcatccgagggctgctggcgaaggcagcagggtctctggagctcttttttgaccactgtctgttcaccatgttgcaagagctggataagacaccaggggagtcactacatggttaccgcatctgtatccaggccatcctgcaagacaagcccaagattgccacggcaaacctaggcaagttcctggaactgctgaggtcccaccagagccgaccagcaaagtgtctcaccatcatgtgggccctgggtcaagcaggttttgccaacctcaccgagggactgaaagtgtggctggggatcatgctgcctgtgctgggcatcaagtctctgtctccctttgccatcacatacctggatcggctgctcctgatgcatcccaaccttaccaagggcttcggcatgattggccccaaggacttcttcccacttctggactttgcctatatgccgaacaactccctgacacccagcctgcaggagcagctgtgtcagctctacccccgactgaaagtgctggcatttggagcaaagccggattccaccctgcatacctacttcccttctttcctgtccagagccacccctagctgtccccctgagatgaagaaagagctcctgagcagcctgactgagtgcctgacggtggaccccctcagtgccagcgtctggaggcagctgtaccctaagcacctgtcacagtccagccttctgctggagcacttgctcagctcctgggagcagattcccaagaaggtacagaagtctttgcaagaaaccattcagtccctcaagcttaccaaccaggagctgctgaggaagggtagcagtaacaaccaggatgtcgtcacctgtgacatggcctgcaagggcctgttgcagcaggttcagggtcctcggctgccctggacgcggctcctcctgttgctgctggtcttcgctgtaggcttcctgtgccatgacctccggtcacacagctccttccaggctggctgggggagacactgccgctctggggctcccacctgctcaccgtggtgcggcccagcttgcagctggcctgggctcacaccaatgccacagtcagcttcctttctgcccactgtgcctctcaccttgcgtggtttggtgacagtctcaccagtctctctcagaggctacagatccagctccccgattccgtgaatcagctactccgctatctgagagagctgcccctgcttttccaccagaatgtgctgctgccactgtggcacctcttgcttgaggccctggcctgggcccaggagcactgccatgaggcatgcagaggtgaggtgacctgggactgcatgaagacacagctcagtgaggctgtccactggacctggctttgcctacaggacattacagtggctttcttggactgggcacttgccctgatatcccagcagtaggccctgccttcctggccactgatttctgcatgggtagaccatccaagactgcagcgggtagaaggtggcagttcttcatgggagtctttttaacttggtgcctgagttctctcctaggcaagtggccagttgcctccacctcagttcttccatctttggtggggacagggcccagcagcatctcagcctcctacccacaattccactgaacacttttctggccctactgcacatggcccccagcctccatccttgtgctggtagcctctcacaactccgcccttgccctctgccttccacttccttccatctcatttctaaaccccaaacagctcatctctaaaaagatagaactcccagcaggtggcttctgtgttcttctgacaaatgattcctgcttctccagactttagcagcctcctgttcccattcttggtcacagctctagccacagcagaaggaaaggggcttccagaagaatatagcaccgcattgggaaacagcagcctcacctccacctgaagcctgggtgtggctgtcagtggacatggggagctggatggaaatgcctctcacttcaaaatgcccagcctgccccaaatgcctctaagcccctccctgtcccctcccttgtagtcctacttcttccaactttccattccccatcatgctgggggtcttggtcacaaggctcagcttctctccactgtccatccctcctatcatctgtagagcagagcacaggcagttgtgtgccttgggcccagggaaccctccatcaacctgagacaggactcagtatatggttcttgggtatgccctaccaggtggaataaaggacacagatttgatttctagca

SEQ ID NO: 436914 - DNA, 1442 bp, Homo sapiens
ggcgggcgccgggcgccgggcgcgcggtcctgcgaggagacgtggcagagtgcggctgcgctcgcgccggaccggaaagccggggaagtggccgaggagggagggctgcgagccatggcgaccaagacggcgggcgtggggcggtgggaggtagtgaagaagggtcggcggcctggggtcggcgccggcgccggcggccgaggaggcggcaggaaccgcagggcgctcggggaagcaaacggagtgtggaaatacgacctgacccctgcaatccagaccacaagcaccctttatgagcggggctttgagaatatcatgaagcggcagaataaggagcaggtcccaccccctgctgtggaacctaagaaaccagggaacaagaagcagccaaagaaggtggcaactcctcccaaccaaaaccagaagcagggccgcttccgcagcctggaggaagcactgaaagctctggatgtggcagacctgcagaaggaactggacaagagccagagtgtgttctctggaaacccatccatatggttgaaggacctggccagctatctcaactacaagctacaagctcctctaagtgaacccacgctgagccagcatactcatgattatccctacagcctggtgagccgggagctacgtgggatcatccgagggctgctggcgaaggcagcagggtctctggagctcttttttgaccactgtctgttcaccatgttgcaagagctggataagacaccaggggagtcactacatggttaccgcatctgtatccaggccatcctgcaagacaagcccaagattgccacggcaaacctaggcaagttcctggaactgctgaggtcccaccagagccgaccagcaaagtgtctcaccatcatgtgggccctgggtcaagcaggttttgccaacctcaccgagggactgaaagtgtggctggggatcatgctgcctgtgctgggcatcaagtctctgtctccctttgccatcacatacctggatcggctgctcctgatgcatcccaaccttaccaagggcttcggcatgattggccccaaggacttcttcccacttctggactttgcctatatgccgaacaactccctgacacccagcctgcaggagcagctgtgtcagctctacccccgactgaaagtgctggcatttggagcaaagccggattccaccctgcatacctacttcccttctttcctgtccagagccacccctagctgtccccctgagatgaagaaagagctcctgagcagcctgactgagtgcctgacggtggaccccctcagtgccagcgtctggaggcagctgtaccctaagcacctgtcacagtccagccttctgctggagcacttgctcagctcctgggagcagattcccaagaaggtgaggagctgggaggacgtggcaggttgagccct

SEQ ID NO: 436915 - DNA, 1288 bp, Homo sapiens
ggcgggcgccgggcgccgggcgcgcggtcctgcgaggagacgtggcagagtgcggctgcgctcgcgccggaccggaaagccggggaagtggccgaggagggagggctgcgagccatggcgaccaagacggcgggcgtggggcggtgggaggtagtgaagaagggtcggcggcctggggtcggcgccggcgccggcggccgaggaggcggcaggaaccgcagggcgctcggggaagcaaacggagtgtggaaatacgacctgacccctgcaatccagaccacaagcaccctttatgagcggggctttgagaatatcatgaagcggcagaataaggagcaggtcccaccccctgctgtggaacctaagaaaccagggaacaagaagcagccaaagaaggtggcaactcctcccaaccaaaaccagaagcagggccgcttccgcagcctggaggaagcactgaaagctctggatgtggcagacctgcagaaggaactggacaagagccagagtgtgttctctggaaacccatccatatggttgaaggacctggccagctatctcaactacaagctacaagctcctctaagtgaacccacgctgagccagcatactcatgattatccctacagcctggtgagccgggagctacgtgggatcatccgagggctgctggcgaaggcagcagggtctctggagctcttttttgaccactgtctgttcaccatgttgcaagagctggataagacaccaggggagtcactacatggttaccgcatctgtatccaggccatcctgcaagacaagcccaagattgccacggcaaacctaggcaagttcctggaactgctgaggtcccaccagagccgaccagcaaagtgtctcaccatcatgtgggccctgggtcaagcaggttttgccaacctcaccgagggactgaaagtgtggctggggatcatgctgcctgtgctgggcatcaagtctctgtctccctttgccatcacatacctggatcggctgctcctgatgcatcccaaccttaccaagggcttcggcatgattggccccaaggattcttccaactttccattccccatcatgctgggggtcttggtcacaaggctcagcttctctccactgtccatccctcctatcatctgtagagcagagcacaggcagttgtgtgccttgggcccagggaaccctccatcaacctgagacaggactcagtatatggttcttgggtatgccctaccaggtggaataaaggacacagatttgatttctagca

SEQ ID NO: 436916 - DNA, 844 bp, Homo sapiens
ggcgggcgccgggcgccgggcgcgcggtcctgcgaggagacgtggcagagtgcggctgcgctcgcgccggaccggaaagccggggaagtggccgaggagggagggctgcgagccatggcgaccaagacggcgggcgtggggcggtgggaggtagtgaagaagggtcggcggcctggggtcggcgccggcgccggcggccgaggaggcggcaggaaccgcagggcgctcggggaagcaaacggagtgtggaaatacgacctgacccctgcaatccagaccacaagcaccctttatgagcggggctttgagaatatcatgaagcggcagaataaggagcaggtcccaccccctgctgtggaacctaagaaaccagggaacaagaagcagccaaagaaggtggcaactcctcccaaccaaaaccagaagcagggccgcttccgcagcctggaggaagcactgaaagctctggatgtggcagacctgcagaaggaactggacaagagccagagtgtgttctctggaaacccatccatatggttgaaggacctggccagctatctcaactacaagctacaagctcctctaagtgaacccacgctgagccagcatactcatgattatccctacagcctggtgagccgggagctacgtgggatcatccgagggctgctggcgaaggcagcagggtctctggagctcttttttgaccactgtctgttcaccatgttgcaagagctggataagacaccagggaaccctccatcaacctgagacaggactcagtatatggttcttgggtatgccctaccaggtggaataaaggacacagatttgatttctagca

SEQ ID NO: 436917 - DNA, 2332 bp, Homo sapiens
ggcaggtcccggccgccgggaggaagtggccgggcggtcgcaggactccggggcgaccgccgcgagtccgcagtagttcgggccatggaggcggagccgccgctctacccgatggcgggggctgcggggccgcagggcgacgaggacctgctcggggtcccggacgggcccgaggccccgctggacgagctggtgggcgcgtaccccaactacaacgaggaggaggaggagcgccgctactaccgccgcaagcgcctgggcgtgctcaagaacgtgctggctgccagcgccgggggcatgctcacctacggcgtctacctgggcctcctgcagatgcagctgatcctgcactacgacgagacctaccgcgaggtgaagtatggcaacatggggctgcccgacatcgacagcaaaatgctgatgggcatcaacgtgactcccatcgccgccctgctctacacacctgtgctcatcaggttttttggaacgaagtggatgatgttcctcgctgtgggcatctacgccctctttgtctccaccaactactgggagcgctactacacgcttgtgccctcggctgtggccctgggcatggccatcgtgcctctttgggcttccatgggcaactacatcaccaggatggcgcagaagtaccatgagtactcccactacaaggagcaggatgggcaggggatgaagcagcggcctccgcggggctcccacgcgccctatctcctggtcttccaagccatcttctacagcttcttccatctgagcttcgcctgcgcccagctgcccatgatttatttcctgaaccactacctgtatgacctgaaccacacgctgtacaatgtgcagagctgcggcaccaacagccacgggatcctcagcggcttcaacaagacggttctgcggacgctcccgcggagcggaaacctcattgtggtggagagcgtgctcatggcagtggccttcctggccatgctgctggtgctgggtttgtgcggagccgcttaccggcccacggaggagatcgatctgcgcagcgtgggctggggcaacatcttccagctgcccttcaagcacgtgcgtgactaccgcctgcgccacctcgtgcctttctttatctacagcggcttcgaggtgctctttgcctgcactggtatcgccttgggctatggcgtgtgctcggtggggctggagcggctggcttacctcctcgtggcttacagcctgggcgcctcagccgcctcactcctgggcctgctgggcctgtggctgccacgcccggtgcccctggtggccggagcaggggtgcacctgctgctcaccttcatcctctttttctgggcccctgtgcctcgggtcctgcaacacagctggatcctctatgtggcagctgccctttggggtgtgggcagtgccctgaacaagactggactcagcacactcctgggaatcttgtacgaagacaaggagagacaggacttcatcttcaccatctaccactggtggcaggctgtggccatcttcaccgtgtacctgggctcgagcctgcacatgaaggctaagctggcggtgctgctggtgacgctggtggcggccgcggtctcctacctgcggatggagcagaagctgcgccggggcgtggccccgcgccagccccgcatcccgcggccccagcacaaggtgcgcggttaccgctacttggaggaggacaactcggacgagagcgacgcggagggcgagcatggggacggcgcggaggaggaggcgccgcccgcagggcccaggcctggccccgagcccgctggactcggccgccggccctgcccgtacgaacaggcgcaggggggagacgggccggaggagcagtgaggggccgcctggtccccggactcagcctccctcctcgccggcctcagtttaccacgtctgaggtcggggggaccccctccgagtcccgcgctgtcttcaaaggcccctgtctcccctcccccacgttggggacgcccctcccagagcccaggtcacctccgggcttccgcagccccctccaaggcggagtggagccttgggaacccctcggccaagcacaggggttcgaaaatacagctgaaaccccgcgggcccttagcacgcgccccagcgccggagcacggtcagggtcttcttgcgacccggcccgctccagatccccacagctctcggccgcggacccgggccgcgtgtgagcgcactttgcacctcctatccccagggtccgccgagagccacgattttttacagaaaatgagcaataaagagattttgtactgtcaaaaacctcgtg

SEQ ID NO: 436918 - DNA, 2422 bp, Homo sapiens
ggctggtacgcctgggatttgggatcatggaggcggagccgccgctctacccgatggcgggggctgcggggccgcagggcgacgaggacctgctcggggtcccggacgggcccgaggccccggtgagcggggacccggagtgcgaggcgcgggcgtcccctgtgggccaggtccccccggcgggggcggggcgggccggggggcggcgggcaccgggggacacgggttcggggcgcgatcgcgggtgcgagcggcgtgcgtggctcgcagctggacgagctggtgggcgcgtaccccaactacaacgaggaggaggaggagcgccgctactaccgccgcaagcgcctgggcgtgctcaagaacgtgctggctgccagcgccgggggcatgctcacctacggcgtctacctgggcctcctgcagatgcagctgatcctgcactacgacgagacctaccgcgaggtgaagtatggcaacatggggctgcccgacatcgacagcaaaatgctgatgggcatcaacgtgactcccatcgccgccctgctctacacacctgtgctcatcaggttttttggaacgaagtggatgatgttcctcgctgtgggcatctacgccctctttgtctccaccaactactgggagcgctactacacgcttgtgccctcggctgtggccctgggcatggccatcgtgcctctttgggcttccatgggcaactacatcaccaggatggcgcagaagtaccatgagtactcccactacaaggagcaggatgggcaggggatgaagcagcggcctccgcggggctcccacgcgccctatctcctggtcttccaagccatcttctacagcttcttccatctgagcttcgcctgcgcccagctgcccatgatttatttcctgaaccactacctgtatgacctgaaccacacgctgtacaatgtgcagagctgcggcaccaacagccacgggatcctcagcggcttcaacaagacggttctgcggacgctcccgcggagcggaaacctcattgtggtggagagcgtgctcatggcagtggccttcctggccatgctgctggtgctgggtttgtgcggagccgcttaccggcccacggaggagatcgatctgcgcagcgtgggctggggcaacatcttccagctgcccttcaagcacgtgcgtgactaccgcctgcgccacctcgtgcctttctttatctacagcggcttcgaggtgctctttgcctgcactggtatcgccttgggctatggcgtgtgctcggtggggctggagcggctggcttacctcctcgtggcttacagcctgggcgcctcagccgcctcactcctgggcctgctgggcctgtggctgccacgcccggtgcccctggtggccggagcaggggtgcacctgctgctcaccttcatcctctttttctgggcccctgtgcctcgggtcctgcaacacagctggatcctctatgtggcagctgccctttggggtgtgggcagtgccctgaacaagactggactcagcacactcctgggaatcttgtacgaagacaaggagagacaggacttcatcttcaccatctaccactggtggcaggctgtggccatcttcaccgtgtacctgggctcgagcctgcacatgaaggctaagctggcggtgctgctggtgacgctggtggcggccgcggtctcctacctgcggatggagcagaagctgcgccggggcgtggccccgcgccagccccgcatcccgcggccccagcacaaggtgcgcggttaccgctacttggaggaggacaactcggacgagagcgacgcggagggcgagcatggggacggcgcggaggaggaggcgccgcccgcagggcccaggcctggccccgagcccgctggactcggccgccggccctgcccgtacgaacaggcgcaggggggagacgggccggaggagcagtgaggggccgcctggtccccggactcagcctccctcctcgccggcctcagtttaccacgtctgaggtcggggggaccccctccgagtcccgcgctgtcttcaaaggcccctgtctcccctcccccacgttggggacgcccctcccagagcccaggtcacctccgggcttccgcagccccctccaaggcggagtggagccttgggaacccctcggccaagcacaggggttcgaaaatacagctgaaaccccgcgggcccttagcacgcgccccagcgccggagcacggtcagggtcttcttgcgacccggcccgctccagatccccacagctctcggccgcggacccgggccgcgtgtgagcgcactttgcacctcctatccccagggtccgccgagagccacgattttttacagaaaatgagcaataaagagattttgtactgtcaaaaacctcgtg

SEQ ID NO: 436919 - DNA, 2305 bp, Homo sapiens
ccagagcctcggtgtgggtgggggacgggggtcctgggctcccggacagacctgccaccgtcagaattggaggccggcggagcaaggcgggtgggggtctgggcttagctggccaagtggccgcgggctggcagaaggcgtggcgcagcccgggaaccccgctgtcctgaggggcgctgtcagcgggaatgccttcggtgattggagctccctgcgaggcctgcatgccgtcttctgctcggtggcgcccaaagctaggctgctccctgcacgccgctctctgtcctgtccccaggcctcctgcagatgcagctgatcctgcactacgacgagacctaccgcgaggtgaagtatggcaacatggggctgcccgacatcgacagcaaaatgctgatgggcatcaacgtgactcccatcgccgccctgctctacacacctgtgctcatcaggttttttggaacgaagtggatgatgttcctcgctgtgggcatctacgccctctttgtctccaccaactactgggagcgctactacacgcttgtgccctcggctgtggccctgggcatggccatcgtgcctctttgggcttccatgggcaactacatcaccaggatggcgcagaagtaccatgagtactcccactacaaggagcaggatgggcaggggatgaagcagcggcctccgcggggctcccacgcgccctatctcctggtcttccaagccatcttctacagcttcttccatctgagcttcgcctgcgcccagctgcccatgatttatttcctgaaccactacctgtatgacctgaaccacacgctgtacaatgtgcagagctgcggcaccaacagccacgggatcctcagcggcttcaacaagacggttctgcggacgctcccgcggagcggaaacctcattgtggtggagagcgtgctcatggcagtggccttcctggccatgctgctggtgctgggtttgtgcggagccgcttaccggcccacggaggagatcgatctgcgcagcgtgggctggggcaacatcttccagctgcccttcaagcacgtgcgtgactaccgcctgcgccacctcgtgcctttctttatctacagcggcttcgaggtgctctttgcctgcactggtatcgccttgggctatggcgtgtgctcggtggggctggagcggctggcttacctcctcgtggcttacagcctgggcgcctcagccgcctcactcctgggcctgctgggcctgtggctgccacgcccggtgcccctggtggccggagcaggggtgcacctgctgctcaccttcatcctctttttctgggcccctgtgcctcgggtcctgcaacacagctggatcctctatgtggcagctgccctttggggtgtgggcagtgccctgaacaagactggactcagcacactcctgggaatcttgtacgaagacaaggagagacaggacttcatcttcaccatctaccactggtggcaggctgtggccatcttcaccgtgtacctgggctcgagcctgcacatgaaggctaagctggcggtgctgctggtgacgctggtggcggccgcggtctcctacctgcggatggagcagaagctgcgccggggcgtggccccgcgccagccccgcatcccgcggccccagcacaaggtgcgcggttaccgctacttggaggaggacaactcggacgagagcgacgcggagggcgagcatggggacggcgcggaggaggaggcgccgcccgcagggcccaggcctggccccgagcccgctggactcggccgccggccctgcccgtacgaacaggcgcaggggggagacgggccggaggagcagtgaggggccgcctggtccccggactcagcctccctcctcgccggcctcagtttaccacgtctgaggtcggggggaccccctccgagtcccgcgctgtcttcaaaggcccctgtctcccctcccccacgttggggacgcccctcccagagcccaggtcacctccgggcttccgcagccccctccaaggcggagtggagccttgggaacccctcggccaagcacaggggttcgaaaatacagctgaaaccccgcgggcccttagcacgcgccccagcgccggagcacggtcagggtcttcttgcgacccggcccgctccagatccccacagctctcggccgcggacccgggccgcgtgtgagcgcactttgcacctcctatccccagggtccgccgagagccacgattttttacagaaaatgagcaataaagagattttgtactgtcaaaaacctcgtg

SEQ ID NO: 436920 - DNA, 2061 bp, Homo sapiens
agtgtagggcataggagacagtgccgatctatgagcgtctaactgaggctctcatttcagtatatcattgtatattgctagtagctgagacctaccgcgaggtgaagtatggcaacatggggctgcccgacatcgacagcaaaatgctgatgggcatcaacgtgactcccatcgccgccctgctctacacacctgtgctcatcaggttttttggaacgaagtggatgatgttcctcgctgtgggcatctacgccctctttgtctccaccaactactgggagcgctactacacgcttgtgccctcggctgtggccctgggcatggccatcgtgcctctttgggcttccatgggcaactacatcaccaggatggcgcagaagtaccatgagtactcccactacaaggagcaggatgggcaggggatgaagcagcggcctccgcggggctcccacgcgccctatctcctggtcttccaagccatcttctacagcttcttccatctgagcttcgcctgcgcccagctgcccatgatttatttcctgaaccactacctgtatgacctgaaccacacgctgtacaatgtgcagagctgcggcaccaacagccacgggatcctcagcggcttcaacaagacggttctgcggacgctcccgcggagcggaaacctcattgtggtggagagcgtgctcatggcagtggccttcctggccatgctgctggtgctgggtttgtgcggagccgcttaccggcccacggaggagatcgatctgcgcagcgtgggctggggcaacatcttccagctgcccttcaagcacgtgcgtgactaccgcctgcgccacctcgtgcctttctttatctacagcggcttcgaggtgctctttgcctgcactggtatcgccttgggctatggcgtgtgctcggtggggctggagcggctggcttacctcctcgtggcttacagcctgggcgcctcagccgcctcactcctgggcctgctgggcctgtggctgccacgcccggtgcccctggtggccggagcaggggtgcacctgctgctcaccttcatcctctttttctgggcccctgtgcctcgggtcctgcaacacagctggatcctctatgtggcagctgccctttggggtgtgggcagtgccctgaacaagactggactcagcacactcctgggaatcttgtacgaagacaaggagagacaggacttcatcttcaccatctaccactggtggcaggctgtggccatcttcaccgtgtacctgggctcgagcctgcacatgaaggctaagctggcggtgctgctggtgacgctggtggcggccgcggtctcctacctgcggatggagcagaagctgcgccggggcgtggccccgcgccagccccgcatcccgcggccccagcacaaggtgcgcggttaccgctacttggaggaggacaactcggacgagagcgacgcggagggcgagcatggggacggcgcggaggaggaggcgccgcccgcagggcccaggcctggccccgagcccgctggactcggccgccggccctgcccgtacgaacaggcgcaggggggagacgggccggaggagcagtgaggggccgcctggtccccggactcagcctccctcctcgccggcctcagtttaccacgtctgaggtcggggggaccccctccgagtcccgcgctgtcttcaaaggcccctgtctcccctcccccacgttggggacgcccctcccagagcccaggtcacctccgggcttccgcagccccctccaaggcggagtggagccttgggaacccctcggccaagcacaggggttcgaaaatacagctgaaaccccgcgggcccttagcacgcgccccagcgccggagcacggtcagggtcttcttgcgacccggcccgctccagatccccacagctctcggccgcggacccgggccgcgtgtgagcgcactttgcacctcctatccccagggtccgccgagagccacgattttttacagaaaatgagcaataaagagattttgtactgtcaaaaacctcgtg

SEQ ID NO: 436921 - DNA, 2402 bp, Homo sapiens
ggcaggtcccggccgccgggaggaagtggccgggcggtcgcaggactccggggcgaccgccgcgagtccgcagtagttcgggccatggaggcggagccgccgctctacccgatggcgggggctgcggggccgcagggcgacgaggacctgctcggggtcccggacgggcccgaggccccgctggacgagctggtgggcgcgtaccccaactacaacgaggaggaggaggagcgccgctactaccgccgcaagcgcctgggcgtgctcaagaacgtgctggctgccagcgccgggggcatgctcacctacggcgtctacctgggcctcctgcagatgcagctgatcctgcactacgacgagacctaccgcgaggtgaagtatggcaacatggggctgcccgacatcgacagcaaaatgctgatgggcatcaacgtgactcccatcgccgccctgctctacacacctgtgctcatcaggttttttggaacgaagtggatgatgttcctcgctgtgggcatctacgccctctttgtctccaccaactactgggagcgctactacacgcttgtgccctcggctgtggccctgggcatggccatcgtgcctctttgggcttccatgggcaactacatcaccagctctgggtgcaggacacacaggagtggcacaggtcgggctggggagagccttctctcctttgtggtccaggatggcgcagaagtaccatgagtactcccactacaaggagcaggatgggcaggggatgaagcagcggcctccgcggggctcccacgcgccctatctcctggtcttccaagccatcttctacagcttcttccatctgagcttcgcctgcgcccagctgcccatgatttatttcctgaaccactacctgtatgacctgaaccacacgctgtacaatgtgcagagctgcggcaccaacagccacgggatcctcagcggcttcaacaagacggttctgcggacgctcccgcggagcggaaacctcattgtggtggagagcgtgctcatggcagtggccttcctggccatgctgctggtgctgggtttgtgcggagccgcttaccggcccacggaggagatcgatctgcgcagcgtgggctggggcaacatcttccagctgcccttcaagcacgtgcgtgactaccgcctgcgccacctcgtgcctttctttatctacagcggcttcgaggtgctctttgcctgcactggtatcgccttgggctatggcgtgtgctcggtggggctggagcggctggcttacctcctcgtggcttacagcctgggcgcctcagccgcctcactcctgggcctgctgggcctgtggctgccacgcccggtgcccctggtggccggagcaggggtgcacctgctgctcaccttcatcctctttttctgggcccctgtgcctcgggtcctgcaacacagctggatcctctatgtggcagctgccctttggggtgtgggcagtgccctgaacaagactggactcagcacactcctgggaatcttgtacgaagacaaggagagacaggacttcatcttcaccatctaccactggtggcaggctgtggccatcttcaccgtgtacctgggctcgagcctgcacatgaaggctaagctggcggtgctgctggtgacgctggtggcggccgcggtctcctacctgcggatggagcagaagctgcgccggggcgtggccccgcgccagccccgcatcccgcggccccagcacaaggtgcgcggttaccgctacttggaggaggacaactcggacgagagcgacgcggagggcgagcatggggacggcgcggaggaggaggcgccgcccgcagggcccaggcctggccccgagcccgctggactcggccgccggccctgcccgtacgaacaggcgcaggggggagacgggccggaggagcagtgaggggccgcctggtccccggactcagcctccctcctcgccggcctcagtttaccacgtctgaggtcggggggaccccctccgagtcccgcgctgtcttcaaaggcccctgtctcccctcccccacgttggggacgcccctcccagagcccaggtcacctccgggcttccgcagccccctccaaggcggagtggagccttgggaacccctcggccaagcacaggggttcgaaaatacagctgaaaccccgcgggcccttagcacgcgccccagcgccggagcacggtcagggtcttcttgcgacccggcccgctccagatccccacagctctcggccgcggacccgggccgcgtgtgagcgcactttgcacctcctatccccagggtccgccgagagccacgattttttacagaaaatgagcaataaagagattttgtactgtcaaaaacctcgtg

SEQ ID NO: 436922 - DNA, 1335 bp, Homo sapiens
ggctggtacaggtcggagattttaggatggaggagatcgatctgcgcagcgtgggctggggcaacatcttccagctgcccttcaagcacgtgcgtgactaccgcctgcgccacctcgtgcctttctttatctacagcggcttcgaggtgctctttgcctgcactggtatcgccttgggctatggcgtgtgctcggtggggctggagcggctggcttacctcctcgtggcttacagcctgggcgcctcagccgcctcactcctgggcctgctgggcctgtggctgccacgcccggtgcccctggtggccggagcaggggtgcacctgctgctcaccttcatcctctttttctgggcccctgtgcctcgggtcctgcaacacagctggatcctctatgtggcagctgccctttggggtgtgggcagtgccctgaacaagactggactcagcacactcctgggaatcttgtacgaagacaaggagagacaggacttcatcttcaccatctaccactggtggcaggctgtggccatcttcaccgtgtacctgggctcgagcctgcacatgaaggctaagctggcggtgctgctggtgacgctggtggcggccgcggtctcctacctgcggatggagcagaagctgcgccggggcgtggccccgcgccagccccgcatcccgcggccccagcacaaggtgcgcggttaccgctacttggaggaggacaactcggacgagagcgacgcggagggcgagcatggggacggcgcggaggaggaggcgccgcccgcagggcccaggcctggccccgagcccgctggactcggccgccggccctgcccgtacgaacaggcgcaggggggagacgggccggaggagcagtgaggggccgcctggtccccggactcagcctccctcctcgccggcctcagtttaccacgtctgaggtcggggggaccccctccgagtcccgcgctgtcttcaaaggcccctgtctcccctcccccacgttggggacgcccctcccagagcccaggtcacctccgggcttccgcagccccctccaaggcggagtggagccttgggaacccctcggccaagcacaggggttcgaaaatacagctgaaaccccgcgggcccttagcacgcgccccagcgccggagcacggtcagggtcttcttgcgacccggcccgctccagatccccacagctctcggccgcggacccgggccgcgtgtgagcgcactttgcacctcctatccccagggtccgccgagagccacgattttttacagaaaatgagcaataaagagattttgtactgtcaaaaacctcgtg

SEQ ID NO: 436923 - DNA, 1237 bp, Homo sapiens
cccccgcgatgcggggagggctgagactgtggtctgggctgttccagacttcaacactcaccccttgtccccccgcagggctatggcgtgtgctcggtggggctggagcggctggcttacctcctcgtggcttacagcctgggcgcctcagccgcctcactcctgggcctgctgggcctgtggctgccacgcccggtgcccctggtggccggagcaggggtgcacctgctgctcaccttcatcctctttttctgggcccctgtgcctcgggtcctgcaacacagctggatcctctatgtggcagctgccctttggggtgtgggcagtgccctgaacaagactggactcagcacactcctgggaatcttgtacgaagacaaggagagacaggacttcatcttcaccatctaccactggtggcaggctgtggccatcttcaccgtgtacctgggctcgagcctgcacatgaaggctaagctggcggtgctgctggtgacgctggtggcggccgcggtctcctacctgcggatggagcagaagctgcgccggggcgtggccccgcgccagccccgcatcccgcggccccagcacaaggtgcgcggttaccgctacttggaggaggacaactcggacgagagcgacgcggagggcgagcatggggacggcgcggaggaggaggcgccgcccgcagggcccaggcctggccccgagcccgctggactcggccgccggccctgcccgtacgaacaggcgcaggggggagacgggccggaggagcagtgaggggccgcctggtccccggactcagcctccctcctcgccggcctcagtttaccacgtctgaggtcggggggaccccctccgagtcccgcgctgtcttcaaaggcccctgtctcccctcccccacgttggggacgcccctcccagagcccaggtcacctccgggcttccgcagccccctccaaggcggagtggagccttgggaacccctcggccaagcacaggggttcgaaaatacagctgaaaccccgcgggcccttagcacgcgccccagcgccggagcacggtcagggtcttcttgcgacccggcccgctccagatccccacagctctcggccgcggacccgggccgcgtgtgagcgcactttgcacctcctatccccagggtccgccgagagccacgattttttacagaaaatgagcaataaagagattttgtactgtcaaaaacctcgtg

SEQ ID NO: 436924 - DNA, 1597 bp, Homo sapiens
ggcaggtcccggccgccgggaggaagtggccgggcggtcgcaggactccggggcgaccgccgcgagtccgcagtagttcgggccatggaggcggagccgccgctctacccgatggcgggggctgcggggccgcagggcgacgaggacctgctcggggtcccggacgggcccgaggccccgctggacgagctggtgggcgcgtaccccaactacaacgaggaggaggaggagcgccgctactaccgccgcaagcgcctgggcgtgctcaagaacgtgctggctgccagcgccgggggcatgctcacctacggcgtctacctgggcctcctgcagatgcagctgatcctgcactacgacgagacctaccgcgaggtgaagtatggcaacatggggctgcccgacatcgacagcaaaatgctgatgggcatcaacgtgactcccatcgccgccctgctctacacacctgtgctcatcaggttttttggaacgaagtggatgatgttcctcgctgtgggcatctacgccctctttgtctccaccaactactgggagcgctactacacgcttgtgccctcggctgtggccctgggcatggccatcgtgcctctttgggcttccatgggcaactacatcaccaggatggcgcagaagtaccatgagtactcccactacaaggagcaggatgggcaggggatgaagcagcggcctccgcggggctcccacgcgccctatctcctggtcttccaagccatcttctacagcttcttccatctgagcttcgcctgcgcccagctgcccatgatttatttcctgaaccactacctgtatgacctgaaccacacgctgtacaatgtgcagagctgcggcaccaacagccacgggatcctcagcggcttcaacaagacggttctgcggacgctcccgcggagcggaaacctcattgtggtggagagcgtgctcatggcagtggccttcctggccatgctgctggtgctgggtttgtgcggagccgcttaccggcccacggaggagatcgatctgcgcagcgtgggctggggcaacatcttccagctgcccttcaagcacgtgcgtgactaccgcctgcgccacctcgtgcctttctttatctacagcggcttcgaggtgctctttgcctgcactggtatcgccttggtaagtacagcctgcaaaggattgcccgacaaaagacaagatagccaggtaaatttgaattcaagtaaacaaagaataatttttaattacatatgtaagtgtgtacatgtatatcccaaatatccccctcctgctttctcttccctctcttacccccgtcccccctttaccttgggcaagttattttaacttctctgaatcgaaatgggatagcacccacagagtgtttagttccttgtggggtacagcccacggtgtctagggacattccaagcattttcacacctgccctcagaaccttcccctgagccttggagcgaggtcaggcagtccagggagggcagggtgtggcctaaggaacacctcttgtggggagtaagagccagcccttctccccacctggctcttactccccgtatcgcgg

SEQ ID NO: 436925 - DNA, 1261 bp, Homo sapiens
ggcaggtcccggccgccgggaggaagtggccgggcggtcgcaggactccggggcgaccgccgcgagtccgcagtagttcgggccatggaggcggagccgccgctctacccgatggcgggggctgcggggccgcagggcgacgaggacctgctcggggtcccggacgggcccgaggccccgctggacgagctggtgggcgcgtaccccaactacaacgaggaggaggaggagcgccgctactaccgccgcaagcgcctgggcgtgctcaagaacgtgctggctgccagcgccgggggcatgctcacctacggcgtctacctgggcctcctgcagatgcagctgatcctgcactacgacgagacctaccgcgaggtgaagtatggcaacatggggctgcccgacatcgacagcaaaatgctgatgggcatcaacgtgactcccatcgccgccctgctctacacacctgtgctcatcaggttttttggaacgaagtggatgatgttcctcgctgtgggcatctacgccctctttgtctccaccaactactgggagcgctactacacgcttgtgccctcggctgtggccctgggcatggccatcgtgcctctttgggcttccatgggcaactacatcaccaggatggcgcagaagtaccatgagtactcccactacaaggagcaggatgggcaggggatgaagcagcggcctccgcggggctcccacgcgccctatctcctggtcttccaagccatcttctacagcttcttccatctgagcttcgcctgcgcccagctgcccatgatttatttcctgaaccactacctgtatgacctgaaccacacgctgtacaatgtgcagagctgcggcaccaacagccacgggatcctcagcggcttcaacaagacggttctgcggacgctcccgcggagcggaaacctcattgtggtggagagcgtgctcatggcagtggccttcctggccatgctgctggcggagtggagccttgggaacccctcggccaagcacaggggttcgaaaatacagctgaaaccccgcgggcccttagcacgcgccccagcgccggagcacggtcagggtcttcttgcgacccggcccgctccagatccccacagctctcggccgcggacccgggccgcgtgtgagcgcactttgcacctcctatccccagggtccgccgagagccacgattttttacagaaaatgagcaataaagagattttgtactgtcaaaaacctcgtg

SEQ ID NO: 436926 - DNA, 2282 bp, Homo sapiens
tcaggctggtactggtcccgagatttttggattcatggaggcggagccgccgctctacccgatggcgggggctgcggggccgcagggcgacgaggacctgctcggggtcccggacgggcccgaggccccgctggacgagctggtgggcgcgtaccccaactacaacgaggaggaggaggagcgccgctactaccgccgcaagcgcctgggcgtgctcaagaacgtgctggctgccagcgccgggggcatgctcacctacggcgtctacctgggcctcctgcagatgcagctgatcctgcactacgacgagacctaccgcgaggtgaagtatggcaacatggggctgcccgacatcgacagcaaaatgctgatgggcatcaacgtgactcccatcgccgccctgctctacacacctgtgctcatcaggttttttggaacgaagtggatgatgttcctcgctgtgggcatctacgccctctttgtctccaccaactactgggagcgctactacacgcttgtgccctcggctgtggccctgggcatggccatcgtgcctctttgggcttccatgggcaactacatcaccaggatggcgcagaagtaccatgagtactcccactacaaggagcaggatgggcaggggatgaagcagcggcctccgcggggctcccacgcgccctatctcctggtcttccaagccatcttctacagcttcttccatctgagcttcgcctgcgcccagctgcccatgatttatttcctgaaccactacctgtatgacctgaaccacacgctgtacaatgtgcagagctgcggcaccaacagccacgggatcctcagcggcttcaacaagacggttctgcggacgctcccgcggagcggaaacctcattgtggtggagagcgtgctcatggcagtggccttcctggccatgctgctggtgctgggtttgtgcggagccgcttaccggcccacggaggagatcgatctgcgcagcgtgggctggggcaacatcttccagctgcccttcaagcacgtgcgtgactaccgcctgcgccacctcgtgcctttctttatctacagcggcttcgaggtgctctttgcctgcactggtatcgccttgggctatggcgtgtgctcggtggggctggagcggctggcttacctcctcgtggcttacagcctgggcgcctcagccgcctcactcctgggcctgctgggcctgtggctgccacgcccggtgcccctggtggccggagcaggggtgcacctgctgctcaccttcatcctctttttctgggcccctgtgcctcgggtcctgcaacacagctggatcctctatgtggcagctgccctttggggtgtgggcagtgccctgaacaagactggactcagcacactcctgggaatcttgtacgaagacaaggagagacaggacttcatcttcaccatctaccactggtggcaggctgtggccatcttcaccgtgtacctgggctcgagcctgcacatgaaggctaagctggcggtgctgctggtgacgctggtggcggccgcggtctcctacctgcggatggagcagaagctgcgccggggcgtggccccgcgccagccccgcatcccgcggccccagcacaaggtgcgcggttaccgctacttggaggaggacaactcggacgagagcgacgcggagggcgagcatggggacggcgcggaggaggaggcgccgcccgcagggcccaggcctggccccgagcccgctggactcggccgccggccctgcccgtacgaacaggcgcaggggggagacgggccggaggagcagtgaggggccgcctggtccccggactcagcctccctcctcgccggcctcagtttaccacgtctgaggtcggggggaccccctccgagtcccgcgctgtcttcaaaggcccctgtctcccctcccccacgttggggacgcccctcccagagcccaggtcacctccgggcttccgcagccccctccaaggcggagtggagccttgggaacccctcggccaagcacaggggttcgaaaatacagctgaaaccccgcgggcccttagcacgcgccccagcgccggagcacggtcagggtcttcttgcgacccggcccgctccagatccccacagctctcggccgcggacccgggccgcgtgtgagcgcactttgcacctcctatccccagggtccgccgagagccacgattttttacagaaaatgagcaataaagagattttgtactgtcaaaaacctcgtg

SEQ ID NO: 436927 - DNA, 2328 bp, Homo sapiens
ggaaaaccagaagggaagtgaagggactgcattctctgcagggatggtctcttgttctgagagctgagtgggaaggaagccacctgggaggcgcagcaggaagagcattcaaaccagaaggaacccaggggagagaatctggatattttcaaaagtggccccgtggctccagccagctggacgagctggtgggcgcgtaccccaactacaacgaggaggaggaggagcgccgctactaccgccgcaagcgcctgggcgtgctcaagaacgtgctggctgccagcgccgggggcatgctcacctacggcgtctacctgggcctcctgcagatgcagctgatcctgcactacgacgagacctaccgcgaggtgaagtatggcaacatggggctgcccgacatcgacagcaaaatgctgatgggcatcaacgtgactcccatcgccgccctgctctacacacctgtgctcatcaggttttttggaacgaagtggatgatgttcctcgctgtgggcatctacgccctctttgtctccaccaactactgggagcgctactacacgcttgtgccctcggctgtggccctgggcatggccatcgtgcctctttgggcttccatgggcaactacatcaccaggatggcgcagaagtaccatgagtactcccactacaaggagcaggatgggcaggggatgaagcagcggcctccgcggggctcccacgcgccctatctcctggtcttccaagccatcttctacagcttcttccatctgagcttcgcctgcgcccagctgcccatgatttatttcctgaaccactacctgtatgacctgaaccacacgctgtacaatgtgcagagctgcggcaccaacagccacgggatcctcagcggcttcaacaagacggttctgcggacgctcccgcggagcggaaacctcattgtggtggagagcgtgctcatggcagtggccttcctggccatgctgctggtgctgggtttgtgcggagccgcttaccggcccacggaggagatcgatctgcgcagcgtgggctggggcaacatcttccagctgcccttcaagcacgtgcgtgactaccgcctgcgccacctcgtgcctttctttatctacagcggcttcgaggtgctctttgcctgcactggtatcgccttgggctatggcgtgtgctcggtggggctggagcggctggcttacctcctcgtggcttacagcctgggcgcctcagccgcctcactcctgggcctgctgggcctgtggctgccacgcccggtgcccctggtggccggagcaggggtgcacctgctgctcaccttcatcctctttttctgggcccctgtgcctcgggtcctgcaacacagctggatcctctatgtggcagctgccctttggggtgtgggcagtgccctgaacaagactggactcagcacactcctgggaatcttgtacgaagacaaggagagacaggacttcatcttcaccatctaccactggtggcaggctgtggccatcttcaccgtgtacctgggctcgagcctgcacatgaaggctaagctggcggtgctgctggtgacgctggtggcggccgcggtctcctacctgcggatggagcagaagctgcgccggggcgtggccccgcgccagccccgcatcccgcggccccagcacaaggtgcgcggttaccgctacttggaggaggacaactcggacgagagcgacgcggagggcgagcatggggacggcgcggaggaggaggcgccgcccgcagggcccaggcctggccccgagcccgctggactcggccgccggccctgcccgtacgaacaggcgcaggggggagacgggccggaggagcagtgaggggccgcctggtccccggactcagcctccctcctcgccggcctcagtttaccacgtctgaggtcggggggaccccctccgagtcccgcgctgtcttcaaaggcccctgtctcccctcccccacgttggggacgcccctcccagagcccaggtcacctccgggcttccgcagccccctccaaggcggagtggagccttgggaacccctcggccaagcacaggggttcgaaaatacagctgaaaccccgcgggcccttagcacgcgccccagcgccggagcacggtcagggtcttcttgcgacccggcccgctccagatccccacagctctcggccgcggacccgggccgcgtgtgagcgcactttgcacctcctatccccagggtccgccgagagccacgattttttacagaaaatgagcaataaagagattttgtactgtcaaaaacctcgtg

SEQ ID NO: 436928 - DNA, 2546 bp, Homo sapiens
ggcaggtcccggccgccgggaggaagtggccgggcggtcgcaggactccggggcgaccgccgcgagtccgcagtagttcgggccatggaggcggagccgccgctctacccgatggcgggggctgcggggccgcagggcgacgaggacctgctcggggtcccggacgggcccgaggccccgctggacgagctggtgggcgcgtaccccaactacaacgaggaggaggaggagcgccgctactaccgccgcaagcgcctgggcgtgctcaagaacgtgctggctgccagcgccgggggcatgctcacctacggcgtctacctgggcctcctgcagatgcagctgatcctgcactacgacgagacctaccgcgaggtgaagtatggcaacatggggctgcccgacatcgacagcaaaatgctgatgggcatcaacgtgactcccatcgccgccctgctctacacacctgtgctcatcaggttttttggaacgaagtggatgatgttcctcgctgtgggcatctacgccctctttgtctccaccaactactgggagcgctactacacgcttgtgccctcggctgtggccctgggcatggccatcgtgcctctttgggcttccatgggcaactacatcaccaggtgagcctggtgggcagcagggcaggagggctggagacctggccaagcctccactttattgccaactttggctgggggaccacaggaagccccttccgccctctgggcctcagtttccccacaccggggctggtctgctcctagctctgggtgcaggacacacaggagtggcacaggtcgggctggggagagccttctctcctttgtggtccaggatggcgcagaagtaccatgagtactcccactacaaggagcaggatgggcaggggatgaagcagcggcctccgcggggctcccacgcgccctatctcctggtcttccaagccatcttctacagcttcttccatctgagcttcgcctgcgcccagctgcccatgatttatttcctgaaccactacctgtatgacctgaaccacacgctgtacaatgtgcagagctgcggcaccaacagccacgggatcctcagcggcttcaacaagacggttctgcggacgctcccgcggagcggaaacctcattgtggtggagagcgtgctcatggcagtggccttcctggccatgctgctggtgctgggtttgtgcggagccgcttaccggcccacggaggagatcgatctgcgcagcgtgggctggggcaacatcttccagctgcccttcaagcacgtgcgtgactaccgcctgcgccacctcgtgcctttctttatctacagcggcttcgaggtgctctttgcctgcactggtatcgccttgggctatggcgtgtgctcggtggggctggagcggctggcttacctcctcgtggcttacagcctgggcgcctcagccgcctcactcctgggcctgctgggcctgtggctgccacgcccggtgcccctggtggccggagcaggggtgcacctgctgctcaccttcatcctctttttctgggcccctgtgcctcgggtcctgcaacacagctggatcctctatgtggcagctgccctttggggtgtgggcagtgccctgaacaagactggactcagcacactcctgggaatcttgtacgaagacaaggagagacaggacttcatcttcaccatctaccactggtggcaggctgtggccatcttcaccgtgtacctgggctcgagcctgcacatgaaggctaagctggcggtgctgctggtgacgctggtggcggccgcggtctcctacctgcggatggagcagaagctgcgccggggcgtggccccgcgccagccccgcatcccgcggccccagcacaaggtgcgcggttaccgctacttggaggaggacaactcggacgagagcgacgcggagggcgagcatggggacggcgcggaggaggaggcgccgcccgcagggcccaggcctggccccgagcccgctggactcggccgccggccctgcccgtacgaacaggcgcaggggggagacgggccggaggagcagtgaggggccgcctggtccccggactcagcctccctcctcgccggcctcagtttaccacgtctgaggtcggggggaccccctccgagtcccgcgctgtcttcaaaggcccctgtctcccctcccccacgttggggacgcccctcccagagcccaggtcacctccgggcttccgcagccccctccaaggcggagtggagccttgggaacccctcggccaagcacaggggttcgaaaatacagctgaaaccccgcgggcccttagcacgcgccccagcgccggagcacggtcagggtcttcttgcgacccggcccgctccagatccccacagctctcggccgcggacccgggccgcgtgtgagcgcactttgcacctcctatccccagggtccgccgagagccacgattttttacagaaaatgagcaataaagagattttgtactgtcaaaaacctcgtg

SEQ ID NO: 436929 - DNA, 2519 bp, Homo sapiens
ccagagcctcggtgtgggtgggggacgggggtcctgggctcccggacagacctgccaccgtcagaattggaggccggcggagcaaggcgggtgggggtctgggcttagctggccaagtggccgcgggctggcagaaggcgtggcgcagcccgggaaccccgctgtcctgaggggcgctgtcagcgggaatgccttcggtgattggagctccctgcgaggcctgcatgccgtcttctgctcggtggcgcccaaagctaggctgctccctgcacgccgctctctgtcctgtccccaggcctcctgcagatgcagctgatcctgcactacgacgagacctaccgcgaggtgaagtatggcaacatggggctgcccgacatcgacagcaaaatgctgatgggcatcaacgtgactcccatcgccgccctgctctacacacctgtgctcatcaggttttttggaacgaagtggatgatgttcctcgctgtgggcatctacgccctctttgtctccaccaactactgggagcgctactacacgcttgtgccctcggctgtggccctgggcatggccatcgtgcctctttgggcttccatgggcaactacatcaccaggtgagcctggtgggcagcagggcaggagggctggagacctggccaagcctccactttattgccaactttggctgggggaccacaggaagccccttccgccctctgggcctcagtttccccacaccggggctggtctgctcctagctctgggtgcaggacacacaggagtggcacaggtcgggctggggagagccttctctcctttgtggtccaggatggcgcagaagtaccatgagtactcccactacaaggagcaggatgggcaggggatgaagcagcggcctccgcggggctcccacgcgccctatctcctggtcttccaagccatcttctacagcttcttccatctgagcttcgcctgcgcccagctgcccatgatttatttcctgaaccactacctgtatgacctgaaccacacgctgtacaatgtgcagagctgcggcaccaacagccacgggatcctcagcggcttcaacaagacggttctgcggacgctcccgcggagcggaaacctcattgtggtggagagcgtgctcatggcagtggccttcctggccatgctgctggtgctgggtttgtgcggagccgcttaccggcccacggaggagatcgatctgcgcagcgtgggctggggcaacatcttccagctgcccttcaagcacgtgcgtgactaccgcctgcgccacctcgtgcctttctttatctacagcggcttcgaggtgctctttgcctgcactggtatcgccttgggctatggcgtgtgctcggtggggctggagcggctggcttacctcctcgtggcttacagcctgggcgcctcagccgcctcactcctgggcctgctgggcctgtggctgccacgcccggtgcccctggtggccggagcaggggtgcacctgctgctcaccttcatcctctttttctgggcccctgtgcctcgggtcctgcaacacagctggatcctctatgtggcagctgccctttggggtgtgggcagtgccctgaacaagactggactcagcacactcctgggaatcttgtacgaagacaaggagagacaggacttcatcttcaccatctaccactggtggcaggctgtggccatcttcaccgtgtacctgggctcgagcctgcacatgaaggctaagctggcggtgctgctggtgacgctggtggcggccgcggtctcctacctgcggatggagcagaagctgcgccggggcgtggccccgcgccagccccgcatcccgcggccccagcacaaggtgcgcggttaccgctacttggaggaggacaactcggacgagagcgacgcggagggcgagcatggggacggcgcggaggaggaggcgccgcccgcagggcccaggcctggccccgagcccgctggactcggccgccggccctgcccgtacgaacaggcgcaggggggagacgggccggaggagcagtgaggggccgcctggtccccggactcagcctccctcctcgccggcctcagtttaccacgtctgaggtcggggggaccccctccgagtcccgcgctgtcttcaaaggcccctgtctcccctcccccacgttggggacgcccctcccagagcccaggtcacctccgggcttccgcagccccctccaaggcggagtggagccttgggaacccctcggccaagcacaggggttcgaaaatacagctgaaaccccgcgggcccttagcacgcgccccagcgccggagcacggtcagggtcttcttgcgacccggcccgctccagatccccacagctctcggccgcggacccgggccgcgtgtgagcgcactttgcacctcctatccccagggtccgccgagagccacgattttttacagaaaatgagcaataaagagattttgtactgtcaaaaacctcgtg

SEQ ID NO: 436930 - DNA, 1326 bp, Homo sapiens
aaaggattaaatcatagagggaggagatcgatctgcgcagcgtgggctggggcaacatcttccagctgcccttcaagcacgtgcgtgactaccgcctgcgccacctcgtgcctttctttatctacagcggcttcgaggtgctctttgcctgcactggtatcgccttgggctatggcgtgtgctcggtggggctggagcggctggcttacctcctcgtggcttacagcctgggcgcctcagccgcctcactcctgggcctgctgggcctgtggctgccacgcccggtgcccctggtggccggagcaggggtgcacctgctgctcaccttcatcctctttttctgggcccctgtgcctcgggtcctgcaacacagctggatcctctatgtggcagctgccctttggggtgtgggcagtgccctgaacaagactggactcagcacactcctgggaatcttgtacgaagacaaggagagacaggacttcatcttcaccatctaccactggtggcaggctgtggccatcttcaccgtgtacctgggctcgagcctgcacatgaaggctaagctggcggtgctgctggtgacgctggtggcggccgcggtctcctacctgcggatggagcagaagctgcgccggggcgtggccccgcgccagccccgcatcccgcggccccagcacaaggtgcgcggttaccgctacttggaggaggacaactcggacgagagcgacgcggagggcgagcatggggacggcgcggaggaggaggcgccgcccgcagggcccaggcctggccccgagcccgctggactcggccgccggccctgcccgtacgaacaggcgcaggggggagacgggccggaggagcagtgaggggccgcctggtccccggactcagcctccctcctcgccggcctcagtttaccacgtctgaggtcggggggaccccctccgagtcccgcgctgtcttcaaaggcccctgtctcccctcccccacgttggggacgcccctcccagagcccaggtcacctccgggcttccgcagccccctccaaggcggagtggagccttgggaacccctcggccaagcacaggggttcgaaaatacagctgaaaccccgcgggcccttagcacgcgccccagcgccggagcacggtcagggtcttcttgcgacccggcccgctccagatccccacagctctcggccgcggacccgggccgcgtgtgagcgcactttgcacctcctatccccagggtccgccgagagccacgattttttacagaaaatgagcaataaagagattttgtactgtcaaaaacctcgtg

SEQ ID NO: 436931 - DNA, 1344 bp, Homo sapiens
agcggagtctccattggtgaggtcgtcccggagcctcgcccagctcccgcgcgctagagccgcctgctggtctcacccagccgggaccgctgacctggcgctttgtgcggctccaggcctccgagtggactccagaaagcctgaaaagctatcatggcagcaaggcccaagctccactatcccaacggaagaggccggatggagtccgtgagatgggttttagctgccgccggagtcgagtttgatgaagaatttctggaaacaaaagaacagttgtacaagttgcaggatggtaaccacctgctgttccaacaagtgcccatggttgaaattgacgggatgaagttggtacagacccgaagcattctccactacatagcagacaagcacaatctctttggcaagaacctcaaggagagaaccctgattgacatgtacgtggaggggacactggatctgctggaactgcttatcatgcatcctttcttaaaaccagatgatcagcaaaaggaagtggttaacatggcccagaaggctataattagatactttcctgtgtttgaaaagattttaaggggtcacggacaaagctttcttgttggtaatcagctgagccttgcagatgtgattttactccaaaccattttagctctagaagagaaaattcctaatatcctgtctgcatttcctttcctccaggaatacacagtgaaactaagtaatatccctacaattaagagattccttgaacctggcagcaagaagaagcctccccctgatgaaatttatgtgagaaccgtctacaacatctttaggccataaaacaacacatccatgtgtgagtgacagtgtgttcctagagatggtattgtctacagtcatgtcttaatggatcccagctctgtcatggtgctatctatgtattaagttgggtcctaagttgggtcttttgtgtcaaagagatcatctcttctagaaatatcaaccttttttgtccagtaaataattgttaggggatctttattggaaaacttttttggagaggctggtatttaagttagatctgattgggctactcatgtcctgtagccagttcatcctcataataagaatgggcaggatctcttgttctctcctgagtgtctttctactctcctgagcgtctttctgctctccttatcctgttctcttatccttatcccctccagtctctgcctaatttttagtgtttaataacaaccgaatgtctagtaaatgactctcctctgagctgtaataaataaaatggtagtaatgaatgcaatcagtgttagccaaaataaagaatttatgagtcattgctca

SEQ ID NO: 436932 - DNA, 721 bp, Homo sapiens
ctcaagcttttcattttctctgttttgggacatgtaagaggaagtctaattttataattgggttgagtttatgactacacctcttgatgttctagcagcagaactgggaaataagagtgggccccttgaagatgatctatcacttagatttcttaaatcaccctgcccctccccaagcctcctgcatgcatttctgtagatacatttttggagtagatatatcctttcaaaacaccagatgctaaatccagaaataaggaattttcccttccccacttcaatgtctcattcagatccacagcagatatttaaggatgctttcatttccacaccttttttgtactttctctctctctctctcgctctctctctctctctctccccctctctctcactctctctgtcagatatagggtgcgttctcttaattgatgttatttatgaaagcatgaaatgacaaggtcatagtttcacctcttctcagatactgcactgattcaatagcctcatcactctctccatgtggaatattgtaactgatgcacaccatttccctacaattttaaggggtcacggacaaagctttcttgttggtaatcagctgagccttgcagatgtgattttactccaaaccattttagctctagaagagaaaattcctaatatcctgtctgcatttcctttcctccaggtaaataaaactatgtattagaagaaaaaa

SEQ ID NO: 436933 - DNA, 1037 bp, Homo sapiens
cagatttggtagggattccccttacagggccctccatgcctttctctttcacatttgagcacttccttgctttctggcataacaaaatcaaccttctcttataggacccctagttccttttagggggcagtgatatttagaaaccaagatgtggatgctaagtctgctctttctctctgcttcttaagactgtttaacttggcattttttgtcctgagcctgtatgatatttacctccttttggagggtgaggatatctttttaaaaaattgatgcataatgtacatatttggggaatacatttgatattttgatacatgtgtatcatgtgtagtgatcaaatcagggtaattaggatatccatcacccacctcaaacatttatctttcctttatggcggaacattccaattctcttctagccattttgaactgtgtaatacgttattgttaactatagcctactgtactatcgaacactagattttatttcttctgtctagctgtatttatgtaccattaaccaacctcttttcacatcccattcctctctacacttcccagcctctagtaagcaccaatcaactttctatttccatgagatccacttttttagctcccacatatgaatcagaacatgcagtctttgtctttctgtgcctggcttatttcacttaacgtaatgacctctgtttctgttggtgttgctgaaaatgacaggattttgttttcttaatggctgaataatattccactatgtatatatacgtttcttttttaaaaatttagtttgatgaagaatttctggaaacaaaagaacagttgtacaagttgcaggatggtgagtatgaaaatgaaacaactgcctctaatactgattttcctttaagagctgctgtttatgtggaagggcaaaagtattcaatgacactgaacattcagaacagtatcctaaaaccaaaaaaagcaagagggaataaatagttgaaattgccaggaaatcacttcttattcaatagttccataaaagctggccga

SEQ ID NO: 436934 - DNA, 918 bp, Homo sapiens
agcggagtctccattggtgaggtcgtcccggagcctcgcccagctcccgcgcgctagagccgcctgctggtctcacccagccgggaccgctgacctggcgctttgtgcggctccaggcctccgagtggactccagaaagcctgaaaagctatcatggcagcaaggcccaagctccactatcccaacggaagaggccggatggagtccgtgagatgggttttagctgccgccggagtcgagtttgatgaagaatttctggaaacaaaagaacagttgtacaagttgcaggatggattgacatgtacgtggaggggacactggatctgctggaactgcttatcatgcatcctttcttaaaaccagatgatcagcaaaaggaagtggttaacatggcccagaaggctataattagatactttcctgtgtttgaaaaggcactttgtgaatgtaaaataggataatgaagaaatgtggtctggaacgggcacagaggacctggtgctttggcaaaggttcactgctcattcttaggtcccaagggcccagactgtgtcagggtttcttgcaacacgcctatgaggtgagaaccgttgtcccttttacacataatgaaatgaagtcatgaagagattcagtgacctgtccaaggtaacatggccagaaaatggagagcagggttggaactctggcctctgactacaaattcaggatgcattgtactatgccactctggctccagtagctatatttgacctggaattgtgttcggagtccctgtgacacacacacttgtgcacatgcagacacccatgggcatccaagagttgactgtgaaggggatctcccctttgctactactgcttcttgcctctccctaatcacaatctattcttataagccccacacctatacgttacc

SEQ ID NO: 436935 - DNA, 2135 bp, Homo sapiens
agcggagtctccattggtgaggtcgtcccggagcctcgcccagctcccgcgcgctagagccgcctgctggtctcacccagccgggaccgctgacctggcgctttgtgcggctccaggcctccgagtggactccagaaagcctgaaaagctatcatggcagcaaggcccaagctccactatcccaacggaagaggccggatggagtccgtgagatgggttttagctgccgccggagtcgagtttgatgaagaatttctggaaacaaaagaacagttgtacaagttgcaggatggtaaccacctgctgttccaacaagtgcccatggttgaaattgacgggatgaagttggtacagacccgaagcattctccactacatagcagacaagcacaatctctttggcaagaacctcaaggagagaaccctgtactgtggcccctctcgagtgttgtcacttgtcagcttactgatgccttagctgattagcaacctctgtagcacaccacatttactttatgtcttacatagttagtgagatcagggaacaaaaacccaagaaggtcacgaagaccagttggaacttcagtagagagagtctgagttcagatttcaacatttttaaatgctttgatactgctttttccctttcttgcacattcactattgttaagtattaggaatgaggagctgctgtgacattcaaggcctgggagagtgagcattagattataatttgaaatcaaagcctggtccttgcaccccttagatgtatgaccctgggcaacgtgggtataagaatagtacatttctcatagtgtcatgtgatttaatgagataatggatagagagtgtttagcaccatgcctggtacactctaagcactcaataagtggtattcactatttttataaagttgaagtttgacccatacgaagagaccaaaacatggatgctggggtaaaagtggaggagtaggatgccaggagagagagcactcatgactgtcaagctgtctgatctgtgacagatttttctgagttacaactagaattgaccttatatctttgctcttaagagacaggtataggtaaatgcttctagggacttaagttgcagcatctttaaaaaaaaaaaaaaaagcactctgaattcttagttgtggaaactgatggcttcaaagagaggagaaactgagacaactgcttttttgttttaaggattgacatgtacgtggaggggacactggatctgctggaactgcttatcatgcatcctttcttaaaaccagatgatcagcaaaaggaagtggttaacatggcccagaaggctataattagatactttcctgtgtttgaaaagattttaaggggtcacggacaaagctttcttgttggtaatcagctgagccttgcagatgtgattttactccaaaccattttagctctagaagagaaaattcctaatatcctgtctgcatttcctttcctccaggaatacacagtgaaactaagtaatatccctacaattaagagattccttgaacctggcagcaagaagaagcctccccctgatgaaatttatgtgagaaccgtctacaacatctttaggccataaaacaacacatccatgtgtgagtgacagtgtgttcctagagatggtattgtctacagtcatgtcttaatggatcccagctctgtcatggtgctatctatgtattaagttgggtcctaagttgggtcttttgtgtcaaagagatcatctcttctagaaatatcaaccttttttgtccagtaaataattgttaggggatctttattggaaaacttttttggagaggctggtatttaagttagatctgattgggctactcatgtcctgtagccagttcatcctcataataagaatgggcaggatctcttgttctctcctgagtgtctttctactctcctgagcgtctttctgctctccttatcctgttctcttatccttatcccctccagtctctgcctaatttttagtgtttaataacaaccgaatgtctagtaaatgactctcctctgagctgtaataaataaaatggtagtaatgaatgcaatcagtgttagccaaaataaagaatttatgagtcattgctca

SEQ ID NO: 436936 - DNA, 1892 bp, Homo sapiens
cagatttggtagggattccccttacagggccctccatgcctttctctttcacatttgagcacttccttgctttctggcataacaaaatcaaccttctcttataggacccctagttccttttagggggcagtgatatttagaaaccaagatgtggatgctaagtctgctctttctctctgcttcttaagactgtttaacttggcattttttgtcctgagcctgtatgatatttacctccttttggagggtgaggatatctttttaaaaaattgatgcataatgtacatatttggggaatacatttgatattttgatacatgtgtatcatgtgtagtgatcaaatcagggtaattaggatatccatcacccacctcaaacatttatctttcctttatggcggaacattccaattctcttctagccattttgaactgtgtaatacgttattgttaactatagcctactgtactatcgaacactagattttatttcttctgtctagctgtatttatgtaccattaaccaacctcttttcacatcccattcctctctacacttcccagcctctagtaagcaccaatcaactttctatttccatgagatccacttttttagctcccacatatgaatcagaacatgcagtctttgtctttctgtgcctggcttatttcacttaacgtaatgacctctgtttctgttggtgttgctgaaaatgacaggattttgttttcttaatggctgaataatattccactatgtatatatacgtttcttttttaaaaatttagtttgatgaagaatttctggaaacaaaagaacagttgtacaagttgcaggatggtaaccacctgctgttccaacaagtgcccatggttgaaattgacgggatgaagttggtacagacccgaagcattctccactacatagcagacaagcacaatctctttggcaagaacctcaaggagagaaccctgattgacatgtacgtggaggggacactggatctgctggaactgcttatcatgcatcctttcttaaaaccagatgatcagcaaaaggaagtggttaacatggcccagaaggctataattagatactttcctgtgtttgaaaagattttaaggggtcacggacaaagctttcttgttggtaatcagctgagccttgcagatgtgattttactccaaaccattttagctctagaagagaaaattcctaatatcctgtctgcatttcctttcctccaggaatacacagtgaaactaagtaatatccctacaattaagagattccttgaacctggcagcaagaagaagcctccccctgatgaaatttatgtgagaaccgtctacaacatctttaggccataaaacaacacatccatgtgtgagtgacagtgtgttcctagagatggtattgtctacagtcatgtcttaatggatcccagctctgtcatggtgctatctatgtattaagttgggtcctaagttgggtcttttgtgtcaaagagatcatctcttctagaaatatcaaccttttttgtccagtaaataattgttaggggatctttattggaaaacttttttggagaggctggtatttaagttagatctgattgggctactcatgtcctgtagccagttcatcctcataataagaatgggcaggatctcttgttctctcctgagtgtctttctactctcctgagcgtctttctgctctccttatcctgttctcttatccttatcccctccagtctctgcctaatttttagtgtttaataacaaccgaatgtctagtaaatgactctcctctgagctgtaataaataaaatggtagtaatgaatgcaatcagtgttagccaaaataaagaatttatgagtcattgctca

SEQ ID NO: 436937 - DNA, 2195 bp, Homo sapiens
gggacaacaggcatctgctaccacacccggctaatttttgtatatctagtagaggcggggtttcactatgttggccaggctggtcttgaactcctgacctcatgatccgcctgccttggcctcccaaagtgctgggattacaggcttgagccaccacgcctggccccttcaggcttcttttgtggctaaatctgctctcctgaatgaagttaaggttatctgtcatctggaagctttacactatttcctaaggccatgattccaccgtttcttttcattccacagagcattttttaggggttgggggacagagaagaaaagatcacttctaactctgggcttccattctcaggtaaccacctgctgttccaacaagtgcccatggttgaaattgacgggatgaagttggtacagacccgaagcattctccactacatagcagacaagcacaatctctttggcaagaacctcaaggagagaaccctgtactgtggcccctctcgagtgttgtcacttgtcagcttactgatgccttagctgattagcaacctctgtagcacaccacatttactttatgtcttacatagttagtgagatcagggaacaaaaacccaagaaggtcacgaagaccagttggaacttcagtagagagagtctgagttcagatttcaacatttttaaatgctttgatactgctttttccctttcttgcacattcactattgttaagtattaggaatgaggagctgctgtgacattcaaggcctgggagagtgagcattagattataatttgaaatcaaagcctggtccttgcaccccttagatgtatgaccctgggcaacgtgggtataagaatagtacatttctcatagtgtcatgtgatttaatgagataatggatagagagtgtttagcaccatgcctggtacactctaagcactcaataagtggtattcactatttttataaagttgaagtttgacccatacgaagagaccaaaacatggatgctggggtaaaagtggaggagtaggatgccaggagagagagcactcatgactgtcaagctgtctgatctgtgacagatttttctgagttacaactagaattgaccttatatctttgctcttaagagacaggtataggtaaatgcttctagggacttaagttgcagcatctttaaaaaaaaaaaaaaaagcactctgaattcttagttgtggaaactgatggcttcaaagagaggagaaactgagacaactgcttttttgttttaaggattgacatgtacgtggaggggacactggatctgctggaactgcttatcatgcatcctttcttaaaaccagatgatcagcaaaaggaagtggttaacatggcccagaaggctataattagatactttcctgtgtttgaaaagattttaaggggtcacggacaaagctttcttgttggtaatcagctgagccttgcagatgtgattttactccaaaccattttagctctagaagagaaaattcctaatatcctgtctgcatttcctttcctccaggaatacacagtgaaactaagtaatatccctacaattaagagattccttgaacctggcagcaagaagaagcctccccctgatgaaatttatgtgagaaccgtctacaacatctttaggccataaaacaacacatccatgtgtgagtgacagtgtgttcctagagatggtattgtctacagtcatgtcttaatggatcccagctctgtcatggtgctatctatgtattaagttgggtcctaagttgggtcttttgtgtcaaagagatcatctcttctagaaatatcaaccttttttgtccagtaaataattgttaggggatctttattggaaaacttttttggagaggctggtatttaagttagatctgattgggctactcatgtcctgtagccagttcatcctcataataagaatgggcaggatctcttgttctctcctgagtgtctttctactctcctgagcgtctttctgctctccttatcctgttctcttatccttatcccctccagtctctgcctaatttttagtgtttaataacaaccgaatgtctagtaaatgactctcctctgagctgtaataaataaaatggtagtaatgaatgcaatcagtgttagccaaaataaagaatttatgagtcattgctca

SEQ ID NO: 436938 - DNA, 2141 bp, Homo sapiens
gggacaacaggcatctgctaccacacccggctaatttttgtatatctagtagaggcggggtttcactatgttggccaggctggtcttgaactcctgacctcatgatccgcctgccttggcctcccaaagtgctgggattacaggcttgagccaccacgcctggccccttcaggcttcttttgtggctaaatctgctctcctgaatgaagttaaggttatctgtcatctggaagctttacactatttcctaaggccatgattccaccgtttcttttcattccacagagcattttttaggggttgggggacagagaagaaaaagtgcccatggttgaaattgacgggatgaagttggtacagacccgaagcattctccactacatagcagacaagcacaatctctttggcaagaacctcaaggagagaaccctgtactgtggcccctctcgagtgttgtcacttgtcagcttactgatgccttagctgattagcaacctctgtagcacaccacatttactttatgtcttacatagttagtgagatcagggaacaaaaacccaagaaggtcacgaagaccagttggaacttcagtagagagagtctgagttcagatttcaacatttttaaatgctttgatactgctttttccctttcttgcacattcactattgttaagtattaggaatgaggagctgctgtgacattcaaggcctgggagagtgagcattagattataatttgaaatcaaagcctggtccttgcaccccttagatgtatgaccctgggcaacgtgggtataagaatagtacatttctcatagtgtcatgtgatttaatgagataatggatagagagtgtttagcaccatgcctggtacactctaagcactcaataagtggtattcactatttttataaagttgaagtttgacccatacgaagagaccaaaacatggatgctggggtaaaagtggaggagtaggatgccaggagagagagcactcatgactgtcaagctgtctgatctgtgacagatttttctgagttacaactagaattgaccttatatctttgctcttaagagacaggtataggtaaatgcttctagggacttaagttgcagcatctttaaaaaaaaaaaaaaaagcactctgaattcttagttgtggaaactgatggcttcaaagagaggagaaactgagacaactgcttttttgttttaaggattgacatgtacgtggaggggacactggatctgctggaactgcttatcatgcatcctttcttaaaaccagatgatcagcaaaaggaagtggttaacatggcccagaaggctataattagatactttcctgtgtttgaaaagattttaaggggtcacggacaaagctttcttgttggtaatcagctgagccttgcagatgtgattttactccaaaccattttagctctagaagagaaaattcctaatatcctgtctgcatttcctttcctccaggaatacacagtgaaactaagtaatatccctacaattaagagattccttgaacctggcagcaagaagaagcctccccctgatgaaatttatgtgagaaccgtctacaacatctttaggccataaaacaacacatccatgtgtgagtgacagtgtgttcctagagatggtattgtctacagtcatgtcttaatggatcccagctctgtcatggtgctatctatgtattaagttgggtcctaagttgggtcttttgtgtcaaagagatcatctcttctagaaatatcaaccttttttgtccagtaaataattgttaggggatctttattggaaaacttttttggagaggctggtatttaagttagatctgattgggctactcatgtcctgtagccagttcatcctcataataagaatgggcaggatctcttgttctctcctgagtgtctttctactctcctgagcgtctttctgctctccttatcctgttctcttatccttatcccctccagtctctgcctaatttttagtgtttaataacaaccgaatgtctagtaaatgactctcctctgagctgtaataaataaaatggtagtaatgaatgcaatcagtgttagccaaaataaagaatttatgagtcattgctca

SEQ ID NO: 436939 - DNA, 1299 bp, Homo sapiens
agcggagtctccattggtgaggtcgtcccggagcctcgcccagctcccgcgcgctagagccgcctgctggtctcacccagccgggaccgctgacctggcgctttgtgcggctccaggcctccgagtggactccagtgagggaaaatgcagcaacaaaaataaagaacagtttcccgtgccaaaatcctgaatattcatttcgcccctgagcactgggttgaagacgcgaaattgggactgttggtctgcgacgagctgctgcatttgtatttcagaaagcctgaaaagctatcatggcagcaaggcccaagctccactatcccaacggaagaggccggatggagtccgtgagatgggttttagctgccgccggagtcgaggattgacatgtacgtggaggggacactggatctgctggaactgcttatcatgcatcctttcttaaaaccagatgatcagcaaaaggaagtggttaacatggcccagaaggctataattagatactttcctgtgtttgaaaagattttaaggggtcacggacaaagctttcttgttggtaatcagctgagccttgcagatgtgattttactccaaaccattttagctctagaagagaaaattcctaatatcctgtctgcatttcctttcctccaggaatacacagtgaaactaagtaatatccctacaattaagagattccttgaacctggcagcaagaagaagcctccccctgatgaaatttatgtgagaaccgtctacaacatctttaggccataaaacaacacatccatgtgtgagtgacagtgtgttcctagagatggtattgtctacagtcatgtcttaatggatcccagctctgtcatggtgctatctatgtattaagttgggtcctaagttgggtcttttgtgtcaaagagatcatctcttctagaaatatcaaccttttttgtccagtaaataattgttaggggatctttattggaaaacttttttggagaggctggtatttaagttagatctgattgggctactcatgtcctgtagccagttcatcctcataataagaatgggcaggatctcttgttctctcctgagtgtctttctactctcctgagcgtctttctgctctccttatcctgttctcttatccttatcccctccagtctctgcctaatttttagtgtttaataacaaccgaatgtctagtaaatgactctcctctgagctgtaataaataaaatggtagtaatgaatgcaatcagtgttagccaaaataaagaatttatgagtcattgctca

SEQ ID NO: 436940 - DNA, 1267 bp, Homo sapiens
agcggagtctccattggtgaggtcgtcccggagcctcgcccagctcccgcgcgctagagccgcctgctggtctcacccagccgggaccgctgacctggcgctttgtgcggctccaggcctccgagtggactccagaaagcctgaaaagctatcatggcagcaaggcccaagctccactatcccaacggaagaggccggatggagtccgtgagatgggttttagctgccgccggagtcgagtttgatgaagaatttctggaaacaaaagaacagttgtacaagttgcaggatggtaaccacctgctgttccaacaagtgcccatggttgaaattgacgggatgaagttggattgacatgtacgtggaggggacactggatctgctggaactgcttatcatgcatcctttcttaaaaccagatgatcagcaaaaggaagtggttaacatggcccagaaggctataattagatactttcctgtgtttgaaaagattttaaggggtcacggacaaagctttcttgttggtaatcagctgagccttgcagatgtgattttactccaaaccattttagctctagaagagaaaattcctaatatcctgtctgcatttcctttcctccaggaatacacagtgaaactaagtaatatccctacaattaagagattccttgaacctggcagcaagaagaagcctccccctgatgaaatttatgtgagaaccgtctacaacatctttaggccataaaacaacacatccatgtgtgagtgacagtgtgttcctagagatggtattgtctacagtcatgtcttaatggatcccagctctgtcatggtgctatctatgtattaagttgggtcctaagttgggtcttttgtgtcaaagagatcatctcttctagaaatatcaaccttttttgtccagtaaataattgttaggggatctttattggaaaacttttttggagaggctggtatttaagttagatctgattgggctactcatgtcctgtagccagttcatcctcataataagaatgggcaggatctcttgttctctcctgagtgtctttctactctcctgagcgtctttctgctctccttatcctgttctcttatccttatcccctccagtctctgcctaatttttagtgtttaataacaaccgaatgtctagtaaatgactctcctctgagctgtaataaataaaatggtagtaatgaatgcaatcagtgttagccaaaataaagaatttatgagtcattgctca

SEQ ID NO: 436941 - DNA, 1408 bp, Homo sapiens
agcggagtctccattggtgaggtcgtcccggagcctcgcccagctcccgcgcgctagagccgcctgctggtctcacccagccgggaccgctgacctggcgctttgtgcggctccaggcctccgagtggactccagtgagggaaaatgcagcaacaaaaataaagaacagtttcccgtgccaaaatcctgaatattcatttcgcccctgagcactgggttgaagacgcgaaattgggactgttggtctgcgacgagctgctgcatttgtatttcagaaagcctgaaaagctatcatggcagcaaggcccaagctccactatcccaacggaagaggccggatggagtccgtgagatgggttttagctgccgccggagtcgaggtaaccacctgctgttccaacaagtgcccatggttgaaattgacgggatgaagttggtacagacccgaagcattctccactacatagcagacaagcacaatctctttgggattgacatgtacgtggaggggacactggatctgctggaactgcttatcatgcatcctttcttaaaaccagatgatcagcaaaaggaagtggttaacatggcccagaaggctataattagatactttcctgtgtttgaaaagattttaaggggtcacggacaaagctttcttgttggtaatcagctgagccttgcagatgtgattttactccaaaccattttagctctagaagagaaaattcctaatatcctgtctgcatttcctttcctccaggaatacacagtgaaactaagtaatatccctacaattaagagattccttgaacctggcagcaagaagaagcctccccctgatgaaatttatgtgagaaccgtctacaacatctttaggccataaaacaacacatccatgtgtgagtgacagtgtgttcctagagatggtattgtctacagtcatgtcttaatggatcccagctctgtcatggtgctatctatgtattaagttgggtcctaagttgggtcttttgtgtcaaagagatcatctcttctagaaatatcaaccttttttgtccagtaaataattgttaggggatctttattggaaaacttttttggagaggctggtatttaagttagatctgattgggctactcatgtcctgtagccagttcatcctcataataagaatgggcaggatctcttgttctctcctgagtgtctttctactctcctgagcgtctttctgctctccttatcctgttctcttatccttatcccctccagtctctgcctaatttttagtgtttaataacaaccgaatgtctagtaaatgactctcctctgagctgtaataaataaaatggtagtaatgaatgcaatcagtgttagccaaaataaagaatttatgagtcattgctca

SEQ ID NO: 436942 - DNA, 1070 bp, Homo sapiens
agcggagtctccattggtgaggtcgtcccggagcctcgcccagctcccgcgcgctagagccgcctgctggtctcacccagccgggaccgctgacctggcgctttgtgcggctccaggcctccgagtggactccagaaagcctgaaaagctatcatggcagcaaggcccaagctccactatcccaacggaagaggccggatggagtccgtgagatgggttttagctgccgccggagtcgagtttgatgaagaatttctggaaacaaaagaacagttgtacaagttgcaggatggtaaccacctgctgttccaacaagtgcccatggttgaaattgacgggatgaagttggtacagacccgaagcattctccactacatagcagacaagcacaatctctttggcaagaacctcaaggagagaaccctgaatacacagtgaaactaagtaatatccctacaattaagagattccttgaacctggcagcaagaagaagcctccccctgatgaaatttatgtgagaaccgtctacaacatctttaggccataaaacaacacatccatgtgtgagtgacagtgtgttcctagagatggtattgtctacagtcatgtcttaatggatcccagctctgtcatggtgctatctatgtattaagttgggtcctaagttgggtcttttgtgtcaaagagatcatctcttctagaaatatcaaccttttttgtccagtaaataattgttaggggatctttattggaaaacttttttggagaggctggtatttaagttagatctgattgggctactcatgtcctgtagccagttcatcctcataataagaatgggcaggatctcttgttctctcctgagtgtctttctactctcctgagcgtctttctgctctccttatcctgttctcttatccttatcccctccagtctctgcctaatttttagtgtttaataacaaccgaatgtctagtaaatgactctcctctgagctgtaataaataaaatggtagtaatgaatgcaatcagtgttagccaaaataaagaatttatgagtcattgctca

SEQ ID NO: 436943 - DNA, 1369 bp, Homo sapiens
agcggagtctccattggtgaggtcgtcccggagcctcgcccagctcccgcgcgctagagccgcctgctggtctcacccagccgggaccgctgacctggcgctttgtgcggctccaggcctccgagtggactccagtgagggaaaatgcagcaacaaaaataaagaacagtttcccgtgccaaaatcctgaatattcatttcgcccctgagcactgggttgaagacgcgaaattgggactgttggtctgcgacgagctgctgcatttgtatttcagaaagcctgaaaagctatcatggcagcaaggcccaagctccactatcccaacggaagaggccggatggagtccgtgagatgggttttagctgccgccggagtcgagtttgatgaagaatttctggaaacaaaagaacagttgtacaagttgcaggatggtaaccacctgctgttccaacaagtgcccatggttgaaattgacgggatgaagttggattgacatgtacgtggaggggacactggatctgctggaactgcttatcatgcatcctttcttaaaaccagatgatcagcaaaaggaagtggttaacatggcccagaaggctataattagatactttcctgtgtttgaaaagattttaaggggtcacggacaaagctttcttgttggtaatcagctgagccttgcagatgtgattttactccaaaccattttagctctagaagagagaatacacagtgaaactaagtaatatccctacaattaagagattccttgaacctggcagcaagaagaagcctccccctgatgaaatttatgtgagaaccgtctacaacatctttaggccataaaacaacacatccatgtgtgagtgacagtgtgttcctagagatggtattgtctacagtcatgtcttaatggatcccagctctgtcatggtgctatctatgtattaagttgggtcctaagttgggtcttttgtgtcaaagagatcatctcttctagaaatatcaaccttttttgtccagtaaataattgttaggggatctttattggaaaacttttttggagaggctggtatttaagttagatctgattgggctactcatgtcctgtagccagttcatcctcataataagaatgggcaggatctcttgttctctcctgagtgtctttctactctcctgagcgtctttctgctctccttatcctgttctcttatccttatcccctccagtctctgcctaatttttagtgtttaataacaaccgaatgtctagtaaatgactctcctctgagctgtaataaataaaatggtagtaatgaatgcaatcagtgttagccaaaataaagaatttatgagtcattgctca

SEQ ID NO: 436944 - DNA, 1898 bp, Homo sapiens
agcggagtctccattggtgaggtcgtcccggagcctcgcccagctcccgcgcgctagagccgcctgctggtctcacccagccgggaccgctgacctggcgctttgtgcggctccaggcctccgagtggactccagaaagcctgaaaagctatcatggcagcaaggcccaagctccactatcccaacggaagaggccggatggagtccgtgagatgggttttagctgccgccggagtcgagtttgatgaagaatttctggaaacaaaagaacagttgtacaagttgcaggatggtaaccacctgctgttccaacaagtgcccatggttgaaattgacgggatgaagttggtacagacccgaagcattctccactacatagcagacaagcacaatctctttggcaagaacctcaaggagagaaccctgtactgtggcccctctcgagtgttgtcacttgtcagcttactgatgccttagctgattagcaacctctgtagcacaccacatttactttatgtcttacatagttagtgagatcagggaacaaaaacccaagaaggtcacgaagaccagttggaacttcagtagagagagtctgagttcagatttcaacatttttaaatgctttgatactgctttttccctttcttgcacattcactattgttaagtattaggaatgaggagctgctgtgacattcaaggcctgggagagtgagcattagattataatttgaaatcaaagcctggtccttgcaccccttagatgtatgaccctgggcaacgtgggtataagaatagtacatttctcatagtgtcatgtgatttaatgagataatggatagagagtgtttagcaccatgcctggtacactctaagcactcaataagtggtattcactatttttataaagttgaagtttgacccatacgaagagaccaaaacatggatgctggggtaaaagtggaggagtaggatgccaggagagagagcactcatgactgtcaagctgtctgatctgtgacagatttttctgagttacaactagaattgaccttatatctttgctcttaagagacaggtataggtaaatgcttctagggacttaagttgcagcatctttaaaaaaaaaaaaaaaagcactctgaattcttagttgtggaaactgatggcttcaaagagaggagaaactgagacaactgcttttttgttttaaggattgacatgtacgtggaggggacactggatctgctggaactgcttatcatgcatcctttcttaaaaccagatgatcagcaaaaggaagtggttaacatggcccagaaggctataattagatactttcctgtgtttgaaaagctggcagcaagaagaagcctccccctgatgaaatttatgtgagaaccgtctacaacatctttaggccataaaacaacacatccatgtgtgagtgacagtgtgttcctagagatggtattgtctacagtcatgtcttaatggatcccagtgtcaaagagatcatctcttctagaaatatcaaccttttttgtccagtaaataattgttaggggatctttattggaaaacttttttggagaggctggtatttaagttagatctgattgggctactcatgtcctgtagccagttcatcctcataataagaatgggcaggatctcttgttctctcctgagtgtctttctactctcctgagcgtctttctgctctccttatcctgttctcttatccttatcccctccagtctctgcctaatttttagtgtttaataacaaccgaatgtctagtaaatgactctcctctgagctgtaataaataaaatggtagtaatgaatgcaatcagtgttagccaaaataaagaatttatgagtcattgctca

SEQ ID NO: 436945 - DNA, 847 bp, Homo sapiens
agcggagtctccattggtgaggtcgtcccggagcctcgcccagctcccgcgcgctagagccgcctgctggtctcacccagccgggaccgctgacctggcgctttgtgcggctccaggcctccgagtggactccagaaagcctgaaaagctatcatggcagcaaggcccaagctccactatcccaacggaagaggccggatggagtccgtgagatgggttttagctgccgccggagtcgagtttgatgaagaatttctggaaacaaaagaacagttgtacaagttgcaggatggtaaccacctgctgttccaacaagtgcccatggttgaaattgacgggatgaagttggtacagacccgaagcattctccactacatagcagacaagcacaatctctttggcaagaacctcaaggagagaaccctgattgacatgtacgtggaggggacactggatctgctggaactgcttatcatgcatcctttcttaaaaccagatgatcagcaaaaggaagtggttaacatggcccagaaggctataattagatactttcctgtgtttgaaaagattttaaggggtcacggacaaagctttcttgttggtaatcagctgagccttgcagatccgctatccgtcgacggatagcggatctgctccgagcagtacatgctaagacttcaccagtcaaagcgaactactatactcaattgatccaataacttgaccaacggaacaagttaccctagggataacagcgcaatcctattctagagtccatatcaacaatagggtttacgacctcgatgttggatcaggacatcccaatggtgcagatcccgctatccgt

SEQ ID NO: 436946 - DNA, 1200 bp, Homo sapiens
agcggagtctccattggtgaggtcgtcccggagcctcgcccagctcccgcgcgctagagccgcctgctggtctcacccagccgggaccgctgacctggcgctttgtgcggctccaggcctccgagtggactccagaaagcctgaaaagctatcatggcagcaaggcccaagctccactatcccaacggaagaggccggatggagtccgtgagatgggttttagctgccgccggagtcgaggtaccttatatgctgtttcttcacggatttgtcatacagcttttgagacctttgaaagaaaaatacgttttgaagcaccgttcagttctagttctcgtccaccaaaatcacaggcacgcttcactgagtcagataccatccctgaagggatttttctttataattagaacgtagttgatggaattctattttccttttgacttttacttaattattggcttctgatctagcaccagtgaatatttattaataagaagaaaggaaatttacctgaaaattgtcagttactctgagctcttattaattatgcattctcagggtaaatttcttgttttcttcagtggcttcaaactggcagccttggtatcttgcttacatatgtgtgtgtgtctgtttttgttttcgttctgttcttttagcttcttagtatggaaattttcaaataccaataaatgtagagagaacattgccatgaattctatgtactcatcacccgacttcagcaatcatcagctctatgctaatcttgtttcatctatcacctcccttcccttgttttgtgggagtattttaaagcaaaatccaaacatcataacatttcatctgggagttcctcaacattttcctctaacagatgaggattttaaaatgtaacaatattattatcacatccaacaaaattagcaattctttgtcatctaaccttcagtctgattgtctcaaacaggcattttgtttgtttgtttgtttttatagtttgttttagtttggatctagacattggtctacgcattacatttaaaatggttatgtttctttcggtattttaaaaacctgtaagtttcctcttcattttttacaaatttatatttgggaatattttcagatttatagaaaagttgtaaaataatacagtcccactgcattccagcctggacaacagaacgagactccatctca

SEQ ID NO: 436947 - DNA, 307 bp, Homo sapiens
gtctgtctccctcctgcggtcgcccccttcctcgccctttctctcttcttttttttccctcccctttactctctgagtctcactctcgcattcttccctcactcccccagttcagtccttctcttgtcttttcttcctcttgtcctttgtcctcctgctccatccagtctgggcagaggtgggccccttggctggagctggggtccttcttggctcagtgtgcgtatttttttttaaaccccttctgcggagtctgaatgcattggtggaaggtgggctcggatcgtccccgggcctggctgggctg

SEQ ID NO: 436948 - DNA, 474 bp, Homo sapiens
tgcacattcactattgttaagtattaggaatgaggagctgctgtgacattcaaggcctgggagagtgagcattagattataatttgaaatcaaagcctggtccttgcaccccttagatgtatgaccctgggcaacgtgggtataagaatagtacatttctcatagtgtcatgtgatttaatgagataatggatagagagtgtttagcaccatgcctggtacactctaagcactcaataagtggtattcactatttttataaagttgaagtttgacccatacgaagagaccaaaacatggatgctggggtaaaagtggaggagtaggatgccaggagagagagcactcatgactgtcaagctgtctgatctgtgacagatttttctgagttacaactagaattgaccttatatctttgctcttaagagacaggtataggtaaatgcttctagggacttaagttgcagcatcttta

SEQ ID NO: 436949 - DNA, 488 bp, Homo sapiens
aaaaacccaagaaggtcacgaagaccagttggaacttcagtagagagagtctgagtaaaacaaaagaataggattcagatattgaatattatatctagggtgtcattgtttcagatttcaacatttttaaatgctttgatactgctttttccctttcttgcacattcactattgttaagtattaggaatgaggagctgctgtgacattcaaggcctgggagagtgagcattagattataatttgaaatcaaagcctggtccttgcaccccttagatgtatgaccctgggcaacgtgggtataagaatagtacatttctcatagtgtcatgtgatttaatgagataatggatagagagtgtttagcaccatgcctggtacactctaagcactcaataagtggtattcactatttttataaagttgaagtttgacccatacgaagagaccaaaacatggatgctggggtaaaagtggaggagtaggatgc

SEQ ID NO: 436950 - DNA, 935 bp, Homo sapiens
  misc_feature (853)..(853): n is a, c, g, or t
agcggagtctccattggtgaggtcgtcccggagcctcgcccagctcccgcgcgctagagccgcctgctggtctcacccagccgggaccgctgacctggcgctttgtgcggctccaggcctccgagtggactccagaaagcctgaaaagctatcatggcagcaaggcccaagctccactatcccaacggaagaggccggatggagtccgtgagatgggttttagctgccgccggagtcgagtttgatgaagaatttctggaaacaaaagaacagttgtacaagttgcaggatggtaaccacctgctgttccaacaagtgcccatggttgaaattgacgggatgaagttggtacagacccgaagcattctccactacatagcagacaagcacaatctctttggcaagaacctcaaggagagaaccctgattgacatgtacgtggaggggacactggatctgctggaactgcttatcatgcatcctttcttaaaaccagatgatcagcaaaaggaagtggttaacatggcccagaaggctataattagatactttcctgtgtttgaaaagattttaaggggtcacggacaaagctttcttgttggtaatcagctgagccttgcagatgtgattttactccaaaccattttagctctagaagagaaaattcctaatatcctgtctgcatttcctttcctccaggaatacacagtgaaactaagtaatatccctacaattaagagattccttgaacctggcagcaagaagaagcctccccctgatgaaatttatgtgagaaccgtctacaacatctttaggccataaaacaacacatccatgtgtgagtgaccgggtnccacaacagtttggttcagccgcttatgggccctcggcgggcctttttaggggccaccggcgctgggcaaaaaacttaaaac

SEQ ID NO: 436951 - DNA, 1311 bp, Homo sapiens
gtctcactctcgcattcttccctcactcccccagttcagtccttctcttgtcttttcttcctcttgtcctttgtcctcctgctccatccagtctgggcagagaaagcctgaaaagctatcatggcagcaaggcccaagctccactatcccaacggaagaggccggatggagtccgtgagatgggttttagctgccgccggagtcgagtttgatgaagaatttctggaaacaaaagaacagttgtacaagttgcaggatggtaaccacctgctgttccaacaagtgcccatggttgaaattgacgggatgaagttggtacagacccgaagcattctccactacatagcagacaagcacaatctctttggcaagaacctcaaggagagaaccctgattgacatgtacgtggaggggacactggatctgctggaactgcttatcatgcatcctttcttaaaaccagatgatcagcaaaaggaagtggttaacatggcccagaaggctataattagatactttcctgtgtttgaaaagattttaaggggtcacggacaaagctttcttgttggtaatcagctgagccttgcagatgtgattttactccaaaccattttagctctagaagagaaaattcctaatatcctgtctgcatttcctttcctccaggaatacacagtgaaactaagtaatatccctacaattaagagattccttgaacctggcagcaagaagaagcctccccctgatgaaatttatgtgagaaccgtctacaacatctttaggccataaaacaacacatccatgtgtgagtgacagtgtgttcctagagatggtattgtctacagtcatgtcttaatggatcccagctctgtcatggtgctatctatgtattaagttgggtcctaagttgggtcttttgtgtcaaagagatcatctcttctagaaatatcaaccttttttgtccagtaaataattgttaggggatctttattggaaaacttttttggagaggctggtatttaagttagatctgattgggctactcatgtcctgtagccagttcatcctcataataagaatgggcaggatctcttgttctctcctgagtgtctttctactctcctgagcgtctttctgctctccttatcctgttctcttatccttatcccctccagtctctgcctaatttttagtgtttaataacaaccgaatgtctagtaaatgactctcctctgagctgtaataaataaaatggtagtaatgaatgcaatcagtgttagccaaaataaagaatttatgagtcattgctca

SEQ ID NO: 436952 - DNA, 1292 bp, Homo sapiens
agcggagtctccattggtgaggtcgtcccggagcctcgcccagctcccgcgcgctagagccgcctgctggtctcacccagccgggaccgctgacctggcgctttgtgcggctccaggcctccgagtggactccagaaagcctgaaaagctatcatggcagcaaggcccaagctccactatcccaacggaagaggccggatggagtccgtgagatgggttttagctgccgccggagtcgaggtaaccacctgctgttccaacaagtgcccatggttgaaattgacgggatgaagttggtacagacccgaagcattctccactacatagcagacaagcacaatctctttggcaagaacctcaaggagagaaccctgattgacatgtacgtggaggggacactggatctgctggaactgcttatcatgcatcctttcttaaaaccagatgatcagcaaaaggaagtggttaacatggcccagaaggctataattagatactttcctgtgtttgaaaagattttaaggggtcacggacaaagctttcttgttggtaatcagctgagccttgcagatgtgattttactccaaaccattttagctctagaagagaaaattcctaatatcctgtctgcatttcctttcctccaggaatacacagtgaaactaagtaatatccctacaattaagagattccttgaacctggcagcaagaagaagcctccccctgatgaaatttatgtgagaaccgtctacaacatctttaggccataaaacaacacatccatgtgtgagtgacagtgtgttcctagagatggtattgtctacagtcatgtcttaatggatcccagctctgtcatggtgctatctatgtattaagttgggtcctaagttgggtcttttgtgtcaaagagatcatctcttctagaaatatcaaccttttttgtccagtaaataattgttaggggatctttattggaaaacttttttggagaggctggtatttaagttagatctgattgggctactcatgtcctgtagccagttcatcctcataataagaatgggcaggatctcttgttctctcctgagtgtctttctactctcctgagcgtctttctgctctccttatcctgttctcttatccttatcccctccagtctctgcctaatttttagtgtttaataacaaccgaatgtctagtaaatgactctcctctgagctgtaataaataaaatggtagtaatgaatgcaatcagtgttagccaaaataaagaatttatgagtcattgctca

SEQ ID NO: 436953 - DNA, 1432 bp, Homo sapiens
agcggagtctccattggtgaggtcgtcccggagcctcgcccagctcccgcgcgctagagccgcctgctggtctcacccagccgggaccgctgacctggcgctttgtgcggctccaggcctccgagtggactccagtgagggaaaatgcagcaacaaaaataaagaacagtttcccgtgccaaaatcctgaatattcatttcgcccctgagcactgggttgaagacgcgaaattgggactgttggtctgcgacgagctgctgcatttgtatttcagaaagcctgaaaagctatcatggcagcaaggcccaagctccactatcccaacggaagaggccggatggagtccgtgagatgggttttagctgccgccggagtcgaggtaaccacctgctgttccaacaagtgcccatggttgaaattgacgggatgaagttggtacagacccgaagcattctccactacatagcagacaagcacaatctctttggcaagaacctcaaggagagaaccctgattgacatgtacgtggaggggacactggatctgctggaactgcttatcatgcatcctttcttaaaaccagatgatcagcaaaaggaagtggttaacatggcccagaaggctataattagatactttcctgtgtttgaaaagattttaaggggtcacggacaaagctttcttgttggtaatcagctgagccttgcagatgtgattttactccaaaccattttagctctagaagagaaaattcctaatatcctgtctgcatttcctttcctccaggaatacacagtgaaactaagtaatatccctacaattaagagattccttgaacctggcagcaagaagaagcctccccctgatgaaatttatgtgagaaccgtctacaacatctttaggccataaaacaacacatccatgtgtgagtgacagtgtgttcctagagatggtattgtctacagtcatgtcttaatggatcccagctctgtcatggtgctatctatgtattaagttgggtcctaagttgggtcttttgtgtcaaagagatcatctcttctagaaatatcaaccttttttgtccagtaaataattgttaggggatctttattggaaaacttttttggagaggctggtatttaagttagatctgattgggctactcatgtcctgtagccagttcatcctcataataagaatgggcaggatctcttgttctctcctgagtgtctttctactctcctgagcgtctttctgctctccttatcctgttctcttatccttatcccctccagtctctgcctaatttttagtgtttaataacaaccgaatgtctagtaaatgactctcctctgagctgtaataaataaaatggtagtaatgaatgcaatcagtgttagccaaaataaagaatttatgagtcattgctca

SEQ ID NO: 436954 - DNA, 1276 bp, Homo sapiens
agcggagtctccattggtgaggtcgtcccggagcctcgcccagctcccgcgcgctagagccgcctgctggtctcacccagccgggaccgctgacctggcgctttgtgcggctccaggcctccgagtggactccagaaagcctgaaaagctatcatggcagcaaggcccaagctccactatcccaacggaagaggccggatggagtccgtgagatgggttttagctgccgccggagtcgagtttgatgaagaatttctggaaacaaaagaacagttgtacaagttgcaggatggtaaccacctgctgttccaacaagtgcccatggttgaaattgacgggatgaagttggtacagacccgaagcattctccactacatagcagacaagcacaatctctttggcaagaacctcaaggagagaaccctcagatgatcagcaaaaggaagtggttaacatggcccagaaggctataattagatactttcctgtgtttgaaaagattttaaggggtcacggacaaagctttcttgttggtaatcagctgagccttgcagatgtgattttactccaaaccattttagctctagaagagaaaattcctaatatcctgtctgcatttcctttcctccaggaatacacagtgaaactaagtaatatccctacaattaagagattccttgaacctggcagcaagaagaagcctccccctgatgaaatttatgtgagaaccgtctacaacatctttaggccataaaacaacacatccatgtgtgagtgacagtgtgttcctagagatggtattgtctacagtcatgtcttaatggatcccagctctgtcatggtgctatctatgtattaagttgggtcctaagttgggtcttttgtgtcaaagagatcatctcttctagaaatatcaaccttttttgtccagtaaataattgttaggggatctttattggaaaacttttttggagaggctggtatttaagttagatctgattgggctactcatgtcctgtagccagttcatcctcataataagaatgggcaggatctcttgttctctcctgagtgtctttctactctcctgagcgtctttctgctctccttatcctgttctcttatccttatcccctccagtctctgcctaatttttagtgtttaataacaaccgaatgtctagtaaatgactctcctctgagctgtaataaataaaatggtagtaatgaatgcaatcagtgttagccaaaataaagaatttatgagtcattgctca

SEQ ID NO: 436955 - DNA, 1211 bp, Homo sapiens
agcggagtctccattggtgaggtcgtcccggagcctcgcccagctcccgcgcgctagagccgcctgctggtctcacccagccgggaccgctgacctggcgctttgtgcggctccaggcctccgagtggactccagaaagcctgaaaagctatcatggcagcaaggcccaagctccactatcccaacggaagaggccggatggagtccgtgagatgggttttagctgccgccggagtcgagtttgatgaagaatttctggaaacaaaagaacagttgtacaagttgcaggatggattgacatgtacgtggaggggacactggatctgctggaactgcttatcatgcatcctttcttaaaaccagatgatcagcaaaaggaagtggttaacatggcccagaaggctataattagatactttcctgtgtttgaaaagattttaaggggtcacggacaaagctttcttgttggtaatcagctgagccttgcagatgtgattttactccaaaccattttagctctagaagagaaaattcctaatatcctgtctgcatttcctttcctccaggaatacacagtgaaactaagtaatatccctacaattaagagattccttgaacctggcagcaagaagaagcctccccctgatgaaatttatgtgagaaccgtctacaacatctttaggccataaaacaacacatccatgtgtgagtgacagtgtgttcctagagatggtattgtctacagtcatgtcttaatggatcccagctctgtcatggtgctatctatgtattaagttgggtcctaagttgggtcttttgtgtcaaagagatcatctcttctagaaatatcaaccttttttgtccagtaaataattgttaggggatctttattggaaaacttttttggagaggctggtatttaagttagatctgattgggctactcatgtcctgtagccagttcatcctcataataagaatgggcaggatctcttgttctctcctgagtgtctttctactctcctgagcgtctttctgctctccttatcctgttctcttatccttatcccctccagtctctgcctaatttttagtgtttaataacaaccgaatgtctagtaaatgactctcctctgagctgtaataaataaaatggtagtaatgaatgcaatcagtgttagccaaaataaagaatttatgagtcattgctca

SEQ ID NO: 436956 - DNA, 1306 bp, Homo sapiens
agcggagtctccattggtgaggtcgtcccggagcctcgcccagctcccgcgcgctagagccgcctgctggtctcacccagccgggaccgctgacctggcgctttgtgcggctccaggcctccgagtggactccagaaagcctgaaaagctatcatggcagcaaggcccaagctccactatcccaacggaagaggccggatggagtccgtgagatgggttttagctgccgccggagtcgagtttgatgaagaatttctggaaacaaaagaacagttgtacaagttgcaggatggtaaccacctgctgttccaacaagtgcccatggttgaaattgacgggatgaagttggtacagacccgaagcattctccactacatagcagacaagcacaatctctttggcaagaacctcaaggagagaaccctgattgacatgtacgtggaggggacactggatctgctggaactgcttatcatgcatcctttcttaaaaccagatgatcagcaaaaggaagtggttaacatggcccagaaggctataattagatactttcctgtgtttgaaaagattttaaggggtcacggacaaagctttcttgttggtaatcagctgagccttgcagatgtgattttactccaaaccattttagctctagaagagagaatacacagtgaaactaagtaatatccctacaattaagagattccttgaacctggcagcaagaagaagcctccccctgatgaaatttatgtgagaaccgtctacaacatctttaggccataaaacaacacatccatgtgtgagtgacagtgtgttcctagagatggtattgtctacagtcatgtcttaatggatcccagctctgtcatggtgctatctatgtattaagttgggtcctaagttgggtcttttgtgtcaaagagatcatctcttctagaaatatcaaccttttttgtccagtaaataattgttaggggatctttattggaaaacttttttggagaggctggtatttaagttagatctgattgggctactcatgtcctgtagccagttcatcctcataataagaatgggcaggatctcttgttctctcctgagtgtctttctactctcctgagcgtctttctgctctccttatcctgttctcttatccttatcccctccagtctctgcctaatttttagtgtttaataacaaccgaatgtctagtaaatgactctcctctgagctgtaataaataaaatggtagtaatgaatgcaatcagtgttagccaaaataaagaatttatgagtcattgctca

SEQ ID NO: 436957 - DNA, 2536 bp, Homo sapiens
agcggagtctccattggtgaggtcgtcccggagcctcgcccagctcccgcgcgctagagccgcctgctggtctcacccagccgggaccgctgacctggcgctttgtgcggctccaggcctccgagtggactccagaaagcctgaaaagctatcatggcagcaaggcccaagctccactatcccaacggaagaggccggatggagtccgtgagatgggttttagctgccgccggagtcgagtttgatgaagaatttctggaaacaaaagaacagttgtacaagttgcaggatggtaaccacctgctgttccaacaagtgcccatggttgaaattgacgggatgaagttggtacagacccgaagcattctccactacatagcagacaagcacaatctctttggcaagaacctcaaggagagaaccctgtactgtggcccctctcgagtgttgtcacttgtcagcttactgatgccttagctgattagcaacctctgtagcacaccacatttactttatgtcttacatagttagtgagatcagggaacaaaaacccaagaaggtcacgaagaccagttggaacttcagtagagagagtctgagttcagatttcaacatttttaaatgctttgatactgctttttccctttcttgcacattcactattgttaagtattaggaatgaggagctgctgtgacattcaaggcctgggagagtgagcattagattataatttgaaatcaaagcctggtccttgcaccccttagatgtatgaccctgggcaacgtgggtataagaatagtacatttctcatagtgtcatgtgatttaatgagataatggatagagagtgtttagcaccatgcctggtacactctaagcactcaataagtggtattcactatttttataaagttgaagtttgacccatacgaagagaccaaaacatggatgctggggtaaaagtggaggagtaggatgccaggagagagagcactcatgactgtcaagctgtctgatctgtgacagatttttctgagttacaactagaattgaccttatatctttgctcttaagagacaggtataggtaaatgcttctagggacttaagttgcagcatctttaaaaaaaaaaaaaaaagcactctgaattcttagttgtggaaactgatggcttcaaagagaggagaaactgagacaactgcttttttgttttaaggattgacatgtacgtggaggggacactggatctgctggaactgcttatcatgcatcctttcttaaaaccagatgatcagcaaaaggaagtggttaacatggcccagaaggctataattagatactttcctgtgtttgaaaagggtaggtggcagagatgcctacatacacagagcaaccaaaccacaaaccacaaagaagctgccacaaacacccttttctgtccaaggattttaaaactgagcccagttgaactaacataagcgctaatggactcctaagagcgaatagtagccacagcacaaagctggtgtcttagagccccttggactctgctaggaccacatgattcagaagtctagaaaaagtatgggctccctgcctttgttccttattgttccttgcattcaccaagttcccaccttgtgtggatacagcagaaacttcagaagatacagaaaacaaaaactacctcattcattcattcaacaaaagttgtcaaacagctgtctcatagctgacatcctccctgataatttgatatgagtagaagaaccatttccattttatttatcttccctttgctctttttgtttttggttttgttgtttttctcttcttgttatatctgcttttctgagcttcaaattctttattcctgaactgggaggaacttttttagtgtttcaatgcaaacactaaagaagagggtgtgaaaatatgggaagacctatttggcaagcttcctctgaccatctttatggaactagatttaggaaaaaggagaggtattttctggggtttctgtagctaggttttatggtatctttcccacaggcactttgtgaatgtaaaataggataatgaagaaatgtggtctggaacgggcacagaggacctggtgctttggcaaaggttcactgctcattcttaggtcccaagggcccagactgtgtcagggtttcttgcaacacgcctatgaggtgagaaccgttgtcccttttacacataatgaaatgaagtcatgaagagattcagtgacctgtccaaggtaacatggccagaaaatggagagcagggttggaactctggcctctgactacaaattcaggatgcattgtactatgccactctggctccagtagctatatttgacctggaattgtgttcggagtccctgtgacacacacacttgtgcacatgcagacacccatgggcatccaagagttgactgtgaaggggatctcccctttgctactactgcttcttgcctctccctaatcacaatctattcttataagccccacacctatacgttacc

SEQ ID NO: 436958 - DNA, 1668 bp, Homo sapiens
agcggagtctccattggtgaggtcgtcccggagcctcgcccagctcccgcgcgctagagccgcctgctggtctcacccagccgggaccgctgacctggcgctttgtgcggctccaggcctccgagtggactccagaaagcctgaaaagctatcatggcagcaaggcccaagctccactatcccaacggaagaggccggatggagtccgtgagatgggttttagctgccgccggagtcgagtttgatgaagaatttctggaaacaaaagaacagttgtacaagttgcaggatggtaaccacctgctgttccaacaagtgcccatggttgaaattgacgggatgaagttggattgacatgtacgtggaggggacactggatctgctggaactgcttatcatgcatcctttcttaaaaccagatgatcagcaaaaggaagtggttaacatggcccagaaggctataattagatactttcctgtgtttgaaaagggtaggtggcagagatgcctacatacacagagcaaccaaaccacaaaccacaaagaagctgccacaaacacccttttctgtccaaggattttaaaactgagcccagttgaactaacataagcgctaatggactcctaagagcgaatagtagccacagcacaaagctggtgtcttagagccccttggactctgctaggaccacatgattcagaagtctagaaaaagtatgggctccctgcctttgttccttattgttccttgcattcaccaagttcccaccttgtgtggatacagcagaaacttcagaagatacagaaaacaaaaactacctcattcattcattcaacaaaagttgtcaaacagctgtctcatagctgacatcctccctgataatttgatatgagtagaagaaccatttccattttatttatcttccctttgctctttttgtttttggttttgttgtttttctcttcttgttatatctgcttttctgagcttcaaattctttattcctgaactgggaggaacttttttagtgtttcaatgcaaacactaaagaagagggtgtgaaaatatgggaagacctatttggcaagcttcctctgaccatctttatggaactagatttaggaaaaaggagaggtattttctggggtttctgtagctaggttttatggtatctttcccacaggcactttgtgaatgtaaaataggataatgaagaaatgtggtctggaacgggcacagaggacctggtgctttggcaaaggttcactgctcattcttaggtcccaagggcccagactgtgtcagggtttcttgcaacacgcctatgaggtgagaaccgttgtcccttttacacataatgaaatgaagtcatgaagagattcagtgacctgtccaaggtaacatggccagaaaatggagagcagggttggaactctggcctctgactacaaattcaggatgcattgtactatgccactctggctccagtagctatatttgacctggaattgtgttcggagtccctgtgacacacacacttgtgcacatgcagacacccatgggcatccaagagttgactgtgaaggggatctcccctttgctactactgcttcttgcctctccctaatcacaatctattcttataagccccacacctatacgttacc

SEQ ID NO: 436959 - DNA, 1354 bp, Homo sapiens
agcggagtctccattggtgaggtcgtcccggagcctcgcccagctcccgcgcgctagagccgcctgctggtctcacccagccgggaccgctgacctggcgctttgtgcggctccaggcctccgagtggactccagaaagcctgaaaagctatcatggcagcaaggcccaagctccactatcccaacggaagaggccggatggagtccgtgagatgggttttagctgccgccggagtcgaggtaccttatatgctgtttcttcacggatttgtcatacagcttttgagacctttgaaagaaaaatacgttttgaagcaccgttcagttctagttctcgtccaccaaaatcacaggcacgcttcactgagtcagataccatccctgaagggatttttctttataattagaacgtagttgatggaattctattttccttttgacttttacttaattattggcttctgatctagcaccagtgaatatttattaataagaagaaaggaaatttacctgaaaattgtcagttactctgagctcttattaattatgcattctcagggtaaatttcttgttttcttcagtggcttcaaactggcagccttggtatcttgcttacatatgtgtgtgtgtctgtttttgttttcgttctgttcttttagcttcttagtatggaaattttcaaataccaataaatgtagagagaacattgccatgaattctatgtactcatcacccgacttcagcaatcatcagctctatgctaatcttgtttcatctatcacctcccttcccttgttttgtgggagtattttaaagcaaaatccaaacatcataacatttcatctgggagttcctcaacattttcctctaacagatgaggattttaaaatgtaacaatattattatcacatccaacaaaattagcaattctttgtcatctaaccttcagtctgattgtctcaaacaggcattttgtttgtttgtttgtttttatagtttgttttagtttggatctagacattggtctacgcattacatttaaaatggttatgtttctttcggtattttaaaaacctgtaagtttcctcttcattttttacaaatttatatttgggaatattttcagatttatagaaaagttgtaaaataatacagtccctcattcagtctcccttaatgataacatcttacatcaccatgtcatattacgaaattaacattggtgcatgactaactaaactacagactttattcagatttcactgttttttctactaatgttctgggtttttttttgacggaggctggctctcactgcattccagcctggacaacagaacgagactccatctca

SEQ ID NO: 436960 - DNA, 2452 bp, Homo sapiens
gcggccgcgggcgcccctgccctgagcccaccccgcgctctgccctccctaacaatgggaatggggcagaaggaggcgccccactgcggggaggtgaggggtgggtttgggactggggtccgcggtggggggaggtgcgatctcgggctctcgcctctccgctccctctggctctggagttgggggcccctgtggggctctgaagtccgcctgagacttgggtcaagagtcaaactgtcgccccccgctcctcccccaaaatccggtgagcggtaaggaaagtgatgccaagtcttcgaagcctcagtgacaaacgcatagcaagaacacatccactccagagataccttctcgaaacaaaagattttcctacctgcttatacttggtaaccgagggaattactaagacttcttgctcatttctgagtattgtctttatatcctgacactatgaatgctacttggatgcctcttaagtctgttctctggggaggcagtaaggggccgtggagctggcctcggcctcggcatcgggagaggctggacttcctgtctctctgtgctgaatggctgcgatggcgcccgctctcactgacgcagcagctgaagcacaccatatccggttcaaactggctcccccatcctctaccttgtcccctggcagtgccgaaaataacggcaacgccaacatccttattgctgccaacggaaccaaaagaaaagccattgctgcagaggatcccagcctagatttccgaaataatcctaccaaggaagacttgggaaagctgcaaccactggtggcatcttatctctgctctgatgtaacatctgttccctcaaaggagtctttgaagttgcaaggggtcttcagcaagcagacagtccttaaatctcatcctctcttatctcagtcctatgaactccgagctgagctgttggggagacagccagttttggagttttccttagaaaatcttagaaccatgaatacgagtggtcagacagctctgccacaagcacctgtaaatgggttggctaagaaattgactaaaagttcaacacattctgatcatgacaattccacttccctcaatgggggaaaacgggctctcacttcatctgctcttcatgggggtgaaatgggaggatctgaatctggggacttgaaggggggtatgaccaattgcactcttccacatagaagccttgatgtagaacacacaactttgtatagcaataatagcactgcaaacaaatcctctgtcaattccatggaacagccggcacttcaaggaagcagtagattatcacctggtacagactccagctctaacttggggggtgtcaaattggagggtaaaaagtctcccctgtcttccattcttttcagtgctttagattctgacacaaggataacagctttactgcggcgacaggctgacattgagagccgtgcccgcagattacaaaagcgcttacaggttgtgcaagccaagcaggttgagaggcatatacaacatcagctgggtggatttttggagaagactttgagcaaactgccaaacttggaatccttgagaccacggagccagttgatgctgactcgaaaggctgaagctgccttgagaaaagctgccagtgagaccaccacttccagagggacttagcaactttctgaaaagcaattcaatttcagaagaattggagagatttacagctagtggcatagccaacttgaggtgcagtgaacaggcatttgattcagatgtcactgacagtagttcaggaggggagtctgatattgaagaggaagaactgaccagagctgatcccgagcagcgtcatgtacccctgtgagtagacctcatgcatgatagcattcttgagaaatgttggcacaaggaagaatgaatgaatcgccattatggagagaatgtgattctttgtacataggtgtctaggttctgtttgttttttccctgatgttgggtagatgagtgcatatacatgctagtgaagaaggggaagatacttttgctgtagggttgtattgttgtagtctaaatggtggtaatttccttttgaagtctaagaaaaataactaggagacatcttatgtgtaaaattgtactagtacctctttaagagtgaatttagatttcttttgaaactatatataggacatgataagttaatggcctgattgttgagattttgttgtttccagtaagcagggacaaatgctgagttgacctagttacctttgtaggaaattacagttgcttttgattgaactttcagcagagagcacacccagtcttcaattttaacacttgagattttcttacattttaaggactgacaattagaaaatgcttcagaatatttaatacatcgcctccaagcacagtctagtttcacaacctgactctcttcctattaaaaaaaa

SEQ ID NO: 436961 - DNA, 2388 bp, Homo sapiens
  misc_feature (2367)..(2368): n is a, c, g, or t
gcggccgcgggcgcccctgccctgagcccaccccgcgctctgccctccctaacaatgggaatggggcagaaggaggcgccccactgcggggaggtgaggggtgggtttgggactggggtccgcggtggggggaggtgcgatctcgggctctcgcctctccgctccctctggctctggagttgggggcccctgtggggctctgaagtccgcctgagacttgggtcaagagtcaaactgtcgccccccgctcctcccccaaaatccggtgagcggtaaggaaagtgatgccaagtcttcgaagcctcagtgacaaacgcatagcaagaacacatccactccagagataccttctcgaaacaaaagattttcctacctgcttatacttggtaaccgagggaattactaagacttcttgctcatttctgagtattgtctttatatcctgacactatgaatgctacttggatgcctcttaagtctgttctctggggaggcagtaaggggccgtggagctggcctcggcctcggcatcgggagaggctggacttcctgtctctctgtgctgaatggctgcgatggcgcccgctctcactgacgcagcagctgaagcacaccatatccggttcaaactggctcccccatcctctaccttgtcccctggcagtgccgaaaataacggcaacgccaacatccttattgctgccaacggaaccaaaagaaaagccattgctgcagaggatcccagcctagatttccgaaataatcctaccaaggaagacttgggaaagctgcaaccactggtggcatcttatctctgctctgatgtaacatctgttccctcaaaggagtctttgaagttgcaaggggtcttcagcaagcagacagtccttaaatctcatcctctcttatctcagtcctatgaactccgagctgagctgttggggagacagccagttttggagttttccttagaaaatcttagaaccatgaatacgagtggtcagacagctctgccacaagcacctgtaaatgggttggctaagaaattgactaaaagttcaacacattctgatcatgacaattccacttccctcaatgggggaaaacgggctctcacttcatctgctcttcatgggggtgaaatgggaggatctgaatctggggacttgaaggggggtatgaccaattgcactcttccacatagaagccttgatgtagaacacacaactttgtatagcaataatagcactgcaaacaaatcctctgtcaattccatggaacagccggcacttcaaggaagcagtagattatcacctggtacagactccagctctaacttggggggtgtcaaattggagggtaaaaagtctcccctgtcttccattcttttcagtgctttagattctgacacaaggataacagctttactgcggcgacaggctgacattgagagccgtgcccgcagattacaaaagcgcttacaggttgtgcaagccaagcaggttgagaggcatatacaacatcagctgggtggatttttggagaagactttgagcaaactgccaaacttggaatccttgagaccacggagccagttgatgctgactcgaaaggctgaagctgccttgagaaaagctgccagtgagaccaccacttccagagggacttagcaactttctgaaaagcaattcaatttcagaagaattggagagatttacagctagtggcatagccaacttgaggtgcagtgaacaggcatttgattcagatgtcactgacagtagttcaggaggggagtctgatattgaagaggaagaactgaccagagctgatcccgagcagcgtcatgtacccctgtatctccatacagccaagaataaagaaagaaagggatagatggaatgagtttcatcgtgattgggagcggttgttgagaagaatcatgtaactatgtaaaaagcatgtctgtttggtacactatttgctaatgtcagaagtgttaaatagaaataaaatttccaccatagtagctaattattgtttagtgtgtgtcaaaactgtgtgctaattactttttataaaccgtcgcctttaaagtcttataacttttctatgaagtaggacgtttgtgtccctacctcctctgttttaccattgggaaaaccagggcccagaacgagtaaccacacaagttccacagctaccaaggtcaaggttatttctaccctaaatacacatctttaaattttatattcatccacaaagtcacgagcagcatctgtatttcgttaggaaaagtagcactaaacatcatgatgtgatgaatgcccttcagtggcatagtatcttttcagtataagatgtatnngaggtccaatcccatagtac

SEQ ID NO: 436962 - DNA, 2360 bp, Homo sapiens
taattattgcttagtttgatgtgtcttgctttaaatccatttatttcaacaagcttaaagagatttttttttaatggagatgatttaattttaacaatctgtgattttctctgaatcgaacttgtgttttggcacctttcaatctgtggtaacaaatgacaagaagggtgcaattcttccttcccttgtgcagggattttgcctccccctttctcccagatgaaagatatttgggtctctagaataactgtggtacagttagctccagagtgttttctttctggaggcagtttagacaacagcctcaagtagtgcttttgttaaaaatatacatgtttttaaaagtgcttgtatttctaatattcttttctcctttctcttctagtctgttctctggggaggcagtaaggggccgtggagctggcctcggcctcggcatcgggagaggctggacttcctgtctctctgtgctgaatggctgcgatggcgcccgctctcactgacgcagcagctgaagcacaccatatccggttcaaactggctcccccatcctctaccttgtcccctggcagtgccgaaaataacggcaacgccaacatccttattgctgccaacggaaccaaaagaaaagccattgctgcagaggatcccagcctagatttccgaaataatcctaccaaggaagacttgggaaagctgcaaccactggtggcatcttatctctgctctgatgtaacatctgttccctcaaaggagtctttgaagttgcaaggggtcttcagcaagcagacagtccttaaatctcatcctctcttatctcagtcctatgaactccgagctgagctgttggggagacagccagttttggagttttccttagaaaatcttagaaccatgaatacgagtggtcagacagctctgccacaagcacctgtaaatgggttggctaagaaattgactaaaagttcaacacattctgatcatgacaattccacttccctcaatgggggaaaacgggctctcacttcatctgctcttcatgggggtgaaatgggaggatctgaatctggggacttgaaggggggtatgaccaattgcactcttccacatagaagccttgatgtagaacacacaactttgtatagcaataatagcactgcaaacaaatcctctgtcaattccatggaacagccggcacttcaaggaagcagtagattatcacctggtacagactccagctctaacttggggggtgtcaaattggagggtaaaaagtctcccctgtcttccattcttttcagtgctttagattctgacacaaggataacagctttactgcggcgacaggctgacattgagagccgtgcccgcagattacaaaagcgcttacaggttgtgcaagccaagcaggttgagaggcatatacaacatcagctgggtggatttttggagaagactttgagcaaactgccaaacttggaatccttgagaccacggagccagttgatgctgactcgaaaggctgaagctgccttgagaaaagctgccagtgagaccaccacttccagagggacttagcaactttctgaaaagcaattcaatttcagaagaattggagagatttacagctagtggcatagccaacttgaggtgcagtgaacaggcatttgattcagatgtcactgacagtagttcaggaggggagtctgatattgaagaggaagaactgaccagagctgatcccgagcagcgtcatgtacccctgtgagtagacctcatgcatgatagcattcttgagaaatgttggcacaaggaagaatgaatgaatcgccattatggagagaatgtgattctttgtacataggtgtctaggttctgtttgttttttccctgatgttgggtagatgagtgcatatacatgctagtgaagaaggggaagatacttttgctgtagggttgtattgttgtagtctaaatggtggtaatttccttttgaagtctaagaaaaataactaggagacatcttatgtgtaaaattgtactagtacctctttaagagtgaatttagatttcttttgaaactatatataggacatgataagttaatggcctgattgttgagattttgttgtttccagtaagcagggacaaatgctgagttgacctagttacctttgtaggaaattacagttgcttttgattgaactttcagcagagagcacacccagtcttcaattttaacacttgagattttcttacattttaaggactgacaattagaaaatgcttcagaatatttaatacatcgcctccaagcacagtctagtttcacaacctgactctcttcctattaaaaaaaa

SEQ ID NO: 436963 - DNA, 785 bp, Homo sapiens
  misc_feature (764)..(765): n is a, c, g, or t
aggcttttaattgtaagccattcagcatgtgaactcgtaaaaatgaccttatgttaaataattagttcagagcgctgatcttgagagataggaacgtttcctgtttttgataaatgataggttacccttgtttatggttaggggtgggtttttgtcatggtccaaccaggtgatagttatatatgtgaacatattaaaattgtttttaatgtttaaattctaatccttaaaatgtgacagaactgatttatgttcctcctctcccagttctcttcaaatcatgagagtgaccctcttaaaaactgctttctttcgggggagcggttgttgagaagaatcatgtaactatgtaaaaagcatgtctgtttggtacactatttgctaatgtcagaagtgttaaatagaaataaaatttccaccatagtagctaattattgtttagtgtgtgtcaaaactgtgtgctaattactttttataaaccgtcgcctttaaagtcttataacttttctatgaagtaggacgtttgtgtccctacctcctctgttttaccattgggaaaaccagggcccagaacgagtaaccacacaagttccacagctaccaaggtcaaggttatttctaccctaaatacacatctttaaattttatattcatccacaaagtcacgagcagcatctgtatttcgttaggaaaagtagcactaaacatcatgatgtgatgaatgcccttcagtggcatagtatcttttcagtataagatgtatnngaggtccaatcccatagtac

SEQ ID NO: 436964 - DNA, 1177 bp, Homo sapiens
gcggccgcgggcgcccctgccctgagcccaccccgcgctctgccctccctaacaatgggaatggggcagaaggaggcgccccactgcggggaggtgaggggtgggtttgggactggggtccgcggtggggggaggtgcgatctcgggctctcgcctctccgctccctctggctctggagttgggggcccctgtggggctctgaagtccgcctgagacttgggtcaagagtcaaactgtcgccccccgctcctcccccaaaatccggtgagcggtaaggaaagtgatgccaagtcttcgaagcctcagtgacaaacgcatagcaagaacacatccactccagagataccttctcgaaacaaaagattttcctacctgcttatacttggtaaccgagggaattactaagacttcttgctcatttctgagtattgtctttatatcctgacactatgaatgctacttggatgcctcttaaggggttcttcttttctgcagggcccccaatagaaattgtggctgaaggttgtgcacaaacaagtatctccagtgacaggagtgccttctgaggcagccattgcatcttcatctgctgacactctgctaggctgacttctgtagttcaacaccactgatcttcaggtccacctcacagagctctataaaacgcttaaatcctctttacatcatagactttcagctacttgaagatagccatcagccgctacgtgactctttatctccaggatctccctaatactatgaacgcggcagagataacggacaagctcggctccattcccttccgctacaggaacacggggcacatccaggcttactctgtgccacttaactggacatgggctttacgaaaggcctgaaactggctcgccaagccagtttccagaaccagaaactggctcagccggattctattctttgtgccttggtggacacatcaaactagccctcgggtgtggtgccgtgtacgtgtgtgccggcacttgccggcagtctctcaaacgtggcctaatcattgcgtaagcaaaccgtggttcatcttactgacacccgtgctcgtttaccccacccgcactcaaacagattggagatctatctcgcctctccggcaaactaagcggcttgtgtcaagacaacggctctgctcgcattccgcga

SEQ ID NO: 436965 - DNA, 1546 bp, Homo sapiens
  misc_feature (1520)..(1520): n is a, c, g, or t
gcggccgcgggcgcccctgccctgagcccaccccgcgctctgccctccctaacaatgggaatggggcagaaggaggcgccccactgcggggaggtgaggggtgggtttgggactggggtccgcggtggggggaggtgcgatctcgggctctcgcctctccgctccctctggctctggagttgggggcccctgtggggctctgaagtccgcctgagacttgggtcaagagtcaaactgtcgccccccgctcctcccccaaaatccggtgagcggtaaggaaagtgatgccaagtcttcgaagcctcagtgacaaacgcatagcaagaacacatccactccagagataccttctcgaaacaaaagattttcctacctgcttatacttggtaaccgagggaattactaagacttcttgctcatttctgagtattgtctttatatcctgacactatgaatgctacttggatgcctcttaagtctgttctctggggaggcagtaaggggccgtggagctggcctcggcctcggcatcgggagaggctggacttcctgtctctctgtgctgaatggctgcgatggcgcccgctctcactgacgcagcagctgaagcacaccatatccggttcaaactggctcccccatcctctaccttgtcccctggcagtgccgaaaataacggcaacgccaacatccttattgctgccaacggaaccaaaagaaaagccattgctgcagaggatcccagcctagatttccgaaataatcctaccaaggaagacttgggaaagctgcaaccactggtggcatcttatctctgctctgatgtaacatctgttccctcaaaggagtctttgaagttgcaaggggtcttcagcaagcagacagtccttaaatctcatcctctcttatctcagtcctatgaactccgagctgagctgttggggagacagccagttttggagttttccttagaaaatcttagaaccatgaatacgagtggtcagacagctctgccacaagcacctgtaaatgggttggctaagaaattgactaaaagttcaacacattctgatcatgacaattccacttccctcaatgggggaaaacgggctctcacttcatctgctcttcatgggggtgaaatgggaggatctgaatctggggacttgaaggggggtatgaccaattgcactcttccacatagaagccttgatgtagaacacacaactttgtatagcaataatagcactgcaaacaaatcctctgtcaattccatggaacagccggcacttcaaggaagcagtagattatcacctggtacagactccagctctaacttggggggtgtcaaattggagggtaaaaagtctcccctgtcttccattcttttcagtgctttagattctgacacaaggataacagctttactgcggcgacaggctgacattgagagccgtgcccgcagattacaaaagcgcttacaggttgctcaaagtcttctccaaaaatccacccagctnatgttgtatatgcctctcaacctgct

SEQ ID NO: 436966 - DNA, 1341 bp, Homo sapiens
cggtgttatcgatgccaccgcagccatggctcgggtggtcccaagaactctgaagcgggtggcagctccaaagcatggatgctggataaatgaccggtgtgttgctcctcgtccatccaccggtccccacaagtgagagagtgtctccccctcatcattttccatggaacagccggcacttcaaggaagcagtagattatcacctggtacagactccagctctaacttggggggtgtcaaattggagggtaaaaagtctcccctgtcttccattcttttcagtgctttagattctgacacaaggataacagctttactgcggcgacaggctgacattgagagccgtgcccgcagattacaaaagcgcttacaggttgtgcaagccaagcaggttgagaggcatatacaacatcagctgggtggatttttggagaagactttgagcaaactgccaaacttggaatccttgagaccacggagccagttgatgctgactcgaaaggctgaagctgccttgagaaaagctgccagtgagaccaccacttccagagggacttagcaactttctgaaaagcaattcaatttcagaagaattggagagatttacagctagtggcatagccaacttgaggtgcagtgaacaggcatttgattcagatgtcactgacagtagttcaggaggggagtctgatattgaagaggaagaactgaccagagctgatcccgagcagcgtcatgtacccctgtgagtagacctcatgcatgatagcattcttgagaaatgttggcacaaggaagaatgaatgaatcgccattatggagagaatgtgattctttgtacataggtgtctaggttctgtttgttttttccctgatgttgggtagatgagtgcatatacatgctagtgaagaaggggaagatacttttgctgtagggttgtattgttgtagtctaaatggtggtaatttccttttgaagtctaagaaaaataactaggagacatcttatgtgtaaaattgtactagtacctctttaagagtgaatttagatttcttttgaaactatatataggacatgataagttaatggcctgattgttgagattttgttgtttccagtaagcagggacaaatgctgagttgacctagttacctttgtaggaaattacagttgcttttgattgaactttcagcagagagcacacccagtcttcaattttaacacttgagattttcttacattttaaggactgacaattagaaaatgcttcagaatatttaatacatcgcctccaagcacagtctagtttcacaacctgactctcttcctattaaaaaaaa

SEQ ID NO: 436967 - DNA, 712 bp, Homo sapiens
ccaaggggtctttgagtttaccccccccccccgggtatgggatatcgtcgaccacgccgtcgcagtttcacatcagtctctccagatagcactacgatgtattccgcttctgaacaggatcccatgccagtgtggaacaccttcccaatcttagttcagaagtggcttgtatgacctgttcaggggtcacatgaggtctcgccagtttcctgggtcctcttcagaggccagaaagttctaagttctgagtccccggccagggtcccttaacacctcggcacagaggctgttggcaagtgtagaggctgcctctgtgtgtggtttaagtaaactggaaatgagacattgacgtgctgctcctccagaggtctgcacactccacttcacatgccgttgactctcacagtctaagacttcagggccgggacctttgtccagcctgcacagtagagtgaggctgcctctcccgccaggcattgggatcccatttagaaacggcattcacttcagaaggtactttttaactgctcagtttttgactattttaaatagtttgctgaaaactcctgataacacttgctacatatcatgttttaattgcttgtacagttaacctttaattttatttagtaaagtgtatcaaagtaggacttttttgaattgtaaataggtggttttattaaataaaagtcaatgtaaaattgttaaaaaa

SEQ ID NO: 436968 - DNA, 2618 bp, Homo sapiens
tttgattcctaacactggagttggccttaaacaaaacaaacacaaaaacttttaaagaattaaaccaaggcttagccttaagcagctcagtggaaggatgagctgctgcggaccacagccagccactgcatctgctgcacagttgaacgatgggcagtggctcacccccactcctttatttcagcaaaagctaattaaattgtaatgtttctatgtcaactactgggaagtatgttacagtcttagccaggatgcatgagagatgttatttgggagacttgagatgctttggctgatatttacatgttttcgataagaaagggatcgctgattgagttattgagatagtttttccagagctggaggtcacgtttctaaaactcacctacgaaagatagcattaaaggaacaggggctctctgaggatggccactgatgtgtgtttgtggatacctgggcatcgacccagcctgcaggtgagctctgggccatgttgccttgacacagtcacagtgtagaggctgcaggtgcacacgtgggctccagtgggactgcgctctgggagactgctccctggcatcggtcctgcggaggtggaaagttcgagaggaggagctatttgcgaggaagccctgtggcaatagagataggcttaaaagcggagagaacacagagtggaatcagccccctgtaagtaaaagggtagagaaagagatgtgtggctgggccctctcccacctgcctgttcagtggaggccaggcagcagcccagaacagcacatgtgggggaggtggccccttgtgccagcagtggctcctctctgcctttgagccctgcacagctggacccatcctaagtgccagtgagtccctcacacatttgactttagaacgtgtgcttcatgacccgttgtacagacggaggagcgagcaacacacgtctaacagcctagacaatctcgtcagatgctcatactggaccatcagcctccccattttagctgactttcccagggtcgttggcaaattttttgttctgtcttttccttgactaattgtagaactttgtgtgaggactttggttatccaaaatcacagaaatgaaccgttttgcagctgcgcagtctaaagggcaggccagtgtctggaagcagggcccacgtggcggtccgctggcaggctggtcctggggagcattctgcggacccggtcacgggcttggttagtcatgcgtacatgtgtgccttggggtgctctgcactccacggcccttctcagccacacttcccaccccagggggtgcccccaggctgatctcatttctgatgttgagggctgtttggctctgtctgtatagcttgtaacaggagccttgggctaggggctggggaaggaaagccgagctggcattcgttctctggactttttatgcctgccatacccgctaatgctcctcgaggtgcaggagcaggttgctgagccagtggctgccccgtgccctccttcccagcactatcatgtgtcacgtttcccggactctgcccctacatctcagctgaatctccagggaggctgcagagcatcgtggagaccactttctgcctcggcctttaaatgctgactcacctcctctcggaggaggcgtcctgtcttcacgggggggtcccggtggcctccagacgtagccatttcctgacatcaagatgttgaatgtaatctggtctgagctgggcctgtgggaggggccgcctgaggcctgtgcgctgttgtcctcgcagatgtacttatttttgttcatgatacgggcgttccgttccttaaagatgtatatattttcttactgtacataaagatgttccttaagtcgtacagaaggtggcgcggcaaagggcctcgtgcagtgtgttcagattgcccctggggatcttctgtgtcttcagcgcccagccctgcgtgttcctggtgaagcagtttcacatcagtctctccagatagcactacgatgtattccgcttctgaacaggatcccatgccagtgtggaacaccttcccaatcttagttcagaagtggcttgtatgacctgttcaggggtcacatgaggtctcgccagtttcctgggtcctcttcagaggccagaaagttctaagttctgagtccccggccagggtcccttaacacctcggcacagaggctgttggcaagtgtagaggctgcctctgtgtgtggtttaagtaaactggaaatgagacattgacgtgctgctcctccagaggtctgcacactccacttcacatgccgttgactctcacagtctaagacttcagggccgggacctttgtccagcctgcacagtagagtgaggctgcctctcccgccaggcattgggatcccatttagaaacggcattcacttcagaaggtactttttaactgctcagtttttgactattttaaatagtttgctgaaaactcctgataacacttgctacatatcatgttttaattgcttgtacagttaacctttaattttatttagtaaagtgtatcaaagtaggacttttttgaattgtaaataggtggttttattaaataaaagtcaatgtaaaattgttaaaaaa

SEQ ID NO: 436969 - DNA, 1296 bp, Homo sapiens
tttgattcctaacactggagttggccttaaacaaaacaaacacaaaaacttttaaagaattaaaccaaggcttagccttaagcagctcagtggaaggatgagctgctgcggaccacagccagccactgcatctgctgcacagttgaacgatgggcagtggctcacccccactcctttatttcagcaaaagctaattaaattgtaatgtttctatgtcaactactgggaagtatgttacagtcttagccaggatgcatgagagatgttatttgggagacttgagatgctttggctgatatttacatgttttcgataagaaagggatcgctgattgagttattgagatagtttctccagacgtagccatttcctgacatcaagatgttgaatgtaatctggtctgagctgggcctgtgggaggggccgcctgaggcctgtgcgctgttgtcctcgcagatgtacttatttttgttcatgatacgggcgttccgttccttaaagatgtatatattttcttactgtacataaagatgttccttaagtcgtacagaaggtggcgcggcaaagggcctcgtgcagtgtgttcagattgcccctggggatcttctgtgtcttcagcgcccagccctgcgtgttcctggtgaagcagtttcacatcagtctctccagatagcactacgatgtattccgcttctgaacaggatcccatgccagtgtggaacaccttcccaatcttagttcagaagtggcttgtatgacctgttcaggggtcacatgaggtctcgccagtttcctgggtcctcttcagaggccagaaagttctaagttctgagtccccggccagggtcccttaacacctcggcacagaggctgttggcaagtgtagaggctgcctctgtgtgtggtttaagtaaactggaaatgagacattgacgtgctgctcctccagaggtctgcacactccacttcacatgccgttgactctcacagtctaagacttcagggccgggacctttgtccagcctgcacagtagagtgaggctgcctctcccgccaggcattgggatcccatttagaaacggcattcacttcagaaggtactttttaactgctcagtttttgactattttaaatagtttgctgaaaactcctgataacacttgctacatatcatgttttaattgcttgtacagttaacctttaattttatttagtaaagtgtatcaaagtaggacttttttgaattgtaaataggtggttttattaaataaaagtcaatgtaaaattgttaaaaaa

SEQ ID NO: 436970 - DNA, 1029 bp, Homo sapiens
cagggacccgctttattgaacccgagactttcttgggggaggtgacacaccctacaccgatttccatcgtgcgcaacgcgctgagcacgtccatggcccggttctaggtgcgacagatacatgctgactcacctcctctcggaggaggcgtcctgtcttcacgaggcctgtgcgctgttgtcctcgcagatgtacttatttttgttcatgatacgggcgttccgttccttaaagatgtatatattttcttactgtacataaagatgttccttaagtcgtacagaaggtggcgcggcaaagggcctcgtgcagtgtgttcagattgcccctggggatcttctgtgtcttcagcgcccagccctgcgtgttcctggtgaagcagtttcacatcagtctctccagatagcactacgatgtattccgcttctgaacaggatcccatgccagtgtggaacaccttcccaatcttagttcagaagtggcttgtatgacctgttcaggggtcacatgaggtctcgccagtttcctgggtcctcttcagaggccagaaagttctaagttctgagtccccggccagggtcccttaacacctcggcacagaggctgttggcaagtgtagaggctgcctctgtgtgtggtttaagtaaactggaaatgagacattgacgtgctgctcctccagaggtctgcacactccacttcacatgccgttgactctcacagtctaagacttcagggccgggacctttgtccagcctgcacagtagagtgaggctgcctctcccgccaggcattgggatcccatttagaaacggcattcacttcagaaggtactttttaactgctcagtttttgactattttaaatagtttgctgaaaactcctgataacacttgctacatatcatgttttaattgcttgtacagttaacctttaattttatttagtaaagtgtatcaaagtaggacttttttgaattgtaaataggtggttttattaaataaaagtcaatgtaaaattgttaaaaaa

SEQ ID NO: 436971 - DNA, 3855 bp, Homo sapiens
ctctcccaaccgcctcgtcgcactcctcaggctgagagcaccgctgcactcgcggccggcgatgcgggaccccggcgcggccgctccgctttcgtccctgggcctctgtgccctggtgctggcgctgctgggcgcactgtccgcgggcgccggggcgcagccgtaccacggagagaagggcatctccgtgccggaccacggcttctgccagcccatctccatcccgctgtgcacggacatcgcctacaaccagaccatcctgcccaacctgctgggccacacgaaccaagaggacgcgggcctcgaggtgcaccagttctacccgctggtgaaggtgcagtgttctcccgaactccgctttttcttatgctccatgtatgcgcccgtgtgcaccgtgctcgatcaggccatcccgccgtgtcgttctctgtgcgagcgcgcccgccagggctgcgaggcgctcatgaacaagttcggcttccagtggcccgagcggctgcgctgcgagaacttcccggtgcacggtgcgggcgagatctgcgtgggccagaacacgtcggacggctccgggggcccaggcggcggccccactgcctaccctaccgcgccctacctgccggacctgcccttcaccgcgctgcccccgggggcctcagatggcagggggcgtcccgccttccccttctcatgcccccgtcagctcaaggtgcccccgtacctgggctaccgcttcctgggtgagcgcgattgtggcgccccgtgcgaaccgggccgtgccaacggcctgatgtactttaaggaggaggagaggcgcttcgcccgcctctgggtgggcgtgtggtccgtgctgtgctgcgcctcgacgctctttaccgttctcacctacctggtggacatgcggcgcttcagctacccagagcggcccatcatcttcctgtcgggctgctacttcatggtggccgtggcgcacgtggccggcttccttctagaggaccgcgccgtgtgcgtggagcgcttctcggacgatggctaccgcacggtggcgcagggcaccaagaaggagggctgcaccatcctcttcatggtgctctacttcttcggcatggccagctccatctggtgggtcattctgtctctcacttggttcctggcggccggcatgaagtggggccacgaggccatcgaggccaactcgcagtacttccacctggccgcgtgggccgtgcccgccgtcaagaccatcactatcctggccatgggccaggtagacggggacctgctgagcggggtgtgctacgttggcctctccagtgtggacgcgctgcggggcttcgtgctggcgcctctgttcgtctacctcttcataggcacgtccttcttgctggccggcttcgtgtccctcttccgtatccgcaccatcatgaaacacgacggcaccaagaccgagaagctggagaagctcatggtgcgcatcggcgtcttcagcgtgctctacacagtgcccgccaccatcgtcctggcctgctacttctacgagcaggccttccgcgagcactgggagcgcacctggctcctgcagacgtgcaagagctatgccgtgccctgcccgcccggccacttcccgcccatgagccccgacttcaccgtcttcatgatcaagtacctgatgaccatgatcgtcggcatcaccactggcttctggatctggtcgggcaagaccctgcagtcgtggcgccgcttctaccacagacttagccacagcagcaagggggagactgcggtatgagccccggcccctccccacctttcccaccccagccctcttgcaagaggagaggcacggtagggaaaagaactgctgggtgggggcctgtttctgtaactttctccccctctactgagaagtgacctggaagtgagaagttctttgcagatttggggcgaggggtgatttggaaaagaagacctgggtggaaagcggtttggatgaaaagatttcaggcaaagacttgcaggaagatgatgataacggcgatgtgaatcgtcaaaggtacgggccagcttgtgcctaatagaaggttgagaccagcagagactgctgtgagtttctcccggctccgaggctgaacggggactgtgagcgatccccctgctgcagggcgagtggcctgtccagacccctgtgaggccccgggaaaggtacagccctgtctgcggtggctgctttgttggaaagagggagggcctcctgcggtgtgcttgtcaagcagtggtcaaaccataatctcttttcactggggccaaactggagcccagatgggttaatttccagggtcagacattacggtctctcctcccctgccccctcccgcctgtttttcctcccgtactgctttcaggtcttgtaaaataagcatttggaagtcttgggaggcctgcctgctagaatcctaatgtgaggatgcaaaagaaatgatgataacattttgagataaggccaaggagacgtggagtaggtatttttgctactttttcattttctggggaaggcaggaggcagaaagacgggtgttttatttggtctaataccctgaaaagaagtgatgacttgttgcttttcaaaacaggaatgcatttttccccttgtctttgttgtaagagacaaaagaggaaacaaaagtgtctccctgtggaaaggcataactgtgacgaaagcaacttttataggcaaagcagcgcaaatctgaggtttcccgttggttgttaatttggttgagataaacattcctttttaaggaaaagtgaagagcagtgtgctgtcacacaccgttaagccagaggttctgacttcgctaaaggaaatgtaagaggttttgttgtctgttttaaataaatttaattcggaacacatgatccaacagactatgttaaaatattcagggaaatctctcccttcatttactttttcttgctataagcctatatttaggtttcttttctatttttttctcccatttggatcctttgaggtaaaaaaacataatgtcttcagcctcataataaaggaaagttaattaaaaaaaaaaagcaaagagccattttgtcctgttttcttggttccatcaatctgtttattaaacatcatccatatgctgaccctgtctctgtgtggttgggttgggaggcgatcagcagataccatagtgaacgaagaggaaggtttgaaccatgggccccatctttaaagaaagtcattaaaagaaggtaaacttcaaagtgattctggagttctttgaaatgtgctggaagacttaaatttattaatcttaaatcatgtactttttttctgtaatagaactcggattcttttgcatgatggggtaaagcttagcagagaatcatgggagctaacctttatcccacctttgacactaccctccaatcttgcaacactatcctgtttctcagaacagtttttaaatgccaatcatagagggtactgtaaagtgtacaagttactttatatatgtaatgttcacttgagtggaactgctttttacattaaagttaaaatcgatcttgtgtttcttcaaccttcaaaactatctcatctgtcagatttttaaaactccaacacaggttttggcatcttttgtgctgtatcttttaagtgcatgtgaaatttgtaaaatagagataagtacagtatgtatattttgtaaatctcccatttttgtaagaaaatatatattgtatttatacatttttactttggatttttgttttgttggctttaaaggtctaccccactttatcacatgtacagatcacaaataaatttttttaaatacaaaa

SEQ ID NO: 436972 - DNA, 833 bp, Homo sapiens
cggacgcgtgggcggacgagtgggcttcagcctcataataaaggaaagttaattaaaaaaaaaaagcaaagagccattttgtcctgttttcttggttccatcaatctgtttattaaacatcatccatatgctgaccctgtctctgtgtggttgggttgggaggcgatcagcagataccatagtgaacgaagaggaaggtttgaaccatgggccccatctttaaagaaagtcattaaaagaaggtaaacttcaaagtgattctggagttctttgaaatgtgctggaagacttaaatttattaatcttaaatcatgtactttttttctgtaatagaactcggattcttttgcatgatggggtaaagcttagcagagaatcatgggagctaacctttatcccacctttgacactaccctccaatcttgcaacactatcctgtttctcagaacagtttttaaatgccaatcatagagggtactgtaaagtgtacaagttactttatatatgtaatgttcacttgagtggaactgctttttacattaaagttaaaatcgatcttgtgtttcttcaaccttcaaaactatctcatctgtcagatttttaaaactccaacacaggttttggcatcttttgtgctgtatcttttaagtgcatgtgaaatttgtaaaatagagataagtacagtatgtatattttgtaaatctcccatttttgtaagaaaatatatattgtatttatacatttttactttggatttttgttttgttggctttaaaggtctaccccactttatcacatgtacagatcacaaataaatttttttaaatacaaaa

SEQ ID NO: 436973 - DNA, 4664 bp, Homo sapiens
ctctcccaaccgcctcgtcgcactcctcaggctgagagcaccgctgcactcgcggccggcgatgcgggaccccggcgcggccgctccgctttcgtccctgggcctctgtgccctggtgctggcgctgctgggcgcactgtccgcgggcgccggggcgcagccgtaccacggagagaagggcatctccgtgccggaccacggcttctgccagcccatctccatcccgctgtgcacggacatcgcctacaaccagaccatcctgcccaacctgctgggccacacgaaccaagaggacgcgggcctcgaggtgcaccagttctacccgctggtgaaggtgcagtgttctcccgaactccgctttttcttatgctccatgtatgcgcccgtgtgcaccgtgctcgatcaggccatcccgccgtgtcgttctctgtgcgagcgcgcccgccagggctgcgaggcgctcatgaacaagttcggcttccagtggcccgagcggctgcgctgcgagaacttcccggtgcacggtgcgggcgagatctgcgtgggccagaacacgtcggacggctccgggggcccaggcggcggccccactgcctaccctaccgcgccctacctgccggacctgcccttcaccgcgctgcccccgggggcctcagatggcagggggcgtcccgccttccccttctcatgcccccgtcagctcaaggtgcccccgtacctgggctaccgcttcctgggtgagcgcgattgtggcgccccgtgcgaaccgggccgtgccaacggcctgatgtactttaaggaggaggagaggcgcttcgcccgcctctgggtgggcgtgtggtccgtgctgtgctgcgcctcgacgctctttaccgttctcacctacctggtggacatgcggcgcttcagctacccagagcggcccatcatcttcctgtcgggctgctacttcatggtggccgtggcgcacgtggccggcttccttctagaggaccgcgccgtgtgcgtggagcgcttctcggacgatggctaccgcacggtggcgcagggcaccaagaaggagggctgcaccatcctcttcatggtgctctacttcttcggcatggccagctccatctggtgggtcattctgtctctcacttggttcctggcggccggcatgaagtggggccacgaggccatcgaggccaactcgcagtacttccacctggccgcgtgggccgtgcccgccgtcaagaccatcactatcctggccatgggccaggtagacggggacctgctgagcggggtgtgctacgttggcctctccagtgtggacgcgctgcggggcttcgtgctggcgcctctgttcgtctacctcttcataggcacgtccttcttgctggccggcttcgtgtccctcttccgtatccgcaccatcatgaaacacgacggcaccaagaccgagaagctggagaagctcatggtgcgcatcggcgtcttcagcgtgctctacacagtgcccgccaccatcgtcctggcctgctacttctacgagcaggccttccgcgagcactgggagcgcacctggctcctgcagacgtgcaagagctatgccgtgccctgcccgcccggccacttcccgcccatgagccccgacttcaccgtcttcatgatcaagtacctgatgaccatgatcgtcggcatcaccactggcttctggatctggtcgggcaagaccctgcagtcgtggcgccgcttctaccacagacttagccacagcagcaagggggagactgcggtatgagccccggcccctccccacctttcccaccccagccctcttgcaagaggagaggcacggtagggaaaagaactgctgggtgggggcctgtttctgtaactttctccccctctactgagaagtgacctggaagtgagaagttctttgcagatttggggcgaggggtgatttggaaaagaagacctgggtggaaagcggtttggatgaaaagatttcaggcaaagacttgcaggaagatgatgataacggcgatgtgaatcgtcaaaggtacgggccagcttgtgcctaatagaaggttgagaccagcagagactgctgtgagtttctcccggctccgaggctgaacggggactgtgagcgatccccctgctgcagggcgagtggcctgtccagacccctgtgaggccccgggaaaggtacagccctgtctgcggtggctgctttgttggaaagagggagggcctcctgcggtgtgcttgtcaagcagtggtcaaaccataatctcttttcactggggccaaactggagcccagatgggttaatttccagggtcagacattacggtctctcctcccctgccccctcccgcctgtttttcctcccgtactgctttcaggtcttgtaaaataagcatttggaagtcttgggaggcctgcctgctagaatcctaatgtgaggatgcaaaagaaatgatgataacattttgagataaggccaaggagacgtggagtaggtatttttgctactttttcattttctggggaaggcaggaggcagaaagacgggtgttttatttggtctaataccctgaaaagaagtgatgacttgttgcttttcaaaacaggaatgcatttttccccttgtctttgttgtaagagacaaaagaggaaacaaaagtgtctccctgtggaaaggcataactgtgacgaaagcaacttttataggcaaagcagcgcaaatctgaggtttcccgttggttgttaatttggttgagataaacattcctttttaaggaaaagtgaagagcagtgtgctgtcacacaccgttaagccagaggttctgacttcgctaaaggaaatgtaagaggttttgttgtctgttttaaataaatttaattcggaacacatgatccaacagactatgttaaaatattcagggaaatctctcccttcatttactttttcttgctataagcctatatttaggtttcttttctatttttttctcccatttggatcctttgaggtaaaaaaacataatgtcttcagcctcataataaaggaaagttaattaaaaaaaaaaagcaaagagccattttgtcctgttttcttggttccatcaatctgtttattaaacatcatccatatgctgaccctgtctctgtgtggttgggttgggaggcgatcagcagataccatagtgaacgaagaggaaggtttgaaccatgggccccatctttaaagaaagtcattaaaagaaggtaaacttcaaagtgattctggagttctttgaaatgtgctggaagacttaaatttattaatcttaaatcatgtactttttttctgtaatagaactcggattcttttgcatgatggggtaaagcttagcagagaatcatgggagctaacctttatcccacctttgacactaccctccaatcttgcaacactatcctgtttctcagaacagtttttaaatgccaatcatagagggtactgtaaagtgtacaagttactttatatatgtaatgttcacttgagtggaactgctttttacattaaagttaaaatcgatcttgtgtttcttcaaccttcaaaactatctcatctgtcagatttttaaaactccaacacaggttttggcatcttttgtgctgtatcttttaagtgcatgtgaaatttgtaaaatagagataagtacagtatgtatattttgtaaatctcccatttttgtaagaaaatatatattgtatttatacatttttactttggatttttgttttgttggctttaaaggtctaccccactttatcacatgtacagatcacaaataaatttttttaaatacaaaaaaaataaaaaacaatcaaccaacaaaccaaaaacacaaccaaaaaccaacaaaaaacaaaaaaagataataatataaatgctcaatatatatttagttataaaacgagtcatctatagatcataattactagtcggtaggtgagggcgtagcttcgctgtaaagtattagttattattatgcgtatattaggagagagtggtcgataaaatagattgggtatgtagtgtgatgttagattttaattatcggtaggatttatatgtggaacgatatatagtgtgagtaagtgagtaagcagcaagagatgaatagaagtgaggtgctgaatagatacaggaatggatagatatattagaggtagtaagattgtgagcaatgagtgatttatagttgtgtgaatatgagtatatataatatatatacgagtgatggtgaggagataaatagaaatagagagaaggaataaaattgtttgtaagtgtagtactgatataagggagtgtagaggagagtggggtgcgacgagggaggaacgcgggagcggcgagagcggatacgaggagagtgtgagtggggaagaagagacaggaagaggagcggccgagaagaggagagggcggcaggggacacgcttgagtgacggggggacgaagagaagagaataagagagggaagaaggagaaggaggaagcgagaagggaggggtgagagagtgggaacgtgggcgcggtggagtggtcggagcggcgttgctgtgtgagaaggtggtagagagttgaggagagatggatcagagggtggaggagc

SEQ ID NO: 436974 - DNA, 3076 bp, Homo sapiens
ctctcccaaccgcctcgtcgcactcctcaggctgagagcaccgctgcactcgcggccggcgatgcgggaccccggcgcggccgctccgctttcgtccctgggcctctgtgccctggtgctggcgctgctgggcgcactgtccgcgggcgccggggcgcagccgtaccacggagagaagggcatctccgtgccggaccacggcttctgccagcccatctccatcccgctgtgcacggacatcgcctacaaccagaccatcctgcccaacctgctgggccacacgaaccaagaggacgcgggcctcgaggtgcaccagttctacccgctggtgaaggtgcagtgttctcccgaactccgctttttcttatgctccatgtatgcgcccgtgtgcaccgtgctcgatcaggccatcccgccgtgtcgttctctgtgcgagcgcgcccgccagggctgcgaggcgctcatgaacaagttcggcttccagtggcccgagcggctgcgctgcgagaacttcccggtgcacggtgcgggcgagatctgcgtgggccagaacacgtcggacggctccgggggcccaggcggcggccccactgcctaccctaccgcgccctacctgccggacctgcccttcaccgcgctgcccccgggggcctcagatggcagggggcgtcccgccttccccttctcatgcccccgtcagctcaaggtgcccccgtacctgggctaccgcttcctgggtgagcgcgattgtggcgccccgtgcgaaccgggccgtgccaacggcctgatgtactttaaggaggaggagaggcgcttcgcccgcctctgggtgggcgtgtggtccgtgctgtgctgcgcctcgacgctctttaccgttctcacctacctggtggacatgcggcgcttcagctacccagagcggcccatcatcttcctgtcgggctgctacttcatggtggccgtggcgcacgtggccggcttccttctagaggaccgcgccgtgtgcgtggagcgcttctcggacgatggctaccgcacggtggcgcagggcaccaagaaggagggctgcaccatcctcttcatggtgctctacttcttcggcatggccagctccatctggtgggtcattctgtctctcacttggttcctggcggccggcatgaagtggggccacgaggccatcgaggccaactcgcagtacttccacctggccgcgtgggccgtgcccgccgtcaagaccatcactatcctggccatgggccaggtagacggggacctgctgagcggggtgtgctacgttggcctctccagtgtggacgcgctgcggggcttcgtgctggcgcctctgttcgtctacctcttcataggcacgtccttcttgctggccggcttcgtgtccctcttccgtatccgcaccatcatgaaacacgacggcaccaagaccgagaagctggagaagctcatggtgcgcatcggcgtcttcagcgtgctctacacagtgcccgccaccatcgtcctggcctgctacttctacgagcaggccttccgcgagcactgggagcgcacctggctcctgcagacgtgcaagagctatgccgtgccctgcccgcccggccacttcccgcccatgagccccgacttcaccgtcttcatgatcaagtacctgatgaccatgatcgtcggcatcaccactggcttctggatctggtcgggcaagaccctgcagtcgtggcgccgcttctaccacagacttagccacagcagcaagggggagactgcggtatgagccccggcccctccccacctttcccaccccagccctcttgcaagaggagaggcacggtagggaaaagaactgctgggtgggggcctgtttctgtaactttctccccctctactgagaagtgacctggaagtgagaagttctttgcagatttggggcgaggggtgatttggaaaagaagacctgggtggaaagcggtttggatgaaaagatttcaggcaaagacttgcaggaagatgatgataacggcgatgtgaatcgtcaaaggtacgggccagcttgtgcctaatagaaggttgagaccagcagagactgctgtgagtttctcccggctccgaggctgaacggggactgtgagcgatccccctgctgcagggcgagtggcctgtccagacccctgtgaggccccgggaaaggtacagccctgtctgcggtggctgctttgttggaaagagggagggcctcctgcggtgtgcttgtcaagcagtggtcaaaccataatctcttttcactggggccaaactggagcccagatgggttaatttccagggtcagacattacggtctctcctcccctgccccctcccgcctgtttttcctcccgtactgctttcaggtcttgtaaaataagcatttggaagtcttgggaggcctgcctgctagaatcctaatgtgaggatgcaaaagaaatgatgataacattttgagataaggccaaggagacgtggagtaggtatttttgctactttttcattttctggggaaggcaggaggcagaaagacgggtgttttatttggtctaataccctgaaaagaagtgatgacttgttgcttttcaaaacaggaatgcatttttccccttgtctttgttgtaagagacaaaagaggaaacaaaagtgtctccctgtggaaaggcataactgtgacgaaagcaacttttataggcaaagcagcgcaaatctgaggtttcccgttggttgttaatttggttgagataaacattcctttttaaggaaaagtgaagagcagtgtgctgtcacacaccgttaagccagaggttctgacttcgctaaaggaaatgtaagaggttttgttgtctgttttaaataaatttaattcggaacacatgatccaacagactatgttaaaatattcagggaaatctctcccttcatttactttttcttgctataagcctatatttaggtttcttttctatttttttctcccatttggatcctttgaggtaaaaaaacataatgtcttcagcctcataataaaggaaagttaatt

SEQ ID NO: 436975 - DNA, 3932 bp, Homo sapiens
ctctcccaaccgcctcgtcgcactcctcaggctgagagcaccgctgcactcgcggccggcgatgcgggaccccggcgcggccgctccgctttcgtccctgggcctctgtgccctggtgctggcgctgctgggcgcactgtccgcgggcgccggggcgcagccgtaccacggagagaagggcatctccgtgccggaccacggcttctgccagcccatctccatcccgctgtgcacggacatcgcctacaaccagaccatcctgcccaacctgctgggccacacgaaccaagaggacgcgggcctcgaggtgcaccagttctacccgctggtgaaggtgcagtgttctcccgaactccgctttttcttatgctccatgtatgcgcccgtgtgcaccgtgctcgatcaggccatcccgccgtgtcgttctctgtgcgagcgcgcccgccagggctgcgaggcgctcatgaacaagttcggcttccagtggcccgagcggctgcgctgcgagaacttcccggtgcacggtgcgggcgagatctgcgtgggccagaacacgtcggacggctccgggggcccaggcggcggccccactgcctaccctaccgcgccctacctgccggacctgcccttcaccgcgctgcccccgggggcctcagatggcagggggcgtcccgccttccccttctcatgcccccgtcagctcaaggtgcccccgtacctgggctaccgcttcctgggtgagcgcgattgtggcgccccgtgcgaaccgggccgtgccaacggcctgatgtactttaaggaggaggagaggcgcttcgcccgcctctgggtgggcgtgtggtccgtgctgtgctgcgcctcgacgctctttaccgttctcacctacctggtggacatgcggcgcttcagctacccagagcggcccatcatcttcctgtcgggctgctacttcatggtggccgtggcgcacgtggccggcttccttctagaggaccgcgccgtgtgcgtggagcgcttctcggacgatggctaccgcacggtggcgcagggcaccaagaaggagggctgcaccatcctcttcatggtgctctacttcttcggcatggccagctccatctggtgggtcattctgtctctcacttggttcctggcggccggcatgaagtggggccacgaggccatcgaggccaactcgcagtacttccacctggccgcgtgggccgtgcccgccgtcaagaccatcactatcctggccatgggccaggtagacggggacctgctgagcggggtgtgctacgttggcctctccagtgtggacgcgctgcggggcttcgtgctggcgcctctgttcgtctacctcttcataggcacgtccttcttgctggccggcttcgtgtccctcttccgtatccgcaccatcatgaaacacgacggcaccaagaccgagaagctggagaagctcatggtgcgcatcggcgtcttcagcgtgctctacacagtgcccgccaccatcgtcctggcctgctacttctacgagcaggccttccgcgagcactgggagcgcacctggctcctgcagacgtgcaagagctatgccgtgccctgcccgcccggccacttcccgcccatgagccccgacttcaccgtcttcatgatcaagtacctgatgaccatgatcgtcggcatcaccactggcttctggatctggtcgggcaagaccctgcagtcgtggcgccgcttctaccacagacttagccacagcagcaagggggagactgcggtatgagccccggcccctccccacctttcccaccccagccctcttgcaagaggagaggcacggtagggaaaagaactgctgggtgggggcctgtttctgtaactttctccccctctactgagaagtgacctggaagtgagaagttctttgcagatttggggcgaggggtgatttggaaaagaagacctgggtggaaagcggtttggatgaaaagatttcaggcaaagacttgcaggaagatgatgataacggcgatgtgaatcgtcaaaggtacgggccagcttgtgcctaatagaaggttgagaccagcagagactgctgtgagtttctcccggctccgaggctgaacggggactgtgagcgatccccctgctgcagggcgagtggcctgtccagacccctgtgaggccccgggaaaggtacagccctgtctgcggtggctgctttgttggaaagagggagggcctcctgcggtgtgcttgtcaagcagtggtcaaaccataatctcttttcactggggccaaactggagcccagatgggttaatttccagggtcagacattacggtctctcctcccctgccccctcccgcctgtttttcctcccgtactgctttcaggtcttgtaaaataagcatttggaagtcttgggaggcctgcctgctagaatcctaatgtgaggatgcaaaagaaatgatgataacattttgagataaggccaaggagacgtggagtaggtatttttgctactttttcattttctggggaaggcaggaggcagaaagacgggtgttttatttggtctaataccctgaaaagaagtgatgacttgttgcttttcaaaacaggaatgcatttttccccttgtctttgttgtaagagacaaaagaggaaacaaaagtgtctccctgtggaaaggcataactgtgacgaaagcaacttttataggcaaagcagcgcaaatctgaggtttcccgttggttgttaatttggttgagataaacattcctttttaaggaaaagtgaagagcagtgtgctgtcacacaccgttaagccagaggttctgacttcgctaaaggaaatgtaagaggttttgttgtctgttttaaataaatttaattcggaacacatgatccaacagactatgttaaaatattcagggaaatctctcccttcatttactttttcttgctataagcctatatttaggtttcttttctatttttttctcccatttggatcctttgaggtaaaaaaacataatgtcttcagcctcataataaaggaaagttaattaaaaaaaaaaagcaaagagccattttgtcctgttttcttggttccatcaatctgtttattaaacatcatccatatgctgaccctgtctctgtgtggttgggttgggaggcgatcagcagataccatagtgaacgaagaggaaggtttgaaccatgggccccatctttaaagaaagtcattaaaagaaggtaaacttcaaagtgattctggagttctttgaaatgtgctggaagacttaaatttattaatcttaaatcatgtactttttttctgtaatagaactcggattcttttgcatgatggggtaaagcttagcagagaatcatgggagctaacctttatcccacctttgacactaccctccaatcttgcaacactatcctgtttctcagaacagtttttaaatgccaatcatagagggtactgtaaagtgtacaagttactttatatatgtaatgttcacttgagtggaactgctttttacattaaagttaaaatcgatcttgtgtttcttcaaccttcaaaactatctcatctgtcagatttttaaaactccaacacaggttttggcatcttttgtgctgtatcttttaagtgcatgtgaaatttgtaaaatagagataagtacagtatgtatattttgtaaatctcccatttttgtaagaaaatatatattgtatttatacatttttactttggatttttgttttgttggctttaaaggtctaccccactttatcacatgtacagatcacaaataaatttttttaaatacaaaaaattcaacaacacacacacaaaaaaaaagggggggcaaaaattccggggggccctgcccgttttcaaagggccagcg

SEQ ID NO: 436976 - DNA, 3448 bp, Homo sapiens
  misc_feature (133)..(133): n is a, c, g, or t
gagacagagtctcactccgttgcccaggctgggagtgcagtggcacgatctcagctcactgcaacctccgcctcccaggttcaagcgattctcctgcctcagcctcctgagtagctaggataacaggtgtgcnccaccacacccggctaatttttgtatttttagcagagatggggtctcaccatgttggccaacctggtctcgaactcctgacctcaggtgatctccccgcctcggcctcccaaagtgctgggattacaggcgtgagccacgcgcccggcccccagtttatgtgcagataaggcttaggggaaaaaaaaaagcgtcctcttattgtcaatgcgattgcatttctgtagcaggaagtcagaactacttgatggaattttgaactatcagaaactgcaggagatcgaagataaacttggctttaaaaaatgtttcactgattagttcttcccacattcaaacactgcgaatctgtcctccccaggactgcttcatagacccctcctgccctttttccttcacttctagcacttcaatgacaaatgccacctgtcttgatgtcctcctctcttcatctgctagccctgtcctgccagtatctcattcttccctggcccctctttacctggcttcctgtgtatgcctgggtaccgcgcctgtgcagtgtctggtgctcaggaatactgcatcaaaaggcagaattaagcccctgagcagccaggacaaggtctgacaacacgttttaaatcgagtaattgttgctcgctataaatgtgactattcacactgctgcccagtcacattttcaagtagggttggttcccagttcagcaccagaatgaaaactgcattagtcaccacccttcagcatccccagcagtacagcacgctggggagaagggtggagggtggcgattatacaactctgcggtaacgccatgctcttaagaacagcctaattggaccacaaaagaagaatgaaaatggatgtagatgtctgggcatcggaacgatcactctgcatttgagagcataagctcccagtgcagggttgacttatgcgtccttaagtgtcaccgcctatgatggtgtttgtcacggtgagtattaaagcagggggtgacgctgcaccttgccccgggggcaggtggtgaagctacgtgcatccggagtcagcaggtctgaggtcattcctcgccccctcccgcccgctccccgacgtcacgccgactccgtcctcggcggtgaagacattcctcccgggccctgcgccctgcagcgtggtaaccccactgccggagaccgtgcgcaacccagctgctagacccccggcgttgagcggcaaaaccccgccccgagcggcttgccccgcccccggctcgtcactcatgcaactcacccaatggtggcggcggggggcggggctaggactgagggcgccgtgcgccgaagcttgtggcgtcaatgcgcccgccgtgtccatggagagaagctgaggcggccgaccttcggcccgaggcaccggggcgccgggacggcgaagatgtcggcttccttagtccgggcaactgtccgggctgtgagcaagaggaagctgcagcccacccgggcagccctcaccctgacaccttcagcagtaaacaagataaaacaacttcttaaagataagcctgagcatgtaggtgtaaaagttggtgtccgaaccaggggctgtaatggcctttcttatactctagaatatacaaagacaaaaggagattctgatgaagaagttattcaagatggagtcagagtattcatcgaaaagaaagcacagctaacacttttaggaacagaaatggactatgttgaagacaaattatccagtgagtttgtgttcaataacccaaacatcaaagggacttgtggctgtggagaaagctttaatatttgaaatctcaggactcttctggccgtaggttccaggaaagctcgtggaagctttggggctcactgcagaaatcatgtgactgtcacgtgctggaaaataaagtgatacatcttgaaaatgaatccagtgtgttggattccagaagaaatgatatttatattctctataggggacagaaaatgagaagccatcactctttttggatcatttaggtctcttgtatcctttgttttagaaccagtttcattaaagttgccttcctgggcacctgtttatccatttcctgaactgtgtgcactccttagatcgctattgatggcttgatcatccctcagcatttctcccaaccagatcggtgactcctaaaatctgagacaggacatcgtgactgctggtagtaatatggtggtgcattgttttttccacccaaacttaacatagcctttttatacatttttatgaaaaatttcattgtcagctgcctcactgcatactctttaatagtaccaggcaaagattttcttcaactatagtacagattagttctgagtgatggtatcaaaaggtgagaaagacgtcatccgcctttttttaatccatttcttttgccaccctatatgtctgttcagagatgggctctcaagctgactttgattcttttagttgagaagtctcttaaagccatctagcccacctccatcaattccctatgtgaggaagcaaaaccccagggaagccaaagggctcctgtccaccctgacaccacaggccgggggagagtagggactctacccccctctccccttgtaggtgacacatgctctgccctctgaggcagtcagcgaaggcaaatggtctgacttctttatgtggtcaacattttgatagaatttctttataatttgatagagattatattatttttattttattttgagtgggaagaattttaaaacctttttatgtcaattaccatcttgtttctttcacctttgaaacaatggtttgtagcagagatgacattgtagcaacccagaattatgcttttggaatgtggtcctcactgtacaggagaatgtgtaatcttttgttaaaattcccagtgtgcatacattttctggttcctcggtccagttgctaaagttcttagtattttagcctaacatatttatcaccaacttttctttaaaagtgttccttttgtcacttagttactgattttcctgggtttgacataagtattctatgagatgatatatatgctttttttgaaagctgattctcatgaattcaagtagctgagttcctttatgtttcgtttattcactaaagtagctgacacaaaacacaccaaaacctagagcggtagttttatgtaaatgctcatgagtttgtatcaataatataattgttgatccacttataattcgtgcaatactgtatgtatgtagagattgagttgtcaattaaaaaaaatgtggcctctttgtgatcataaaaaaaaaattt

SEQ ID NO: 436977 - DNA, 1814 bp, Homo sapiens
  misc_feature (133)..(133): n is a, c, g, or t
  misc_feature (1674)..(1674): n is a, c, g, or t
  misc_feature (1814)..(1814): n is a, c, g, or t
gagacagagtctcactccgttgcccaggctgggagtgcagtggcacgatctcagctcactgcaacctccgcctcccaggttcaagcgattctcctgcctcagcctcctgagtagctaggataacaggtgtgcnccaccacacccggctaatttttgtatttttagcagagatggggtctcaccatgttggccaacctggtctcgaactcctgacctcaggtgatctccccgcctcggcctcccaaagtgctgggattacaggcgtgagccacgcgcccggcccccagtttatgtgcagataaggcttaggggaaaaaaaaaagcgtcctcttattgtcaatgcgattgcatttctgtagcaggaagtcagaactacttgatggaattttgaactatcagaaactgcaggagatcgaagataaacttggctttaaaaaatgtttcactgattagttcttcccacattcaaacactgcgaatctgtcctccccaggactgcttcatagacccctcctgccctttttccttcacttctagcacttcaatgacaaatgccacctgtcttgatgtcctcctctcttcatctgctagccctgtcctgccagtatctcattcttccctggcccctctttacctggcttcctgtgtatgcctgggtaccgcgcctgtgcagtgtctggtgctcaggaatactgcatcaaaaggcagaattaagcccctgagcagccaggacaaggtctgacaacacgttttaaatcgagtaattgttgctcgctataaatgtgactattcacactgctgcccagtcacattttcaagtagggttggttcccagttcagcaccagaatgaaaactgcattagtcaccacccttcagcatccccagcagtacagcacgctggggagaagggtggagggtggcgattatacaactctgcggtaacgccatgctcttaagaacagcctaattggaccacaaaagaagaatgaaaatggatgtagatgtctgggcatcggaacgatcactctgcatttgagagcataagctcccagtgcagggttgacttatgcgtccttaagtgtcaccgcctatgatggtgtttgtcacggtgagtattaaagcagggggtgacgctgcaccttgccccgggggcaggtggtgaagctacgtgcatccggagtcagcaggtctgaggtcattcctcgccccctcccgcccgctccccgacgtcacgccgactccgtcctcggcggtgaagacattcctcccgggccctgcgccctgcagcgtggtaaccccactgccggagaccgtgcgcaacccagctgctagacccccggcgttgagcggcaaaaccccgccccgagcggcttgccccgcccccggctcgtcactcatgcaactcacccaatggtggcggcggggggcggggctaggactgagggcgccgtgcgccgaagcttgtggcgtcaatgcgcccgccgtgtccatggagagaagctgaggcggccgaccttcggcccgaggcaccggggcgccgggacggcgaagatgtcggcttccttagtccgggcaactgtccgggctgtgagcaagaggaagctgcagcccacccgggcagccctcaccctggtgagtgctcgcggcgcgcggcggggcccgtgacattgctngtgtccgccccgtgcaaggggaggtcacggcggccgggagtggggccgcagggacgcggacacgtcagacctcggcgtcgctccgacccgccgcacagcctcgccgcctccttcgcctccggcccctctttgcaacgatn

SEQ ID NO: 436978 - DNA, 832 bp, Homo sapiens
agcggggggctgggccttggggctgctggatgaatgagacccagcctctgccctgggagtgcagagactcaagacagatatgaccacgtgaagagacaactgtaaaacaagtggaattagagaataaaatcccagcacgatgttcctcactggagacaccagtccagctgaggacaatagagaagccacccttcctcaatgttcacttccagaattatatgcatgtattgagaattttaataaggagagcaagaaatcaaatcttctaaaaatgcatggtatttcacttaacgaagcacaggaagtacttgctagaaacctgaatgtcatgtcattcaccaggggcgctgatgtgagaggagatctccaacctgttatcaggaaaacaattcatgaatctaagggatctggaatggagatattttaaggggcttgcgaagtggaggcgcactactgcaatttcattcggagacataaaatacaacactgagaagagatttgtagagagccaggacatgcctgacgttattttcccccctatagttcgcaagtctttggtcatttatcctcaaattgattatcaaaatgaaggaagttattctcttaaatggaatatgtagtgtattaaaatattttggacgtagatttttgcttttgagagcattgatttaatacacaaaaagtaaagaagccaagtacccaatagaacatctgaagtgagtgtgtacaacacacatgaaggtatattgtacaacattaagccgttaatacagagcaaaagggtccgatttaatctgctaacgtgagaagtggtttggacggtgcaacccat

SEQ ID NO: 436979 - DNA, 2738 bp, Homo sapiens
  misc_feature (133)..(133): n is a, c, g, or t
gagacagagtctcactccgttgcccaggctgggagtgcagtggcacgatctcagctcactgcaacctccgcctcccaggttcaagcgattctcctgcctcagcctcctgagtagctaggataacaggtgtgcnccaccacacccggctaatttttgtatttttagcagagatggggtctcaccatgttggccaacctggtctcgaactcctgacctcaggtgatctccccgcctcggcctcccaaagtgctgggattacaggcgtgagccacgcgcccggcccccagtttatgtgcagataaggcttaggggaaaaaaaaaagcgtcctcttattgtcaatgcgattgcatttctgtagcaggaagtcagaactacttgatggaattttgaactatcagaaactgcaggagatcgaagataaacttggctttaaaaaatgtttcactgattagttcttcccacattcaaacactgcgaatctgtcctccccaggactgcttcatagacccctcctgccctttttccttcacttctagcacttcaatgacaaatgccacctgtcttgatgtcctcctctcttcatctgctagccctgtcctgccagtatctcattcttccctggcccctctttacctggcttcctgtgtatgcctgggtaccgcgcctgtgcagtgtctggtgctcaggaatactgcatcaaaaggcagaattaagcccctgagcagccaggacaaggtctgacaacacgttttaaatcgagtaattgttgctcgctataaatgtgactattcacactgctgcccagtcacattttcaagtagggttggttcccagttcagcaccagaatgaaaactgcattagtcaccacccttcagcatccccagcagtacagcacgctggggagaagggtggagggtggcgattatacaactctgcggtaacgccatgctcttaagaacagcctaattggaccacaaaagaagaatgaaaatggatgtagatgtctgggcatcggaacgatcactctgcatttgagagcataagctcccagtgcagggttgacttatgcgtccttaagtgtcaccgcctatgatggtgtttgtcacggtgagtattaaagcagggggtgacgctgcaccttgccccgggggcaggtggtgaagctacgtgcatccggagtcagcaggtctgaggtcattcctcgccccctcccgcccgctccccgacgtcacgccgactccgtcctcggcggtgaagacattcctcccgggccctgcgccctgcagcgtggtaaccccactgccggagaccgtgcgcaacccagctgctagacccccggcgttgagcggcaaaaccccgccccgagcggcttgccccgcccccggctcgtcactcatgcaactcacccaatggtggcggcggggggcggggctaggactgagggcgccgtgcgccgaagcttgtggcgtcaatgcgcccgccgtgtccatggagagaagctgaggcggccgaccttcggcccgaggcaccggggcgccgggacggcgaagatgtcggcttccttagtccgggcaactgtccgggctgtgagcaagaggaagctgcagcccacccgggcagccctcaccctgacaccttcagcagtaaacaagataaaacaacttcttaaagataagcctgagcatgtaggtgtaaaagttggtgtccgaaccaggggctgtaatggcctttcttatactctagaatatacaaagacaaaaggagattctgatgaagaagttattcaagatggctggagtgcagtggtgtgatctcggcttgctgcaacctccacctccctggttcaagcgatcctcccacctcagcctcccaagtagctgggattataggcgcccaccaccatgcctggttcatttttgtatttttagtggagctgtattatcaactcatgtttttgaggaatcctgtatttccaatttttattcaaagctatttattataatttaatttataattaaaattaattatatttgctgctgcccccttcttccaccctataatctgttaaaacctatctaaaataaataatttatcttgtcattggaagtatgcacttagcttgcagttcttacctacatgggagaatgaggcctagattcctaagtgtgctttcttattaaactaaagttataactatcaataaagaccttttaaaaatgtattattttaaaaattataacacattataaaccttaagattttcatcttaaagaagaggtgacttaattatatattgtttatatttagctaatggctcaatttcttgtaaggaagaaagtttttttgttgtttcgttgttttgtttgtttgttgagacagagtcttgctctcttacccaggctggagtgcagtggcacaatcatggttcactgtagcctctgtctcccgggctcaagcagtcctcccacctcagcctcccgagtagctgggactacaggtgcccaccactgtgcccggctaatttttgtatttttagtggagccagggttttgccctgtttcccagactagaaagctttcttaaattgattgtatttgttggctgggcactgtggctcacacctgtaatcccagcactttgggaggccgaggtgggaggatcacttgagcccaggaatgcaagaccagcttgggccacgtggtgaaaccctgactctaaaaaaattagttggtcctg

SEQ ID NO: 436980 - DNA, 911 bp, Homo sapiens
agcggggggctgggccttggggctgctggatgaatgagacccagcctctgccctgggagtgcagagactcaagacagatatgaccacgtgaagagacaactgtaaaacaagtgtggttgccctagagtttgcagtatatgtttacaactaacccaagaccactttcaaattacactacaccttgcaggcagtgaattagagaataaaatcccagcacgatgttcctcactggagacaccagtccagctgaggacaatagagaagccacccttcctcaatgttcacttccagaattatatgcatgtattgagaattttaataaggagagcaagaaatcaaatcttctaaaaatgcatggtatttcacttaacgaagcacaggaagtacttgctagaaacctgaatgtcatgtcattcaccaggggcgctgatgtgagaggagatctccaacctgttatcaggaaaacaattcatgaatctaagggatctggaatggagatattttaaggggcttgcgaagtggaggcgcactactgcaatttcattcggagacataaaatacaacactgagaagagatttgtagagagccaggacatgcctgacgttattttcccccctatagttcgcaagtctttggtcatttatcctcaaattgattatcaaaatgaaggaagttattctcttaaatggaatatgtagtgtattaaaatattttggacgtagatttttgcttttgagagcattgatttaatacacaaaaagtaaagaagccaagtacccaatagaacatctgaagtgagtgtgtacaacacacatgaaggtatattgtacaacattaagccgttaatacagagcaaaagggtccgatttaatctgctaacgtgagaagtggtttggacggtgcaacccat

SEQ ID NO: 436981 - DNA, 845 bp, Homo sapiens
caaagctgcaggtgtgatgatcttacagaggcagctgataagtgaaatggttgccctagagtttgcagtatatgtttacaactaacccaagaccactttcaaattacactacaccttgcaggcagtgaattagagaataaaatcccagcacgatgttcctcactggagacaccagtccagctgaggacaatagagaagccacccttcctcaatgttcacttccagaattatatgcatgtattgagaattttaataaggagagcaagaaatcaaatcttctaaaaatgcatggtatttcacttaacgaagcacaggaagtacttgctagaaacctgaatgtcatgtcattcaccaggggcgctgatgtgagaggagatctccaacctgttatcaggaaaacaattcatgaatctaagggatctggaatggagatattttaaggggcttgcgaagtggaggcgcactactgcaatttcattcggagacataaaatacaacactgagaagagatttgtagagagccaggacatgcctgacgttattttcccccctatagttcgcaagtctttggtcatttatcctcaaattgattatcaaaatgaaggaagttattctcttaaatggaatatgtagtgtattaaaatattttggacgtagatttttgcttttgagagcattgatttaatacacaaaaagtaaagaagccaagtacccaatagaacatctgaagtgagtgtgtacaacacacatgaaggtatattgtacaacattaagccgttaatacagagcaaaagggtccgatttaatctgctaacgtgagaagtggtttggacggtgcaacccat

SEQ ID NO: 436982 - DNA, 456 bp, Homo sapiens
agcggggggctgggccttggggctgctggatgaatgagacccagcctctgccctgggagtgcagagactcaagacagatatgaccacgtgaagagacaactgtaaaacaagtggcaggtcacagaagctggaaccagttgatcgggccgagcctgcagactccctcatcctttccggccttcaacactgatagctctgctctctctccccaacctcagtgccttcatcctcccctgtgttcccatggatgcttggtcctgactttgcacctctccctcacacccagtgtcctttgtttttcctctgccacttgggaggctgatgggaggatcacctgagcctgggaggttgaggctgcagtgacctgtgttcacgccactgcactccagctggggtgacagaatgagagcctatctcaaagaaaaaaaaaaaacactgctctgtatgatactaaaa

SEQ ID NO: 436983 - DNA, 1967 bp, Homo sapiens
ggccggaggggatcccgggggtgggcgtccccgggggccgatcgcctccacactcctgccggcctgcgctgttcggccgttccggttaagcagaggctgaacgtgcccggtggcgggggttcccggtggtggcccggagtcctagcctggagacaccttcagcagtaaacaagataaaacaacttcttaaagataagcctgagcatgtaggtgtaaaagttggtgtccgaaccaggggctgtaatggcctttcttatactctagaatatacaaagacaaaaggagattctgatgaagaagttattcaagatggagtcagagtattcatcgaaaagaaagcacagctaacacttttaggaacagaaatggactatgttgaagacaaattatccagtgagtttgtgttcaataacccaaacatcaaagggacttgtggctgtggagaaagctttaatatttgaaatctcaggactcttctggccgtaggttccaggaaagctcgtggaagctttggggctcactgcagaaatcatgtgactgtcacgtgctggaaaataaagtgatacatcttgaaaatgaatccagtgtgttggattccagaagaaatgatatttatattctctataggggacagaaaatgagaagccatcactctttttggatcatttaggtctcttgtatcctttgttttagaaccagtttcattaaagttgccttcctgggcacctgtttatccatttcctgaactgtgtgcactccttagatcgctattgatggcttgatcatccctcagcatttctcccaaccagatcggtgactcctaaaatctgagacaggacatcgtgactgctggtagtaatatggtggtgcattgttttttccacccaaacttaacatagcctttttatacatttttatgaaaaatttcattgtcagctgcctcactgcatactctttaatagtaccaggcaaagattttcttcaactatagtacagattagttctgagtgatggtatcaaaaggtgagaaagacgtcatccgcctttttttaatccatttcttttgccaccctatatgtctgttcagagatgggctctcaagctgactttgattcttttagttgagaagtctcttaaagccatctagcccacctccatcaattccctatgtgaggaagcaaaaccccagggaagccaaagggctcctgtccaccctgacaccacaggccgggggagagtagggactctacccccctctccccttgtaggtgacacatgctctgccctctgaggcagtcagcgaaggcaaatggtctgacttctttatgtggtcaacattttgatagaatttctttataatttgatagagattatattatttttattttattttgagtgggaagaattttaaaacctttttatgtcaattaccatcttgtttctttcacctttgaaacaatggtttgtagcagagatgacattgtagcaacccagaattatgcttttggaatgtggtcctcactgtacaggagaatgtgtaatcttttgttaaaattcccagtgtgcatacattttctggttcctcggtccagttgctaaagttcttagtattttagcctaacatatttatcaccaacttttctttaaaagtgttccttttgtcacttagttactgattttcctgggtttgacataagtattctatgagatgatatatatgctttttttgaaagctgattctcatgaattcaagtagctgagttcctttatgtttcgtttattcactaaagtagctgacacaaaacacaccaaaacctagagcggtagttttatgtaaatgctcatgagtttgtatcaataatataattgttgatccacttataattcgtgcaatactgtatgtatgtagagattgagttgtcaattaaaaaaaatgtggcctctttgtgatcataaaaaaaaaattt

SEQ ID NO: 436984 - DNA, 2141 bp, Homo sapiens
tgttttccgtcctgtaaccagaaaagactattgttgtactgattgatgttattaaaatagccccattgtatcacagtcctttgtacatctttaagcttgaatccgtgtatctagtgtattgcagaattttcataaatttttttttatttcataaaactcatcgagaatatacattttcttcacgttgcaaactggaaaaatgagtgaagtatagtgaaaggtaaattctaattttgcataaaattgtcatggaatttacttgtataaaattctcccctaatgtgattgtgacataaattcatgtgtgggaaagaaggggcagacaggaaactgaatgcttaattccttaaggaaataatttaaaatgttcaaggcttcttgtttgactttcattgatagtcactatttcaagttcacttgtgctttgaatcagcaagttccataaggctgcaggctttccatgacacatgttttcttttctccaaggagtcagagtattcatcgaaaagaaagcacagctaacacttttaggaacagaaatggactatgttgaagacaaattatccagtgagtttgtgttcaataacccaaacatcaaagggacttgtggctgtggagaaagctttaatatttgaaatctcaggactcttctggccgtaggttccaggaaagctcgtggaagctttggggctcactgcagaaatcatgtgactgtcacgtgctggaaaataaagtgatacatcttgaaaatgaatccagtgtgttggattccagaagaaatgatatttatattctctataggggacagaaaatgagaagccatcactctttttggatcatttaggtctcttgtatcctttgttttagaaccagtttcattaaagttgccttcctgggcacctgtttatccatttcctgaactgtgtgcactccttagatcgctattgatggcttgatcatccctcagcatttctcccaaccagatcggtgactcctaaaatctgagacaggacatcgtgactgctggtagtaatatggtggtgcattgttttttccacccaaacttaacatagcctttttatacatttttatgaaaaatttcattgtcagctgcctcactgcatactctttaatagtaccaggcaaagattttcttcaactatagtacagattagttctgagtgatggtatcaaaaggtgagaaagacgtcatccgcctttttttaatccatttcttttgccaccctatatgtctgttcagagatgggctctcaagctgactttgattcttttagttgagaagtctcttaaagccatctagcccacctccatcaattccctatgtgaggaagcaaaaccccagggaagccaaagggctcctgtccaccctgacaccacaggccgggggagagtagggactctacccccctctccccttgtaggtgacacatgctctgccctctgaggcagtcagcgaaggcaaatggtctgacttctttatgtggtcaacattttgatagaatttctttataatttgatagagattatattatttttattttattttgagtgggaagaattttaaaacctttttatgtcaattaccatcttgtttctttcacctttgaaacaatggtttgtagcagagatgacattgtagcaacccagaattatgcttttggaatgtggtcctcactgtacaggagaatgtgtaatcttttgttaaaattcccagtgtgcatacattttctggttcctcggtccagttgctaaagttcttagtattttagcctaacatatttatcaccaacttttctttaaaagtgttccttttgtcacttagttactgattttcctgggtttgacataagtattctatgagatgatatatatgctttttttgaaagctgattctcatgaattcaagtagctgagttcctttatgtttcgtttattcactaaagtagctgacacaaaacacaccaaaacctagagcggtagttttatgtaaatgctcatgagtttgtatcaataatataattgttgatccacttataattcgtgcaatactgtatgtatgtagagattgagttgtcaattaaaaaaaatgtggcctctttgtgatcataaaaaaaaaattt

SEQ ID NO: 436985 - DNA, 3532 bp, Homo sapiens
  misc_feature (133)..(133): n is a, c, g, or t
gagacagagtctcactccgttgcccaggctgggagtgcagtggcacgatctcagctcactgcaacctccgcctcccaggttcaagcgattctcctgcctcagcctcctgagtagctaggataacaggtgtgcnccaccacacccggctaatttttgtatttttagcagagatggggtctcaccatgttggccaacctggtctcgaactcctgacctcaggtgatctccccgcctcggcctcccaaagtgctgggattacaggcgtgagccacgcgcccggcccccagtttatgtgcagataaggcttaggggaaaaaaaaaagcgtcctcttattgtcaatgcgattgcatttctgtagcaggaagtcagaactacttgatggaattttgaactatcagaaactgcaggagatcgaagataaacttggctttaaaaaatgtttcactgattagttcttcccacattcaaacactgcgaatctgtcctccccaggactgcttcatagacccctcctgccctttttccttcacttctagcacttcaatgacaaatgccacctgtcttgatgtcctcctctcttcatctgctagccctgtcctgccagtatctcattcttccctggcccctctttacctggcttcctgtgtatgcctgggtaccgcgcctgtgcagtgtctggtgctcaggaatactgcatcaaaaggcagaattaagcccctgagcagccaggacaaggtctgacaacacgttttaaatcgagtaattgttgctcgctataaatgtgactattcacactgctgcccagtcacattttcaagtagggttggttcccagttcagcaccagaatgaaaactgcattagtcaccacccttcagcatccccagcagtacagcacgctggggagaagggtggagggtggcgattatacaactctgcggtaacgccatgctcttaagaacagcctaattggaccacaaaagaagaatgaaaatggatgtagatgtctgggcatcggaacgatcactctgcatttgagagcataagctcccagtgcagggttgacttatgcgtccttaagtgtcaccgcctatgatggtgtttgtcacggtgagtattaaagcagggggtgacgctgcaccttgccccgggggcaggtggtgaagctacgtgcatccggagtcagcaggtctgaggtcattcctcgccccctcccgcccgctccccgacgtcacgccgactccgtcctcggcggtgaagacattcctcccgggccctgcgccctgcagcgtggtaaccccactgccggagaccgtgcgcaacccagctgctagacccccggcgttgagcggcaaaaccccgccccgagcggcttgccccgcccccggctcgtcactcatgcaactcacccaatggtggcggcggggggcggggctaggactgagggcgccgtgcgccgaagcttgtggcgtcaatgcgcccgccgtgtccatggagagaagctgaggcggccgaccttcggcccgaggcaccggggcgccgggacggcgaagatgtcggcttccttagtccgggcaactgtccgggctgtgagcaagaggaagctgcagcccacccgggcagccctcaccctgacaccttcagcagtaaacaagataaaacaacttcttaaagataagcctgagcatgtaggtgtaaaagttggtgtccgaaccaggggctgtaatggcctttcttatactctagaatatacaaagacaaaaggagattctgatgaagaagttattcaagatggagtcagagtattcatcgaaaagaaagcacagctaacacttttaggaacagaaatggactatgttgaagacaaattatccagtgagtttgtgttcaataacccaaacatcaaagggacttgtggctgtggagaaagctttaatatttgaaatctcaggactcttctggccgtaggttccaggaaagctcgtggaagctttggggctcactgcagaaatcatgtgactgtcacgtgctggaaaataaagtgatacatcttgaaaatgaatccagtgtgttggattccagaagaaatgatatttatattctctataggggacagaaaatgagaagccatcactctttttggatcatttaggtctcttgtatcctttgttttagaaccagtttcattaaagttgccttcctgggcacctgtttatccatttcctatctgtactatagttgaagaaaatcttggcctggtactattaaagagtatgcagtgaggcagctgacaatgaaatttttcataagaatgtataaaaaggctatgttaagtttgggtggaaaaaacaatgcaccaccatattactaccagcagtcacgatgtcctgtctcagattttaggagtcaccgatgctggtagtaatatggtggtgcattgttttttccacccaaacttaacatagcctttttatacatttttatgaaaaatttcattgtcagctgcctcactgcatactctttaatagtaccaggcaaagattttcttcaactatagtacagattagttctgagtgatggtatcaaaaggtgagaaagacgtcatccgcctttttttaatccatttcttttgccaccctatatgtctgttcagagatgggctctcaagctgactttgattcttttagttgagaagtctcttaaagccatctagcccacctccatcaattccctatgtgaggaagcaaaaccccagggaagccaaagggctcctgtccaccctgacaccacaggccgggggagagtagggactctacccccctctccccttgtaggtgacacatgctctgccctctgaggcagtcagcgaaggcaaatggtctgacttctttatgtggtcaacattttgatagaatttctttataatttgatagagattatattatttttattttattttgagtgggaagaattttaaaacctttttatgtcaattaccatcttgtttctttcacctttgaaacaatggtttgtagcagagatgacattgtagcaacccagaattatgcttttggaatgtggtcctcactgtacaggagaatgtgtaatcttttgttaaaattcccagtgtgcatacattttctggttcctcggtccagttgctaaagttcttagtattttagcctaacatatttatcaccaacttttctttaaaagtgttccttttgtcacttagttactgattttcctgggtttgacataagtattctatgagatgatatatatgctttttttgaaagctgattctcatgaattcaagtagctgagttcctttatgtttcgtttattcactaaagtagctgacacaaaacacaccaaaacctagagcggtagttttatgtaaatgctcatgagtttgtatcaataatataattgttgatccacttataattcgtgcaatactgtatgtatgtagagattgagttgtcaattaaaaaaaatgtggcctctttgtgatcataaaaaaaaaattt

SEQ ID NO: 436986 - DNA, 2083 bp, Homo sapiens
  misc_feature (133)..(133): n is a, c, g, or t
  misc_feature (2054)..(2054): n is a, c, g, or t
  misc_feature (2057)..(2057): n is a, c, g, or t
gagacagagtctcactccgttgcccaggctgggagtgcagtggcacgatctcagctcactgcaacctccgcctcccaggttcaagcgattctcctgcctcagcctcctgagtagctaggataacaggtgtgcnccaccacacccggctaatttttgtatttttagcagagatggggtctcaccatgttggccaacctggtctcgaactcctgacctcaggtgatctccccgcctcggcctcccaaagtgctgggattacaggcgtgagccacgcgcccggcccccagtttatgtgcagataaggcttaggggaaaaaaaaaagcgtcctcttattgtcaatgcgattgcatttctgtagcaggaagtcagaactacttgatggaattttgaactatcagaaactgcaggagatcgaagataaacttggctttaaaaaatgtttcactgattagttcttcccacattcaaacactgcgaatctgtcctccccaggactgcttcatagacccctcctgccctttttccttcacttctagcacttcaatgacaaatgccacctgtcttgatgtcctcctctcttcatctgctagccctgtcctgccagtatctcattcttccctggcccctctttacctggcttcctgtgtatgcctgggtaccgcgcctgtgcagtgtctggtgctcaggaatactgcatcaaaaggcagaattaagcccctgagcagccaggacaaggtctgacaacacgttttaaatcgagtaattgttgctcgctataaatgtgactattcacactgctgcccagtcacattttcaagtagggttggttcccagttcagcaccagaatgaaaactgcattagtcaccacccttcagcatccccagcagtacagcacgctggggagaagggtggagggtggcgattatacaactctgcggtaacgccatgctcttaagaacagcctaattggaccacaaaagaagaatgaaaatggatgtagatgtctgggcatcggaacgatcactctgcatttgagagcataagctcccagtgcagggttgacttatgcgtccttaagtgtcaccgcctatgatggtgtttgtcacggtgagtattaaagcagggggtgacgctgcaccttgccccgggggcaggtggtgaagctacgtgcatccggagtcagcaggtctgaggtcattcctcgccccctcccgcccgctccccgacgtcacgccgactccgtcctcggcggtgaagacattcctcccgggccctgcgccctgcagcgtggtaaccccactgccggagaccgtgcgcaacccagctgctagacccccggcgttgagcggcaaaaccccgccccgagcggcttgccccgcccccggctcgtcactcatgcaactcacccaatggtggcggcggggggcggggctaggactgagggcgccgtgcgccgaagcttgtggcgtcaatgcgcccgccgtgtccatggagagaagctgaggcggccgaccttcggcccgaggcaccggggcgccgggacggcgaagatgtcggcttccttagtccgggcaactgtccgggctgtgagcaagaggaagctgcagcccacccgggcagccctcaccctgacaccttcagcagtaaacaagataaaacaacttcttaaagataagcctgagcatgtaggtgtaaaagttggtgtccgaaccaggggctgtaatggcctttcttatactctagaatatacaaagacaaaaggagattctgatgaagaagttattcaagatggagtcagagtattcatcgaaaagaaagcacagctaacacttttaggaacagaaatggactatgttgaagacaaattatccagtgagtttgtgttcaataacccaaacatcaaagggacttgtggctgtggagaaagctttaatatttgaaatctcaggactcttctggccgtaggttccaggaaagctcgtggaagctttggggctcactgcagaaatcatgtgactgtcacgtgctggtgtgatacatctggggggacanganatgaggccatcacttcttttggatct

SEQ ID NO: 436987 - DNA, 2149 bp, Homo sapiens
  misc_feature (133)..(133): n is a, c, g, or t
gagacagagtctcactccgttgcccaggctgggagtgcagtggcacgatctcagctcactgcaacctccgcctcccaggttcaagcgattctcctgcctcagcctcctgagtagctaggataacaggtgtgcnccaccacacccggctaatttttgtatttttagcagagatggggtctcaccatgttggccaacctggtctcgaactcctgacctcaggtgatctccccgcctcggcctcccaaagtgctgggattacaggcgtgagccacgcgcccggcccccagtttatgtgcagataaggcttaggggaaaaaaaaaagcgtcctcttattgtcaatgcgattgcatttctgtagcaggaagtcagaactacttgatggaattttgaactatcagaaactgcaggagatcgaagataaacttggctttaaaaaatgtttcactgattagttcttcccacattcaaacactgcgaatctgtcctccccaggactgcttcatagacccctcctgccctttttccttcacttctagcacttcaatgacaaatgccacctgtcttgatgtcctcctctcttcatctgctagccctgtcctgccagtatctcattcttccctggcccctctttacctggcttcctgtgtatgcctgggtaccgcgcctgtgcagtgtctggtgctcaggaatactgcatcaaaaggcagaattaagcccctgagcagccaggacaaggtctgacaacacgttttaaatcgagtaattgttgctcgctataaatgtgactattcacactgctgcccagtcacattttcaagtagggttggttcccagttcagcaccagaatgaaaactgcattagtcaccacccttcagcatccccagcagtacagcacgctggggagaagggtggagggtggcgattatacaactctgcggtaacgccatgctcttaagaacagcctaattggaccacaaaagaagaatgaaaatggatgtagatgtctgggcatcggaacgatcactctgcatttgagagcataagctcccagtgcagggttgacttatgcgtccttaagtgtcaccgcctatgatggtgtttgtcacggtgagtattaaagcagggggtgacgctgcaccttgccccgggggcaggtggtgaagctacgtgcatccggagtcagcaggtctgaggtcattcctcgccccctcccgcccgctccccgacgtcacgccgactccgtcctcggcggtgaagacattcctcccgggccctgcgccctgcagcgtggtaaccccactgccggagaccgtgcgcaacccagctgctagacccccggcgttgagcggcaaaaccccgccccgagcggcttgccccgcccccggctcgtcactcatgcaactcacccaatggtggcggcggggggcggggctaggactgagggcgccgtgcgccgaagcttgtggcgtcaatgcgcccgccgtgtccatggagagaagctgaggcggccgaccttcggcccgaggcaccggggcgccgggacggcgaagatgtcggcttccttagtccgggcaactgtccgggctgtgagcaagaggaagctgcagcccacccgggcagccctcaccctgacaccttcagcagtaaacaagataaaacaacttcttaaagataagcctgagcatgtaggtgtaaaagttggtgtccgaaccaggggctgtaatggcctttcttatactctagaatatacaaagacaaaaggagattctgatgaagaagttattcaagatggaattagagaataaaatcccagcacgatgttcctcactggagacaccagtccagctgaggacaatagagaagccacccttcctcaatgttcacttccagaattatatgcatgtattgagaattttaataaggagagcaagaaatcaaatcttctaaaaatgcatggtatttcacttaacgaagcacaggaagtacttgctagaaacctgaatgtcatgtcattcaccaggggcgctgatgtgagaggagatctccaacctgttatcagtgtcaataaaatgaacaagcctggaaaacatagaaagaccccatctccaaaaataaataaataaataaataaataaataaaaattagc

SEQ ID NO: 436988 - DNA, 735 bp, Homo sapiens
agcggggggctgggccttggggctgctggatgaatgagacccagcctctgccctgggagtgcagagactcaagacagatatgaccacgtgaagagacaactgtaaaacaagtgtggttgccctagagtttgcagtatatgtttacaactaacccaagaccactttcaaattacactacaccttgcaggcagtgaattagagaataaaatcccagcacgatgttcctcactggagacaccagtccagctgaggacaatagagaagccacccttcctcaatgttcagaaaacaattcatgaatctaagggatctggaatggagatattttaaggggcttgcgaagtggaggcgcactactgcaatttcattcggagacataaaatacaacactgagaagagatttgtagagagccaggacatgcctgacgttattttcccccctatagttcgcaagtctttggtcatttatcctcaaattgattatcaaaatgaaggaagttattctcttaaatggaatatgtagtgtattaaaatattttggacgtagatttttgcttttgagagcattgatttaatacacaaaaagtaaagaagccaagtacccaatagaacatctgaagtgagtgtgtacaacacacatgaaggtatattgtacaacattaagccgttaatacagagcaaaagggtccgatttaatctgctaacgtgagaagtggtttggacggtgcaacccat

SEQ ID NO: 436989 - DNA, 469 bp, Homo sapiens
gtgcgtggggtggggagggaccaggctgtccgaaggaccgctgtgtcggggcgacagcgttcgcagagggcgagcacagcgacaacaaagcccccggctcctgccgaggtcacggccgcggcgcgcaaagcgttacttgccggtgtcctgggtgattgaggcctttgaaactccctctgtgcctctagcaagcctaggctcttaggacaaaagatgatttcccagagtgagtttacagccttttctgggtgaaaggtcaaacactcagagggcaccagagtgcaaccattgattacttagagaattcactgagctcagtgttccggccgcaccgttcagttttttagtggaaggaaaatccacataacataaaattagtccttttaaagggtacaattcagtgccatttaagacattcacagtgtcgtgcaaccatcacctctatctagttccaaaatactttcacccc

SEQ ID NO: 436990 - DNA, 440 bp, Homo sapiens
cagagcagtgaaaactaagccagtctaggcttggcaaggagagatggagtgaggtgggcagtggctaaggtgggaagaccagagctgggaggtgagatgggatttgggtttatctttaccaataaggatgaggagcctgtttcatcttcctccaggcaggtcacagaagctggaaccagttgatcgggccgagcctgcagactccctcatcctttccggccttcaacactgatagctctgctctctctccccaacctcagtgccttcatcctcccctgtgttcccatggatgcttggtcctgactttgcacctctccctcacacccagtgtcctttgtttttcctctgccacttgggaggctgatgggaggatcacctgagcctgggaggttgaggctgcagtgacctgtgttcacgccactgcactccagctggggtga

SEQ ID NO: 436991 - DNA, 2224 bp, Homo sapiens
  misc_feature (133)..(133): n is a, c, g, or t
gagacagagtctcactccgttgcccaggctgggagtgcagtggcacgatctcagctcactgcaacctccgcctcccaggttcaagcgattctcctgcctcagcctcctgagtagctaggataacaggtgtgcnccaccacacccggctaatttttgtatttttagcagagatggggtctcaccatgttggccaacctggtctcgaactcctgacctcaggtgatctccccgcctcggcctcccaaagtgctgggattacaggcgtgagccacgcgcccggcccccagtttatgtgcagataaggcttaggggaaaaaaaaaagcgtcctcttattgtcaatgcgattgcatttctgtagcaggaagtcagaactacttgatggaattttgaactatcagaaactgcaggagatcgaagataaacttggctttaaaaaatgtttcactgattagttcttcccacattcaaacactgcgaatctgtcctccccaggactgcttcatagacccctcctgccctttttccttcacttctagcacttcaatgacaaatgccacctgtcttgatgtcctcctctcttcatctgctagccctgtcctgccagtatctcattcttccctggcccctctttacctggcttcctgtgtatgcctgggtaccgcgcctgtgcagtgtctggtgctcaggaatactgcatcaaaaggcagaattaagcccctgagcagccaggacaaggtctgacaacacgttttaaatcgagtaattgttgctcgctataaatgtgactattcacactgctgcccagtcacattttcaagtagggttggttcccagttcagcaccagaatgaaaactgcattagtcaccacccttcagcatccccagcagtacagcacgctggggagaagggtggagggtggcgattatacaactctgcggtaacgccatgctcttaagaacagcctaattggaccacaaaagaagaatgaaaatggatgtagatgtctgggcatcggaacgatcactctgcatttgagagcataagctcccagtgcagggttgacttatgcgtccttaagtgtcaccgcctatgatggtgtttgtcacggtgagtattaaagcagggggtgacgctgcaccttgccccgggggcaggtggtgaagctacgtgcatccggagtcagcaggtctgaggtcattcctcgccccctcccgcccgctccccgacgtcacgccgactccgtcctcggcggtgaagacattcctcccgggccctgcgccctgcagcgtggtaaccccactgccggagaccgtgcgcaacccagctgctagacccccggcgttgagcggcaaaaccccgccccgagcggcttgccccgcccccggctcgtcactcatgcaactcacccaatggtggcggcggggggcggggctaggactgagggcgccgtgcgccgaagcttgtggcgtcaatgcgcccgccgtgtccatggagagaagctgaggcggccgaccttcggcccgaggcaccggggcgccgggacggcgaagatgtcggcttccttagtccgggcaactgtccgggctgtgagcaagaggaagctgcagcccacccgggcagccctcaccctgacaccttcagcagtaaacaagataaaacaacttcttaaagataagcctgagcatgtaggtgtaaaagttggtgtccgaaccaggggctgtaatggcctttcttatactctagaatatacaaagacaaaaggagattctgatgaagaagttattcaagatggagtcagagtattcatcgaaaagaaagcacagctaacacttttaggaacagaaatggactatgttgaagacaaattatccagtgagtttgtgttcaataacccaaacatcaaagggacttgtggctgtggagaaagctttaatatttgaaatctcaggactcttctggccgtaggttccaggaaagctcgtggaagctttggggctcactgcagaaatcatgtgactgtcacgtgctggaaaataaagtgatacatcttgaaaatgaatccagtgtgttggattccagaagaaatgatatttatattctctataggggacagaaaatgagaagccatcactctttttggatcatttaggtctcttgtatcctttgttttagaaccagtttcattaaagttgccttcctgggcacctgtttatccatttcct

SEQ ID NO: 436992 - DNA, 2085 bp, Homo sapiens
  misc_feature (133)..(133): n is a, c, g, or t
gagacagagtctcactccgttgcccaggctgggagtgcagtggcacgatctcagctcactgcaacctccgcctcccaggttcaagcgattctcctgcctcagcctcctgagtagctaggataacaggtgtgcnccaccacacccggctaatttttgtatttttagcagagatggggtctcaccatgttggccaacctggtctcgaactcctgacctcaggtgatctccccgcctcggcctcccaaagtgctgggattacaggcgtgagccacgcgcccggcccccagtttatgtgcagataaggcttaggggaaaaaaaaaagcgtcctcttattgtcaatgcgattgcatttctgtagcaggaagtcagaactacttgatggaattttgaactatcagaaactgcaggagatcgaagataaacttggctttaaaaaatgtttcactgattagttcttcccacattcaaacactgcgaatctgtcctccccaggactgcttcatagacccctcctgccctttttccttcacttctagcacttcaatgacaaatgccacctgtcttgatgtcctcctctcttcatctgctagccctgtcctgccagtatctcattcttccctggcccctctttacctggcttcctgtgtatgcctgggtaccgcgcctgtgcagtgtctggtgctcaggaatactgcatcaaaaggcagaattaagcccctgagcagccaggacaaggtctgacaacacgttttaaatcgagtaattgttgctcgctataaatgtgactattcacactgctgcccagtcacattttcaagtagggttggttcccagttcagcaccagaatgaaaactgcattagtcaccacccttcagcatccccagcagtacagcacgctggggagaagggtggagggtggcgattatacaactctgcggtaacgccatgctcttaagaacagcctaattggaccacaaaagaagaatgaaaatggatgtagatgtctgggcatcggaacgatcactctgcatttgagagcataagctcccagtgcagggttgacttatgcgtccttaagtgtcaccgcctatgatggtgtttgtcacggtgagtattaaagcagggggtgacgctgcaccttgccccgggggcaggtggtgaagctacgtgcatccggagtcagcaggtctgaggtcattcctcgccccctcccgcccgctccccgacgtcacgccgactccgtcctcggcggtgaagacattcctcccgggccctgcgccctgcagcgtggtaaccccactgccggagaccgtgcgcaacccagctgctagacccccggcgttgagcggcaaaaccccgccccgagcggcttgccccgcccccggctcgtcactcatgcaactcacccaatggtggcggcggggggcggggctaggactgagggcgccgtgcgccgaagcttgtggcgtcaatgcgcccgccgtgtccatggagagaagctgaggcggccgaccttcggcccgaggcaccggggcgccgggacggcgaagatgtcggcttccttagtccgggcaactgtccgggctgtgagcaagaggaagctgcagcccacccgggcagccctcaccctgacaccttcagcagtaaacaagataaaacaacttcttaaagataagcctgagcatgtaggtgtaaaagttggtgtccgaaccaggggctgtaatggcctttcttatactctagaatatacaaagacaaaaggagattctgatgaagaagttattcaagatggaattagagaataaaatcccagcacgatgttcctcactggagacaccagtccagctgaggacaatagagaagccacccttcctcaatgttcacttccagaattatatgcatgtattgagaattttaataaggagagcaagaaatcaaatcttctaaaaatgcatggtatttcacttaacgaagcacaggaagtacttgctagaaacctgaatgtcatgtcattcaccaggggcgctgatgtgagaggagatctccaacctgttatcaggtgcacagtggttaaaaaagagaa

SEQ ID NO: 436993 - DNA, 3121 bp, Homo sapiens
  misc_feature (133)..(133): n is a, c, g, or t
gagacagagtctcactccgttgcccaggctgggagtgcagtggcacgatctcagctcactgcaacctccgcctcccaggttcaagcgattctcctgcctcagcctcctgagtagctaggataacaggtgtgcnccaccacacccggctaatttttgtatttttagcagagatggggtctcaccatgttggccaacctggtctcgaactcctgacctcaggtgatctccccgcctcggcctcccaaagtgctgggattacaggcgtgagccacgcgcccggcccccagtttatgtgcagataaggcttaggggaaaaaaaaaagcgtcctcttattgtcaatgcgattgcatttctgtagcaggaagtcagaactacttgatggaattttgaactatcagaaactgcaggagatcgaagataaacttggctttaaaaaatgtttcactgattagttcttcccacattcaaacactgcgaatctgtcctccccaggactgcttcatagacccctcctgccctttttccttcacttctagcacttcaatgacaaatgccacctgtcttgatgtcctcctctcttcatctgctagccctgtcctgccagtatctcattcttccctggcccctctttacctggcttcctgtgtatgcctgggtaccgcgcctgtgcagtgtctggtgctcaggaatactgcatcaaaaggcagaattaagcccctgagcagccaggacaaggtctgacaacacgttttaaatcgagtaattgttgctcgctataaatgtgactattcacactgctgcccagtcacattttcaagtagggttggttcccagttcagcaccagaatgaaaactgcattagtcaccacccttcagcatccccagcagtacagcacgctggggagaagggtggagggtggcgattatacaactctgcggtaacgccatgctcttaagaacagcctaattggaccacaaaagaagaatgaaaatggatgtagatgtctgggcatcggaacgatcactctgcatttgagagcataagctcccagtgcagggttgacttatgcgtccttaagtgtcaccgcctatgatggtgtttgtcacggtgagtattaaagcagggggtgacgctgcaccttgccccgggggcaggtggtgaagctacgtgcatccggagtcagcaggtctgaggtcattcctcgccccctcccgcccgctccccgacgtcacgccgactccgtcctcggcggtgaagacattcctcccgggccctgcgccctgcagcgtggtaaccccactgccggagaccgtgcgcaacccagctgctagacccccggcgttgagcggcaaaaccccgccccgagcggcttgccccgcccccggctcgtcactcatgcaactcacccaatggtggcggcggggggcggggctaggactgagggcgccgtgcgccgaagcttgtggcgtcaatgcgcccgccgtgtccatggagagaagctgaggcggccgaccttcggcccgaggcaccggggcgccgggacggcgaagatgtcggcttccttagtccgggcaactgtccgggctgtgagcaagaggaagctgcagcccacccgggcagccctcaccctgacaccttcagcagtaaacaagataaaacaacttcttaaagataagcctgagcatgtaggtgtaaaagttggtgtccgaaccaggggctgtaatggcctttcttatactctagaatatacaaagacaaaaggagattctgatgaagaagttattcaagatggagtcagagtattcatcgaaaagaaagcacagctaacacttttaggaacagaaatggactatgttgaagacaaattatccagtgagtttgtgttcaataacccaaacatcaaagggacttgtggctgtggagaaagctttaatatttgaaatctcaggactcttctggccgtaggttccaggaaagctcgtggaagctttggggctcactgcagaaatcatgtgactgtcacgtgctggaaaataaagtgatacatcttgaaaatgaatccagtgtgttggattccagaagaaatgatatttatattctctataggggacagaaaatgagaagccatcactctttttggatcatttaggtctcttgtatcctttgttttagaaccagtttcattaaagttgccttcctgggcacctgtttatccatttcctgaactgtgtgcactccttagatcgctattgatggcttgatcatccctcagcatttctcccaaccagatcggtgactcctaaaatctgagacaggacatcgtgactgctggtagtaatatggtggtgcattgttttttccacccaaacttaacatagcctttttatacatttttatgaaaaatttcattgtcagctgcctcactgcatactctttaatagtaccaggcaaagattttcttcaactatagtacagattagttctgagtgatggtatcaaaaggtgagaaagacgtcatccgcctttttttaatccatttcttttgccaccctatatgtctgttcagagatgggctctcaagctgactttgattcttttagttgagaagtctcttaaagccatctagcccacctccatcaattccctatgtgaggaagcaaaaccccagggaagccaaagggctcctgtccaccctgacaccacaggccgggggagagtagggactctacccccctctccccttgtaggtgacacatgctctgccctctgaggcagtcagcgaaggcaaatggtctgacttctttatgtggtcaacattttgatagaatttctttataatttgatagagattatattatttttattttctctcgtggtagcttgtatccgtcctcagaaatgtgatgttagattctagaaatagtgatagctacttttaataaacacaaactgtgtgtctggcaccaggctaagtagtttaagttcatgtgctcatttactcttcacaatagcacaatggtgtaagaactattatcattcctactttctaagtgagaaaactgagaatagtaattgttcaacacgatctaatttgtaggtggtggagctgggactcagtt

SEQ ID NO: 436994 - DNA, 2268 bp, Homo sapiens
  misc_feature (133)..(133): n is a, c, g, or t
gagacagagtctcactccgttgcccaggctgggagtgcagtggcacgatctcagctcactgcaacctccgcctcccaggttcaagcgattctcctgcctcagcctcctgagtagctaggataacaggtgtgcnccaccacacccggctaatttttgtatttttagcagagatggggtctcaccatgttggccaacctggtctcgaactcctgacctcaggtgatctccccgcctcggcctcccaaagtgctgggattacaggcgtgagccacgcgcccggcccccagtttatgtgcagataaggcttaggggaaaaaaaaaagcgtcctcttattgtcaatgcgattgcatttctgtagcaggaagtcagaactacttgatggaattttgaactatcagaaactgcaggagatcgaagataaacttggctttaaaaaatgtttcactgattagttcttcccacattcaaacactgcgaatctgtcctccccaggactgcttcatagacccctcctgccctttttccttcacttctagcacttcaatgacaaatgccacctgtcttgatgtcctcctctcttcatctgctagccctgtcctgccagtatctcattcttccctggcccctctttacctggcttcctgtgtatgcctgggtaccgcgcctgtgcagtgtctggtgctcaggaatactgcatcaaaaggcagaattaagcccctgagcagccaggacaaggtctgacaacacgttttaaatcgagtaattgttgctcgctataaatgtgactattcacactgctgcccagtcacattttcaagtagggttggttcccagttcagcaccagaatgaaaactgcattagtcaccacccttcagcatccccagcagtacagcacgctggggagaagggtggagggtggcgattatacaactctgcggtaacgccatgctcttaagaacagcctaattggaccacaaaagaagaatgaaaatggatgtagatgtctgggcatcggaacgatcactctgcatttgagagcataagctcccagtgcagggttgacttatgcgtccttaagtgtcaccgcctatgatggtgtttgtcacggtgagtattaaagcagggggtgacgctgcaccttgccccgggggcaggtggtgaagctacgtgcatccggagtcagcaggtctgaggtcattcctcgccccctcccgcccgctccccgacgtcacgccgactccgtcctcggcggtgaagacattcctcccgggccctgcgccctgcagcgtggtaaccccactgccggagaccgtgcgcaacccagctgctagacccccggcgttgagcggcaaaaccccgccccgagcggcttgccccgcccccggctcgtcactcatgcaactcacccaatggtggcggcggggggcggggctaggactgagggcgccgtgcgccgaagcttgtggcgtcaatgcgcccgccgtgtccatggagagaagctgaggcggccgaccttcggcccgaggcaccggggcgccgggacggcgaagatgtcggcttccttagtccgggcaactgtccgggctgtgagcaagaggaagctgcagcccacccgggcagccctcaccctgacaccttcagcagtaaacaagataaaacaacttcttaaagataagcctgagcatgtaggtgtaaaagttggtgtccgaaccaggggctgtaatggcctttcttatactctagaatatacaaagacaaaaggagattctgatgaagaagttattcaagatgagtctcactctgtcgccaggctggagtgcagtggcacaatctcagcttaccgcaacctccgcctcccgggttcaagtgattcctttgtctcggcctcctgagtagctgggactacaggcatgcgccgccacgcctggctaattttttgtatttttagtagagatggggtttcaccatgttggccaggatggtctcaatctcctgacctcgagatcagccctcctcggcctcccaaagtggtgggattacaggcatgagccactgcacccagctgaccttgaacaaattacttctctgtgccttcatcgtagaaaacaatttcttagaatttgtcgctaggattcactgagttaacacacacatagaacagctcctagcacattataagcagctaaatacttattagctactacttataattgggtacccatgtgacctggagagtgggcttcattcctcatactccgggtctgca

SEQ ID NO: 436995 - DNA, 1197 bp, Homo sapiens
gaaggtggcagagcagcctccccaactaagcctgggtcgccgcctcggtgaagggccgcggggccgagcgcgggaagtggcgtccagtcggtttttggcaggcgagagccagagcgtgagaaccctcccacggcgaggccaagccctgagactggactagcaaggtcgtgagtctctctgtcagctctccgcagcgaaggggcgcggggggcggggaccgtgcccgaccgtgccagctcccgccccggaagcggaagtgcaagcactgcggggtcctgtccagtgtgagcccgacccgagctccagtagttccgcccgctggtcatcgcgccctttcccctgccggtgtcctgctcgccgtccccgccatgctgtctctagactttttggacgatgtgcggcggatgaacaagcggcagctctattatcaagtcctaaattttggaatgattgtctcatcggcactaatgatctggaaggggttaatggtaataactggaagtgaaagtccgattgtagtggtgctcagtggcagcatggaacctgcatttcatagaggagatcttctctttctaacaaatcgagttgaagatcccatacgagtgggagaaattgttgtttttaggatagaaggaagagagattcctatagttcaccgagtcttgaagattcatgaaaagcaaaatgggcatatcaagtttttgaccaaaggagataataatgcggttgatgaccgaggcctctataaacaaggacaacattggctagagaaaaaagatgttgtggggagagccaggggatttgttccttatattggaattgtgacgatcctcatgaatgactatcctaaatttaagtatgcagttctctttttgctgggtttattcgtgctggttcatcgtgagtaagaagcctgccttgctgttcctgggaagatgccatagttttcgttactggatgtttggagtagatactggtctgtgattggtggaatggagaacacacgtgttggtgcttctgggtagcactggtttgcattagtttatgtttccatgccagagtttgtgtgggcgggcgcatgtgcaccacagagtgcactcgaggggactttcagtcacaggatttcataattgtcattgtcacactttcaaatttttgtacatcagtgaatttttttatattaaaaggttgagccaa

SEQ ID NO: 436996 - DNA, 1009 bp, Homo sapiens
  misc_feature (23)..(23): n is a, c, g, or t
  misc_feature (69)..(69): n is a, c, g, or t
  misc_feature (72)..(73): n is a, c, g, or t
  misc_feature (76)..(78): n is a, c, g, or t
tctgtatctattgttggattagntgctgtttttcatagtgacgagaagaaacaagccttatatggtacnctnnatnnngttagtgacgatcctcatgaatgactatcctaaatttaagtatgcagttctctttttgctgggtttattcgtgctggttcatcgtgagtaagaagcctgccttgctgttcctgggaagatgccatagttttcgttactggatgtttggagtagatactggtctgtgattggtggaatggagaacacacgtgttggtgcttctgggtagcactggtttgcattagtttatgtttccatgccagagtttgtgtgggcgggcgcatgtgcaccacagagtgcactcgaggggactttcagtcacaggatttcataattgtcattgtcacactttcaaatttttgtacatcagtgaatttttttatattaaaaggttgagccaaagcccccagtgtttgtattttgaagccaagcttcacttctaaagtgcctacagagacttgtaaatgaaaatgcagctctgcacgagtttgaaaccgtcatacctccttctattaggaatggcatatactgaggtggtcgtaagtcttaacttctaaaattttaaataaaagactttgcacattgaaaaaaaaaaaaaagaaaacaaaaaaaaaaagaaaaaaaaaagaaagaaaaataacgaaaaaagataaaaacaaacacacggggggggcggggcggcgtagagaaatactcccccaggggggcggcgccgcagcgaattcatcagcggcaccaccaacaggtctttttgttaaaaaaaaggggggcccccactataggaaggcgccgggcattaaaaatgaacagcagaacggagggccgggggctattaaaaccagcgggcgggggggggacaaaaaccgctgctacggggggggcctcttggagggagcgaacaccccacacatggcggggggggaaacaaatgtggggcagaaaacatacgcaa

SEQ ID NO: 436997 - DNA, 498 bp, Homo sapiens
  misc_feature (16)..(16): n is a, c, g, or t
  misc_feature (48)..(48): n is a, c, g, or t
  misc_feature (50)..(51): n is a, c, g, or t
tagtcggtaccgacgntctctctgtggggagagccagggattttatcngnnaacagttcagtggaggacaggaattatttgttccttatattggaattgtgacgatcctcatgaatgactatcctaaatttaagtatgcagttctctttttgctgggtttattcgtgctggttcatcgtgagtaagaagcctgccttgctgttcctgggaagatgccatagttttcgttactggatgtttggagtagatactggtctgtgattggtggaatggagaacacacgtgttggtgcttctgggtagcactggtttgcattagtttatgtttccatgccagagtttgtgtgggcgggcgcatgtgcaccacagagtgcactcgaggggactttcagtcacaggatttcataattgtcattgtcacactttcaaatttttgtacatcagtgaatttttttatattaaaaggttgagccaaacagagaccccacagagtgagcgt

SEQ ID NO: 436998 - DNA, 458 bp, Homo sapiens
  misc_feature (23)..(23): n is a, c, g, or t
  misc_feature (69)..(69): n is a, c, g, or t
  misc_feature (72)..(73): n is a, c, g, or t
  misc_feature (76)..(78): n is a, c, g, or t
tctgtatctattgttggattagntgctgtttttcatagtgacgagaagaaacaagccttatatggtacnctnnatnnngttagtgacgatcctcatgaatgactatcctaaatttaagtatgcagttctctttttgctgggtttattcgtgctggttcatcgtgagtaagaagcctgccttgctgttcctgggaagatgccatagttttcgttactggatgtttggagtagatactggtctgtgattggtggaatggagaacacacgtgttggtgcttctgggtagcactggtttgcattagtttatgtttccatgccagagtttgtgtgggcgggcgcatgtgcaccacagagtgcactcgaggggactttcagtcacaggatttcataattgtcattgtcacactttcaaatttttgtacatcagtgaatttttttatattaaaaggttgagccaa

SEQ ID NO: 436999 - DNA, 560 bp, Homo sapiens
gttatgatgataaacctagcccctagcactgtatcaacatgtagcattagagtcaccacctggagatctaagaccttggctctatctggtgctggttctgccacacagaaaccatgtaccttgggcatgatcatctgtttcctcatctctaaaatggtgatattcctaactttcctatcacttgggcttttgcaaggatcaaatagggcagtatatagaaatggactttgtgaattgaaaattagtattctatagaagatattgataatattcagtgagtgacaacagctgctttacatcggaaattctgtgataatcagttttttgtttgttttagatttgttccttatattggaattgtgacgatcctcatgaatgactatcctaaatttaaggtaagagtctgtattatttgttttattaaaaaatgtaatcttttgggccaggcacagtggctcaagcctgtaatcccagcactctgggaggccgaggtgagtggatcgcttgagcccaggagttcaagaccagcctgggcaacatagcgaaaccccgtctctatt

SEQ ID NO: 437000 - DNA, 1884 bp, Homo sapiens
  misc_feature (427)..(427): n is a, c, g, or t
  misc_feature (516)..(516): n is a, c, g, or t
gaaggtggcagagcagcctccccaactaagcctgggtcgccgcctcggtgaagggccgcggggccgagcgcgggaagtggcgtccagtcggtttttggcaggcgagagccagagcgtgagaaccctcccacggcgaggccaagccctgagactggactagcaaggtcgtgagtctctctgtcagctctccgcagcgaaggggcgcggggggcggggaccgtgcccgaccgtgccagctcccgccccggaagcggaagtgcaagcactgcggggtcctgtccagtgtgagcccgacccgagctccagtagttccgcccgctggtcatcgcgccctttcccctgccggtgtcctgctcgccgtccccgccatgctgtctctagactttttggacgatgtgcggcggatgaacaagcggcaggtacaatnagagaaatgcaaagatagttaagaaagactcggccttcaaggagcctaaatgtgtagaaaaggactaaggcaaaacaataacttttttnagctcttgccatgtgtgaagcactttatacacctgtaagctctattatcaagtcctaaattttggaatgattgtctcatcggcactaatgatctggaaggggttaatggtaataactggaagtgaaagtccgattgtagtggtgctcagtggcagcatggaacctgcatttcatagaggagatcttctctttctaacaaatcgagttgaagatcccatacgagtgggagaaattgttgtttttaggatagaaggaagagagattcctatagttcaccgagtcttgaagattcatgaaaagcaaaatgggcatatcaagtttttgaccaaaggagataataatgcggttgatgaccgaggcctctataaacaaggacaacattggctagagaaaaaagatgttgtggggagagccaggggatttgttccttatattggaattgtgacgatcctcatgaatgactatcctaaatttaagtatgcagttctctttttgctgggtttattcgtgctggttcatcgtgagtaagaagcctgccttgctgttcctgggaagatgccatagttttcgttactggatgtttggagtagatactggtctgtgattggtggaatggagaacacacgtgttggtgcttctgggtagcactggtttgcattagtttatgtttccatgccagagtttgtgtgggcgggcgcatgtgcaccacagagtgcactcgaggggactttcagtcacaggatttcataattgtcattgtcacactttcaaatttttgtacatcagtgaatttttttatattaaaaggttgagccaaagcccccagtgtttgtattttgaagccaagcttcacttctaaagtgcctacagagacttgtaaatgaaaatgcagctctgcacgagtttgaaaccgtcatacctccttctattaggaatggcatatactgaggtggtcgtaagtcttaacttctaaaattttaaataaaagactttgcacattgaaaaaaaaaaaaaagaaaacaaaaaaaaaaagaaaaaaaaaagaaagaaaaataacgaaaaaagataaaaacaaacacacggggggggcggggcggcgtagagaaatactcccccaggggggcggcgccgcagcgaattcatcagcggcaccaccaacaggtctttttgttaaaaaaaaggggggcccccactataggaaggcgccgggcattaaaaatgaacagcagaacggagggccgggggctattaaaaccagcgggcgggggggggacaaaaaccgctgctacggggggggcctcttggagggagcgaacaccccacacatggcggggggggaaacaaatgtggggcagaaaacatacgcaa

SEQ ID NO: 437001 - DNA, 1562 bp, Homo sapiens
gaaggtggcagagcagcctccccaactaagcctgggtcgccgcctcggtgaagggccgcggggccgagcgcgggaagtggcgtccagtcggtttttggcaggcgagagccagagcgtgagaaccctcccacggcgaggccaagccctgagactggactagcaaggtcgtgagtctctctgtcagctctccgcagcgaaggggcgcggggggcggggaccgtgcccgaccgtgccagctcccgccccggaagcggaagtgcaagcactgcggggtcctgtccagtgtgagcccgacccgagctccagtagttccgcccgctggtcatcgcgccctttcccctgccggtgtcctgctcgccgtccccgccatgctgtctctagactttttggacgatgtgcggcggatgaacaagcggcagctctattatcaagtcctaaattttggaatgattgtctcatcggcactaatgatctggaaggggttaatggtaataactggaagtgaaagtccgattgtagtggtgctcagtggcagcatggaacctgcatttcatagaggagatcttctctttctaacaaatcgagttgaagatcccatacgagtgggagaaattgttgtttttaggatagaaggaagagagattcctatagttcaccgagtcttgaagattcatgaaaagcaaaatgggcatatcaagtttttgaccaaaggagataataatgcggttgatgaccgaggcctctataaacaaggacaacattggctagagaaaaaagatgttgtggggagagccaggggatttgttccttatattggaattgtgacgatcctcatgaatgactatcctaaatttaagtatgcagttctctttttgctgggtttattcgtgctggttcatcgtgagtaagaagcctgccttgctgttcctgggaagatgccatagttttcgttactggatgtttggagtagatactggtctgtgattggtggaatggagaacacacgtgttggtgcttctgggtagcactggtttgcattagtttatgtttccatgccagagtttgtgtgggcgggcgcatgtgcaccacagagtgcactcgaggggactttcagtcacaggatttcataattgtcattgtcacactttcaaatttttgtacatcagtgaatttttttatattaaaaggttgagccaaaaaaaaaaaaaagaaaacaaaaaaaaaaagaaaaaaaaaagaaagaaaaataacgaaaaaagataaaaacaaacacacggggggggcggggcggcgtagagaaatactcccccaggggggcggcgccgcagcgaattcatcagcggcaccaccaacaggtctttttgttaaaaaaaaggggggcccccactataggaaggcgccgggcattaaaaatgaacagcagaacggagggccgggggctattaaaaccagcgggcgggggggggacaaaaaccgctgctacggggggggcctcttggagggagcgaacaccccacacatggcggggggggaaacaaatgtggggcagaaaacatacgcaa

SEQ ID NO: 437002 - DNA, 1123 bp, Homo sapiens
cgctgatagaggatccccatcgcgcaatcacgtagagtctgaagatcatgaaaagcaaaatgggcatatcaagtttttgaccaaaggagataataatgcggttgatgaccgaggcctctataaacaaggacaacattggctagagaaaaaagatgttgtggggagagccaggggatttgttccttatattggaattgtgacgatcctcatgaatgactatcctaaatttaagtatgcagttctctttttgctgggtttattcgtgctggttcatcgtgagtaagaagcctgccttgctgttcctgggaagatgccatagttttcgttactggatgtttggagtagatactggtctgtgattggtggaatggagaacacacgtgttggtgcttctgggtagcactggtttgcattagtttatgtttccatgccagagtttgtgtgggcgggcgcatgtgcaccacagagtgcactcgaggggactttcagtcacaggatttcataattgtcattgtcacactttcaaatttttgtacatcagtgaatttttttatattaaaaggttgagccaaagcccccagtgtttgtattttgaagccaagcttcacttctaaagtgcctacagagacttgtaaatgaaaatgcagctctgcacgagtttgaaaccgtcatacctccttctattaggaatggcatatactgaggtggtcgtaagtcttaacttctaaaattttaaataaaagactttgcacattgaaaaaaaaaaaaaagaaaacaaaaaaaaaaagaaaaaaaaaagaaagaaaaataacgaaaaaagataaaaacaaacacacggggggggcggggcggcgtagagaaatactcccccaggggggcggcgccgcagcgaattcatcagcggcaccaccaacaggtctttttgttaaaaaaaaggggggcccccactataggaaggcgccgggcattaaaaatgaacagcagaacggagggccgggggctattaaaaccagcgggcgggggggggacaaaaaccgctgctacggggggggcctcttggagggagcgaacaccccacacatggcggggggggaaacaaatgtggggcagaaaacatacgcaa

SEQ ID NO: 437003 - DNA, 1786 bp, Homo sapiens
gaaggtggcagagcagcctccccaactaagcctgggtcgccgcctcggtgaagggccgcggggccgagcgcgggaagtggcgtccagtcggtttttggcaggcgagagccagagcgtgagaaccctcccacggcgaggccaagccctgagactggactagcaaggtcgtgagtctctctgtcagctctccgcagcgaaggggcgcggggggcggggaccgtgcccgaccgtgccagctcccgccccggaagcggaagtgcaagcactgcggggtcctgtccagtgtgagcccgacccgagctccagtagttccgcccgctggtcatcgcgccctttcccctgccggtgtcctgctcgccgtccccgccatgctgtctctagactttttggacgatgtgcggcggatgaacaagcggcagctctattatcaagtcctaaattttggaatgattgtctcatcggcactaatgatctggaaggggttaatggtaataactggaagtgaaagtccgattgtagtggtgctcagtggcagcatggaacctgcatttcatagaggagatcttctctttctaacaaatcgagttgaagatcccatacgagtgggagaaattgttgtttttaggatagaaggaagagagattcctatagttcaccgagtcttgaagattcatgaaaagcaaaatgggcatatcaagtttttgaccaaaggagataataatgcggttgatgaccgaggcctctataaacaaggacaacattggctagagaaaaaagatgttgtggggagagccaggggattttatcaggagaacagttcagtggaggacaggaattatttgttccttatattggaattgtgacgatcctcatgaatgactatcctaaatttaagtatgcagttctctttttgctgggtttattcgtgctggttcatcgtgagtaagaagcctgccttgctgttcctgggaagatgccatagttttcgttactggatgtttggagtagatactggtctgtgattggtggaatggagaacacacgtgttggtgcttctgggtagcactggtttgcattagtttatgtttccatgccagagtttgtgtgggcgggcgcatgtgcaccacagagtgcactcgaggggactttcagtcacaggatttcataattgtcattgtcacactttcaaatttttgtacatcagtgaatttttttatattaaaaggttgagccaaagcccccagtgtttgtattttgaagccaagcttcacttctaaagtgcctacagagacttgtaaatgaaaatgcagctctgcacgagtttgaaaccgtcatacctccttctattaggaatggcatatactgaggtggtcgtaagtcttaacttctaaaattttaaataaaagactttgcacattgaaaaaaaaaaaaaagaaaacaaaaaaaaaaagaaaaaaaaaagaaagaaaaataacgaaaaaagataaaaacaaacacacggggggggcggggcggcgtagagaaatactcccccaggggggcggcgccgcagcgaattcatcagcggcaccaccaacaggtctttttgttaaaaaaaaggggggcccccactataggaaggcgccgggcattaaaaatgaacagcagaacggagggccgggggctattaaaaccagcgggcgggggggggacaaaaaccgctgctacggggggggcctcttggagggagcgaacaccccacacatggcggggggggaaacaaatgtggggcagaaaacatacgcaa

SEQ ID NO: 437004 - DNA, 1286 bp, Homo sapiens
gttatgatgataaacctagcccctagcactgtatcaacatgtagcattagagtcaccacctggagatctaagaccttggctctatctggtgctggttctgccacacagaaaccatgtaccttgggcatgatcatctgtttcctcatctctaaaatggtgatattcctaactttcctatcacttgggcttttgcaaggatcaaatagggcagtatatagaaatggactttgtgaattgaaaattagtattctatagaagatattgataatattcagtgagtgacaacagctgctttacatcggaaattctgtgataatcagttttttgtttgttttagatttgttccttatattggaattgtgacgatcctcatgaatgactatcctaaatttaagtatgcagttctctttttgctgggtttattcgtgctggttcatcgtgagtaagaagcctgccttgctgttcctgggaagatgccatagttttcgttactggatgtttggagtagatactggtctgtgattggtggaatggagaacacacgtgttggtgcttctgggtagcactggtttgcattagtttatgtttccatgccagagtttgtgtgggcgggcgcatgtgcaccacagagtgcactcgaggggactttcagtcacaggatttcataattgtcattgtcacactttcaaatttttgtacatcagtgaatttttttatattaaaaggttgagccaaagcccccagtgtttgtattttgaagccaagcttcacttctaaagtgcctacagagacttgtaaatgaaaatgcagctctgcacgagtttgaaaccgtcatacctccttctattaggaatggcatatactgaggtggtcgtaagtcttaacttctaaaattttaaataaaagactttgcacattgaaaaaaaaaaaaaagaaaacaaaaaaaaaaagaaaaaaaaaagaaagaaaaataacgaaaaaagataaaaacaaacacacggggggggcggggcggcgtagagaaatactcccccaggggggcggcgccgcagcgaattcatcagcggcaccaccaacaggtctttttgttaaaaaaaaggggggcccccactataggaaggcgccgggcattaaaaatgaacagcagaacggagggccgggggctattaaaaccagcgggcgggggggggacaaaaaccgctgctacggggggggcctcttggagggagcgaacaccccacacatggcggggggggaaacaaatgtggggcagaaaacatacgcaa

SEQ ID NO: 437005 - DNA, 1714 bp, Homo sapiens
gaaggtggcagagcagcctccccaactaagcctgggtcgccgcctcggtgaagggccgcggggccgagcgcgggaagtggcgtccagtcggtttttggcaggcgagagccagagcgtgagaaccctcccacggcgaggccaagccctgagactggactagcaaggtcgtgagtctctctgtcagctctccgcagcgaaggggcgcggggggcggggaccgtgcccgaccgtgccagctcccgccccggaagcggaagtgcaagcactgcggggtcctgtccagtgtgagcccgacccgagctccagtagttccgcccgctggtcatcgcgccctttcccctgccggtgtcctgctcgccgtccccgccatgctgtctctagactttttggacgatgtgcggcggatgaacaagcggcagctctattatcaagtcctaaattttggaatgattgtctcatcggcactaatgatctggaaggggttaatggtaataactggaagtgaaagtccgattgtagtggtgctcagtggcagcatggaacctgcatttcatagaggagatcttctctttctaacaaatcgagttgaagatcccatacgagtgggagaaattgttgtttttaggatagaaggaagagagattcctatagttcaccgagtcttgaagattcatgaaaagcaaaatgggcatatcaagtttttgaccaaaggagataataatgcggttgatgaccgaggcctctataaacaaggacaacattggctagagaaaaaagatgttgtggggagagccaggggatttgttccttatattggaattgtgacgatcctcatgaatgactatcctaaatttaagtatgcagttctctttttgctgggtttattcgtgctggttcatcgtgagtaagaagcctgccttgctgttcctgggaagatgccatagttttcgttactggatgtttggagtagatactggtctgtgattggtggaatggagaacacacgtgttggtgcttctgggtagcactggtttgcattagtttatgtttccatgccagagtttgtgtgggcgggcgcatgtgcaccacagagtgcactcgaggggactttcagtcacaggatttcataatttgaatttttttatattaaaaggttgagccaaagcccccagtgtttgtattttgaagccaagcttcacttctaaagtgcctacagagacttgtaaatgaaaatgcagctctgcacgagtttgaaaccgtcatacctccttctattaggaatggcatatactgaggtggtcgtaagtcttaacttctaaaattttaaataaaagactttgcacattgaaaaaaaaaaaaaagaaaacaaaaaaaaaaagaaaaaaaaaagaaagaaaaataacgaaaaaagataaaaacaaacacacggggggggcggggcggcgtagagaaatactcccccaggggggcggcgccgcagcgaattcatcagcggcaccaccaacaggtctttttgttaaaaaaaaggggggcccccactataggaaggcgccgggcattaaaaatgaacagcagaacggagggccgggggctattaaaaccagcgggcgggggggggacaaaaaccgctgctacggggggggcctcttggagggagcgaacaccccacacatggcggggggggaaacaaatgtggggcagaaaacatacgcaa

SEQ ID NO: 437006 - DNA, 1248 bp, Homo sapiens
gaaggtggcagagcagcctccccaactaagcctgggtcgccgcctcggtgaagggccgcggggccgagcgcgggaagtggcgtccagtcggtttttggcaggcgagagccagagcgtgagaaccctcccacggcgaggccaagccctgagactggactagcaaggtcgtgagtctctctgtcagctctccgcagcgaaggggcgcggggggcggggaccgtgcccgaccgtgccagctcccgccccggaagcggaagtgcaagcactgcggggtcctgtccagtgtgagcccgacccgagctccagtagttccgcccgctggtcatcgcgccctttcccctgccggtgtcctgctcgccgtccccgccatgctgtctctagactttttggacgatgtgcggcggatgaacaagcggcagctctattatcaagtcctaaattttggaatgattgtctcatcggcactaatgatctggaaggggttaatggtaataactggaagtgaaagtccgattgtagtggtgctcagtggcagcatggaacctgcatttcatagaggagatcttctctttctaacaaatcgagttgaagatcccatacgagtgggagaaattgttgtttttaggatagaaggaagagagattcctatagttcaccgagtcttgaagattcatgaaaagcaaaatgggcatatcaagtttttgaccaaaggagataataatgcggttgatgaccgaggcctctataaacaaggacaacattggctagagaaaaaagatgttgtggggagagccaggggatttgttccttatattggaattgtgacgatcctcatgaatgactatcctaaatttaagtatgcagttctctttttgctgggtttattcgtgctggttcatcgtgagtaagaagcctgccttgctgttcctgggaagatgccatagttttcgttactggatgtttggagtagatactggtctgtgattggtggaatggagaacacacgtgttggtgcttctgggtagcactggtttgcattagtttatgtttccatgccagagtttgtgtgggcgggcgcatgtgcaccacagagtgcactcgaggggactttcagtcacaggatttcataattgtgtctaactgatgatcctcatgaatgactatcctatatattagtatgcagtgctcttatggctgggtttattcgtgctggtacatcgtgagtaagaagcctgccttgctgttcct

SEQ ID NO: 437007 - DNA, 979 bp, Homo sapiens
  misc_feature (945)..(945): n is a, c, g, or t
gaaggtggcagagcagcctccccaactaagcctgggtcgccgcctcggtgaagggccgcggggccgagcgcgggaagtggcgtccagtcggtttttggcaggcgagagccagagcgtgagaaccctcccacggcgaggccaagccctgagactggactagcaaggtcgtgagtctctctgtcagctctccgcagcgaaggggcgcggggggcggggaccgtgcccgaccgtgccagctcccgccccggaagcggaagtgcaagcactgcggggtcctgtccagtgtgagcccgacccgagctccagtagttccgcccgctggtcatcgcgccctttcccctgccggtgtcctgctcgccgtccccgccatgctgtctctagactttttggacgatgtgcggcggatgaacaagcggcagctctattatcaagtcctaaattttggaatgattgtctcatcggcactaatgatctggaaggggttaatggtaataactggaagtgaaagtccgattgtagtggtgctcagtggcagcatggaacctgcatttcatagaggagatcttctctttctaacaaatcgagttgaagatcccatacgagtgggagaaattgttgtttttaggatagaaggaagagagattcctatagttcaccgagtcttgaagattcatgaaaagcaaaatgggcatatcaagtttttgaccaaaggagataataatgcggttgatgaccgaggcctctataaacaaggacaacattggctagagaaaaaagatgttgtggggagagccaggggatttgttccttatattggaattgtgacgatcctcatgaatgactatcctaaatttaagtatgcagttctctttttgctgggtttattcgtgctggttcatcgtgagtaagaagcctgccttgctgttcctgggaagatgccataanagccgccgatgaggatcctctagagctgaccgca

SEQ ID NO: 437008 - DNA, 1080 bp, Homo sapiens
tctgtcgcccaggcttgagtgcagtggcgtgatctcggctcactgcaacctccgcctcctgggttcaagtgattctcctgcctcagcctcctgagtagctgggactacaggcacccaccaccatgcccagcttatttttgtatttttagtaaagacagggtttcgccatgttggccaggctggtctcgaacttctgacctcaggtgatccgcccaccttggcctcccaaagtgctgggattacaggcgtgagccaccgcgcctggcccgtctcttgttttcgttactggatgtttggagtagatactggtctgtgattggtggaatggagaacacacgtgttggtgcttctgggtagcactggtttgcattagtttatgtttccatgccagagtttgtgtgggcgggcgcatgtgcaccacagagtgcactcgaggggactttcagtcacaggatttcataattgtcattgtcacactttcaaatttttgtacatcagtgaatttttttatattaaaaggttgagccaaagcccccagtgtttgtattttgaagccaagcttcacttctaaagtgcctacagagacttgtaaatgaaaatgcagctctgcacgagtttgaaaccgtcatacctccttctattaggaatggcatatactgaggtggtcgtaagtcttaacttctaaaattttaaataaaagactttgcacattgaaaaaaaaaaaaaagaaaacaaaaaaaaaaagaaaaaaaaaagaaagaaaaataacgaaaaaagataaaaacaaacacacggggggggcggggcggcgtagagaaatactcccccaggggggcggcgccgcagcgaattcatcagcggcaccaccaacaggtctttttgttaaaaaaaaggggggcccccactataggaaggcgccgggcattaaaaatgaacagcagaacggagggccgggggctattaaaaccagcgggcgggggggggacaaaaaccgctgctacggggggggcctcttggagggagcgaacaccccacacatggcggggggggaaacaaatgtggggcagaaaacatacgcaa

SEQ ID NO: 437009 - DNA, 919 bp, Homo sapiens
tgaataatatagtaaatagagattgcatttaattaggagagtcattcttacgattgtaacgtaaataggataccgggctcgaatttgtagtgatgatcttatatctttgcggaggttttcgttactggatgtttggagtagatactggtctgtgattggtggaatggagaacacacgtgttggtgcttctgggtagcactggtttgcattagtttatgtttccatgccagagtttgtgtgggcgggcgcatgtgcaccacagagtgcactcgaggggactttcagtcacaggatttcataattgtcattgtcacactttcaaatttttgtacatcagtgaatttttttatattaaaaggttgagccaaagcccccagtgtttgtattttgaagccaagcttcacttctaaagtgcctacagagacttgtaaatgaaaatgcagctctgcacgagtttgaaaccgtcatacctccttctattaggaatggcatatactgaggtggtcgtaagtcttaacttctaaaattttaaataaaagactttgcacattgaaaaaaaaaaaaaagaaaacaaaaaaaaaaagaaaaaaaaaagaaagaaaaataacgaaaaaagataaaaacaaacacacggggggggcggggcggcgtagagaaatactcccccaggggggcggcgccgcagcgaattcatcagcggcaccaccaacaggtctttttgttaaaaaaaaggggggcccccactataggaaggcgccgggcattaaaaatgaacagcagaacggagggccgggggctattaaaaccagcgggcgggggggggacaaaaaccgctgctacggggggggcctcttggagggagcgaacaccccacacatggcggggggggaaacaaatgtggggcagaaaacatacgcaa

SEQ ID NO: 437010 - DNA, 503 bp, Homo sapiens
ctgttccttgacttgatgagccatttttccttctaaatgagttgaacatataaggtcatcttggctgttatctttataaatggcagaggaagatgatccagttctcatttgcatatctgaatatgtttagtgttttcagatgaagtgagaataagggcattgttttaaagttcattcttttatattctgtttgtcatttgaaattttaaaaggttaaggaattagtaacactgaccttttcaagatttaagcttctttgactagtgatacttgaaatggaactagttagtgaaggttaataactaaaaaaaaatcctttggcgtaactttttagtctgaggaaaccatattttgagaacaatacacatttctgttgatatagttgttagggtattgagtatactcccaaagtgatattttttattttgttgaatatctaattttgaaagtacatttaatctcatactttctttttgctgttatattcttctttcccttccagt

SEQ ID NO: 437011 - DNA, 1748 bp, Homo sapiens
gaaggtggcagagcagcctccccaactaagcctgggtcgccgcctcggtgaagggccgcggggccgagcgcgggaagtggcgtccagtcggtttttggcaggcgagagccagagcgtgagaaccctcccacggcgaggccaagccctgagactggactagcaaggtcgtgagtctctctgtcagctctccgcagcgaaggggcgcggggggcggggaccgtgcccgaccgtgccagctcccgccccggaagcggaagtgcaagcactgcggggtcctgtccagtgtgagcccgacccgagctccagtagttccgcccgctggtcatcgcgccctttcccctgccggtgtcctgctcgccgtccccgccatgctgtctctagactttttggacgatgtgcggcggatgaacaagcggcagctctattatcaagtcctaaattttggaatgattgtctcatcggcactaatgatctggaaggggttaatggtaataactggaagtgaaagtccgattgtagtggtgctcagtggcagcatggaacctgcatttcatagaggagatcttctctttctaacaaatcgagttgaagatcccatacgagtgggagaaattgttgtttttaggatagaaggaagagagattcctatagttcaccgagtcttgaagattcatgaaaagcaaaatgggcatatcaagtttttgaccaaaggagataataatgcggttgatgaccgaggcctctataaacaaggacaacattggctagagaaaaaagatgttgtggggagagccaggggatttgttccttatattggaattgtgacgatcctcatgaatgactatcctaaatttaagtatgcagttctctttttgctgggtttattcgtgctggttcatcgtgagtaagaagcctgccttgctgttcctgggaagatgccatagttttcgttactggatgtttggagtagatactggtctgtgattggtggaatggagaacacacgtgttggtgcttctgggtagcactggtttgcattagtttatgtttccatgccagagtttgtgtgggcgggcgcatgtgcaccacagagtgcactcgaggggactttcagtcacaggatttcataattgtcattgtcacactttcaaatttttgtacatcagtgaatttttttatattaaaaggttgagccaaagcccccagtgtttgtattttgaagccaagcttcacttctaaagtgcctacagagacttgtaaatgaaaatgcagctctgcacgagtttgaaaccgtcatacctccttctattaggaatggcatatactgaggtggtcgtaagtcttaacttctaaaattttaaataaaagactttgcacattgaaaaaaaaaaaaaagaaaacaaaaaaaaaaagaaaaaaaaaagaaagaaaaataacgaaaaaagataaaaacaaacacacggggggggcggggcggcgtagagaaatactcccccaggggggcggcgccgcagcgaattcatcagcggcaccaccaacaggtctttttgttaaaaaaaaggggggcccccactataggaaggcgccgggcattaaaaatgaacagcagaacggagggccgggggctattaaaaccagcgggcgggggggggacaaaaaccgctgctacggggggggcctcttggagggagcgaacaccccacacatggcggggggggaaacaaatgtggggcagaaaacatacgcaa

SEQ ID NO: 437012 - DNA, 1598 bp, Homo sapiens
gaaggtggcagagcagcctccccaactaagcctgggtcgccgcctcggtgaagggccgcggggccgagcgcgggaagtggcgtccagtcggtttttggcaggcgagagccagagcgtgagaaccctcccacggcgaggccaagccctgagactggactagcaaggtcgtgagtctctctgtcagctctccgcagcgaaggggcgcggggggcggggaccgtgcccgaccgtgccagctcccgccccggaagcggaagtgcaagcactgcggggtcctgtccagtgtgagcccgacccgagctccagtagttccgcccgctggtcatcgcgccctttcccctgccggtgtcctgctcgccgtccccgccatgctgtctctagactttttggacgatgtgcggcggatgaacaagcggcagctctattatcaagtcctaaattttggaatgattgtctcatcggcactaatgatctggaaggggttaatggtaataactggaagtgaaagtccgattgtagtggtgctcaggcaaaatgggcatatcaagtttttgaccaaaggagataataatgcggttgatgaccgaggcctctataaacaaggacaacattggctagagaaaaaagatgttgtggggagagccaggggatttgttccttatattggaattgtgacgatcctcatgaatgactatcctaaatttaagtatgcagttctctttttgctgggtttattcgtgctggttcatcgtgagtaagaagcctgccttgctgttcctgggaagatgccatagttttcgttactggatgtttggagtagatactggtctgtgattggtggaatggagaacacacgtgttggtgcttctgggtagcactggtttgcattagtttatgtttccatgccagagtttgtgtgggcgggcgcatgtgcaccacagagtgcactcgaggggactttcagtcacaggatttcataattgtcattgtcacactttcaaatttttgtacatcagtgaatttttttatattaaaaggttgagccaaagcccccagtgtttgtattttgaagccaagcttcacttctaaagtgcctacagagacttgtaaatgaaaatgcagctctgcacgagtttgaaaccgtcatacctccttctattaggaatggcatatactgaggtggtcgtaagtcttaacttctaaaattttaaataaaagactttgcacattgaaaaaaaaaaaaaagaaaacaaaaaaaaaaagaaaaaaaaaagaaagaaaaataacgaaaaaagataaaaacaaacacacggggggggcggggcggcgtagagaaatactcccccaggggggcggcgccgcagcgaattcatcagcggcaccaccaacaggtctttttgttaaaaaaaaggggggcccccactataggaaggcgccgggcattaaaaatgaacagcagaacggagggccgggggctattaaaaccagcgggcgggggggggacaaaaaccgctgctacggggggggcctcttggagggagcgaacaccccacacatggcggggggggaaacaaatgtggggcagaaaacatacgcaa

SEQ ID NO: 437013 - DNA, 1171 bp, Homo sapiens
gaaggtggcagagcagcctccccaactaagcctgggtcgccgcctcggtgaagggccgcggggccgagcgcgggaagtggcgtccagtcggtttttggcaggcgagagccagagcgtgagaaccctcccacggcgaggccaagccctgagactggactagcaaggtcgtgagtctctctgtcagctctccgcagcgaaggggcgcggggggcggggaccgtgcccgaccgtgccagctcccgccccggaagcggaagtgcaagcactgcggggtcctgtccagtgtgagcccgacccgagctccagtagttccgcccgctggtcatcgcgccctttcccctgccggtgtcctgctcgccgtccccgccatgctgtctctagactttttggacgatgtgcggcggatgaacaagcggcagctctattatcaagtcctaaattttggaatgattgtctcatcggcactaatgatctggaaggggttaatggtaataactggaagtgaaagtccgattgtagtggtgctcagtggcagcatggaacctgcatttcatagaggagatcttctctttctaacaaatcgagttgaagatcccatacgagtgggagaaattgttgtttttaggatagaaggaagagagattcctatagttcaccgagtcttgaagattcatgaaaagcaaaatgggcatatcaagtttttgaccaaaggagataataatgcggttgatgaccgaggcctctataaacaaggacaacattggctagagaaaaaagatgttgtggggagagccaggggatttgttccttatattggaattgtgacgatcctcatgaatgactatcctaaatttaagtatgcagttctctttttgctgggtttattcgtgctggttcatcgtgagtaagaagcctgccttgctgttcctgggaagatgccatagttttcgttactggatgtttggagtagatactggtctgtgattggtggaatggagaacacacgtgttggtgcttctgggtagcactggtttgcattagtttatgtttccatgccagagtttgtgtgggcgggcgcatgtgcaccacagagtgcactcgaggggactttcagtcacaggatttcataattgtcatcgtcacatcgtcacttagacgggatcctctagac

SEQ ID NO: 437014 - DNA, 1277 bp, Homo sapiens
gaaggtggcagagcagcctccccaactaagcctgggtcgccgcctcggtgaagggccgcggggccgagcgcgggaagtggcgtccagtcggtttttggcaggcgagagccagagcgtgagaaccctcccacggcgaggccaagccctgagactggactagcaaggtcgtgagtctctctgtcagctctccgcagcgaaggggcgcggggggcggggaccgtgcccgaccgtgccagctcccgccccggaagcggaagtgcaagcactgcggggtcctgtccagtgtgagcccgacccgagctccagtagttccgcccgctggtcatcgcgccctttcccctgccggtgtcctgctcgccgtccccgccatgctgtctctagactttttggacgatgtgcggcggatgaacaagcggcagctctattatcaagtcctaaattttggaatgattgtctcatcggcactaatgatctggaaggggttaatggtaataactggaagtgaaagtccgattgtagtggtgctcagtggcagcatggaacctgcatttcatagaggagatcttctctttctaacaaatcgagttgaagatcccatacgagtgggagaaattgttgtttttaggatagaaggaagagagattcctatagttcaccgagtcttgaagattcatgaaaagcaaaatgggcatatcaagtttttgaccaaaggagataataatgcggttgatgaccgaggcctctataaacaaggacaacattggctagagaaaaaagatgttgtggggagagccaggggatttgttccttatattggaattgtgacgatcctcatgaatgactatcctaaatttaagtatgcagttctctttttgctgggtttattcgtgctggttcatcgtgagtaagaagcctgccttgctgttcctgggaagatgccatagttttcgttactggatgtttggagtagatactggtctgtgattggtggaatggagaacacacgtgttggtgcttctgggtagcactggtttgcattagtttatgtttccatgccagagtttgtgtgggcgggcgcatgtgcaccacagagtgcactcgaggggactttcagtcacaggatttcataattgtcatcgtctgtctaagtgcgatggtgagagctaaggtcggggcggtgatgtagagggtgatggtagatgtggcgggttttaggggctctttggtgaagagttttatggcgtcagcgaagggttgtagtagtccgtaggggccta

SEQ ID NO: 437015 - DNA, 3781 bp, Homo sapiens
ctgtctgagcatttcactgcggagcctgagcgcgcctgcctgggaaaacactgcagcggtgctcggactcctcctgtccagcaggaggcgcggcccggcagctcccgcatgcgcagtgcgctcggtgtcagacggcccggatcccggttaccggcccctcgctcgctgctcgccagcccagactcggccctggcagtggcggctggcgattcggaccgatccgacctgggcggaggtggcccgcgccccgcggcatgagccggtgaccaagctcggggccgagcgggaggcagccgtggccgagccacagggatctgattcctcccagggggatgtcctgcgcctcagggtccggtggtggcctgcggcatcccttgcggtgccagaagccgtgggacgagtgtctttaatgttatagagctactcagagttgctgtttctccttgagatgcttttggagtgtgaggaagaggctgtctgtgtcattatgtgtgcgtcggtcaagtataatatccggggtcctgccctcatcccaagaatgaagaccaagcaccgaatctactatatcaccctcttctccattgtcctcctgggcctcattgccactggcatgtttcagttttggccccattctatcgagtcctcaaatgactggaatgtagagaagcgcagcatccgtgatgtgccggttgttaggctgccagccgacagtcccatcccagagcggggggatctcagttgcagaatgcacacgtgttttgatgtctatcgctgtggcttcaacccaaagaacaaaatcaaggtgtatatctatgctctgaaaaagtacgtggatgactttggcgtctctgtcagcaacaccatctcccgggagtataatgaactgctcatggccatctcagacagtgactactacactgatgacatcaaccgggcctgtctgtttgttccctccatcgatgtgcttaaccagaacacactgcgcatcaaggagacagcacaagcgatggcccagctctctaggtgggatcgaggtacgaatcacctgttgttcaacatgttgcctggaggtcccccagattataacacagccctggatgtccccagagacagggccctgttggctggtggcggcttttctacgtggacttaccggcaaggctacgatgtcagcattcctgtctatagtccactgtcagctgaggtggatcttccagagaaaggaccaggtccacggcaatacttcctcctgtcatctcaggtgggtctccatcctgagtacagagaggacctagaagccctccaggtcaaacatggagagtcagtgttagtactcgataaatgcaccaacctctcagagggtgtcctttctgtccgtaagcgctgccacaagcaccaggtcttcgattacccacaggtgctacaggaggctactttctgtgtggttcttcgtggagctcggctgggccaggcagtattgagcgatgtgttacaagctggctgtgtcccggttgtcattgcagactcctatattttgcctttctctgaagttcttgactggaagagagcatctgtggttgtaccagaagaaaagatgtcagatgtgtacagtattttgcagagcatcccccaaagacagattgaagaaatgcagagacaggcccggtggttctgggaagcgtacttccagtcaattaaagccattgccctggccaccctgcagattatcaatgaccggatctatccatatgctgccatctcctatgaagaatggaatgaccctcctgctgtgaagtggggcagcgtgagcaatccactcttcctcccgctgatcccaccacagtctcaagggttcaccgccatagtcctcacctacgaccgagtagagagcctcttccgggtcatcactgaagtgtccaaggtgcccagtctatccaaactacttgtcgtctggaataatcagaataaaaaccctccagaagattctctctggcccaaaatccgggttccattaaaagttgtgaggactgctgaaaacaagttaagtaaccgtttcttcccttatgatgaaatcgagacagaagctgttctggccattgatgatgatatcattatgctgacctctgacgagctgcaatttggttatgaggtctggcgggaatttcctgaccggttggtgggttacccgggtcgtctgcatctctgggaccatgagatgaataagtggaagtatgagtctgagtggacgaatgaagtgtccatggtgctcactggggcagctttttatcacaagtattttaattacctgtatacctacaaaatgcctggggatatcaagaactgggtagatgctcatatgaactgtgaagatattgccatgaacttcctggtggccaacgtcacgggaaaagcagttatcaaggtaaccccacgaaagaaattcaagtgtcctgagtgcacagccatagatgggctttcactagaccaaacacacatggtggagaggtcagagtgcatcaacaagtttgcttcagtcttcgggaccatgcctctcaaggtggtggaacaccgagctgaccctgtcctgtacaaagatgactttcctgagaagctgaagagcttccccaacattggcagcttatgaaacgtgtcattggtggaggtctgaatgtgaggctgggacagagggagagaacaaggcctcccagcactctgatgtcagagtagtaggttaagggtggaaggttgacctacttggatcttggcatgcacccacctaacccactttctcaagaacaagaacctagaatgaatatccaagcacctcgagctatgcaacctctgttcttgtatttcttatgatctctgatgggttcttctcgaaaatgccaagtggaagactttgtggcatgctccagatttaaatccagctgaggctccctttgttttcagttccatgtaacaatctggaaggaaacttcacggacaggaagactgctggagaagagaagcgtgttagcccatttgaggtctggggaatcatgtaaagggtacccagacctcacttttagttatttacatcaatgagttctttcagggaaccaaacccagaattcggtgcaaaagccaaacatcttggtgggatttgataaatgccttgggacctggagtgctgggcttgtgcacaggaagagcaccagccgctgagtcaggatcctgtcagttccatgagctattcctctttggtttggctttttgatatgattaaaattattttttattcctttttatactgtgtcttaaacaccaattcctgatagtccaaggaaccacctttctcccttgatatatttaactccgtctttggcctgacaacagtcttctgcccatgtctgggaacacacgccaggaggaatgtctgataccctctgcatcaagcgtaagaaggtcccaaatcataaccattttaagaacagatgactcagaaacctccagaggaatctgtttgcttcctgattagatccagtcaatgttttaaaggtattgtcagagaaaaacagagggtctgtactagccatgcaaggagtcgctctagctggtacccgtaaaagttgtgggattgtgaccccccatcccaaggggatgccaaaatttctctcattcttttggtataaacttaacattagccagggaggttctggctaacgttaaatgctgctatacaactgctttgcaacagttgctggtatatttaaatcattaaatttcagcatttactaat

SEQ ID NO: 437016 - DNA, 3459 bp, Homo sapiens
tccagcctgagtgacagagtgaaaccctgtctcaaaacaaaacaaaacaaaaaaaaaggttgaatagtcttttcaagtgtcatttgccatcctaaatacttggtttttcttatttctctccctggtgaccaggaggagtgtgaggaagaggctgtctgtgtcattatgtgtgcgtcggtcaagtataatatccggggtcctgccctcatcccaagaatgaagaccaagcaccgaatctactatatcaccctcttctccattgtcctcctgggcctcattgccactggcatgtttcagttttggccccattctatcgagtcctcaaatgactggaatgtagagaagcgcagcatccgtgatgtgccggttgttaggctgccagccgacagtcccatcccagagcggggggatctcagttgcagaatgcacacgtgttttgatgtctatcgctgtggcttcaacccaaagaacaaaatcaaggtgtatatctatgctctgaaaaagtacgtggatgactttggcgtctctgtcagcaacaccatctcccgggagtataatgaactgctcatggccatctcagacagtgactactacactgatgacatcaaccgggcctgtctgtttgttccctccatcgatgtgcttaaccagaacacactgcgcatcaaggagacagcacaagcgatggcccagctctctaggtgggatcgaggtacgaatcacctgttgttcaacatgttgcctggaggtcccccagattataacacagccctggatgtccccagagacagggccctgttggctggtggcggcttttctacgtggacttaccggcaaggctacgatgtcagcattcctgtctatagtccactgtcagctgaggtggatcttccagagaaaggaccaggtccacggcaatacttcctcctgtcatctcaggtgggtctccatcctgagtacagagaggacctagaagccctccaggtcaaacatggagagtcagtgttagtactcgataaatgcaccaacctctcagagggtgtcctttctgtccgtaagcgctgccacaagcaccaggtcttcgattacccacaggtgctacaggaggctactttctgtgtggttcttcgtggagctcggctgggccaggcagtattgagcgatgtgttacaagctggctgtgtcccggttgtcattgcagactcctatattttgcctttctctgaagttcttgactggaagagagcatctgtggttgtaccagaagaaaagatgtcagatgtgtacagtattttgcagagcatcccccaaagacagattgaagaaatgcagagacaggcccggtggttctgggaagcgtacttccagtcaattaaagccattgccctggccaccctgcagattatcaatgaccggatctatccatatgctgccatctcctatgaagaatggaatgaccctcctgctgtgaagtggggcagcgtgagcaatccactcttcctcccgctgatcccaccacagtctcaagggttcaccgccatagtcctcacctacgaccgagtagagagcctcttccgggtcatcactgaagtgtccaaggtgcccagtctatccaaactacttgtcgtctggaataatcagaataaaaaccctccagaagattctctctggcccaaaatccgggttccattaaaagttgtgaggactgctgaaaacaagttaagtaaccgtttcttcccttatgatgaaatcgagacagaagctgttctggccattgatgatgatatcattatgctgacctctgacgagctgcaatttggttatgaggtctggcgggaatttcctgaccggttggtgggttacccgggtcgtctgcatctctgggaccatgagatgaataagtggaagtatgagtctgagtggacgaatgaagtgtccatggtgctcactggggcagctttttatcacaagtattttaattacctgtatacctacaaaatgcctggggatatcaagaactgggtagatgctcatatgaactgtgaagatattgccatgaacttcctggtggccaacgtcacgggaaaagcagttatcaaggtaaccccacgaaagaaattcaagtgtcctgagtgcacagccatagatgggctttcactagaccaaacacacatggtggagaggtcagagtgcatcaacaagtttgcttcagtcttcgggaccatgcctctcaaggtggtggaacaccgagctgaccctgtcctgtacaaagatgactttcctgagaagctgaagagcttccccaacattggcagcttatgaaacgtgtcattggtggaggtctgaatgtgaggctgggacagagggagagaacaaggcctcccagcactctgatgtcagagtagtaggttaagggtggaaggttgacctacttggatcttggcatgcacccacctaacccactttctcaagaacaagaacctagaatgaatatccaagcacctcgagctatgcaacctctgttcttgtatttcttatgatctctgatgggttcttctcgaaaatgccaagtggaagactttgtggcatgctccagatttaaatccagctgaggctccctttgttttcagttccatgtaacaatctggaaggaaacttcacggacaggaagactgctggagaagagaagcgtgttagcccatttgaggtctggggaatcatgtaaagggtacccagacctcacttttagttatttacatcaatgagttctttcagggaaccaaacccagaattcggtgcaaaagccaaacatcttggtgggatttgataaatgccttgggacctggagtgctgggcttgtgcacaggaagagcaccagccgctgagtcaggatcctgtcagttccatgagctattcctctttggtttggctttttgatatgattaaaattattttttattcctttttatactgtgtcttaaacaccaattcctgatagtccaaggaaccacctttctcccttgatatatttaactccgtctttggcctgacaacagtcttctgcccatgtctgggaacacacgccaggaggaatgtctgataccctctgcatcaagcgtaagaaggtcccaaatcataaccattttaagaacagatgactcagaaacctccagaggaatctgtttgcttcctgattagatccagtcaatgttttaaaggtattgtcagagaaaaacagagggtctgtactagccatgcaaggagtcgctctagctggtacccgtaaaagttgtgggattgtgaccccccatcccaaggggatgccaaaatttctctcattcttttggtataaacttaacattagccagggaggttctggctaacgttaaatgctgctatacaactgctttgcaacagttgctggtatatttaaatcattaaatttcagcatttactaat

SEQ ID NO: 437017 - DNA, 3539 bp, Homo sapiens
gcgcggtttaccggtccctcgactcggtgctcaccagcgcatgactcttgccctgtgcagtgggggctggccattcgaaccgattcgaacgtgtagtcgcgatgtgagctgcagtgcccccggcaagcatgtagccgggtttaccaaagcatcgggagtccacggagtggtcgtaggctagggctctcgtccgaggaacgatgtgatcgatatacgagtgtgaggaagaggctgtctgtgtcattatgtgtgcgtcggtcaagtataatatccggggtcctgccctcatcccaagaatgaagaccaagcaccgaatctactatatcaccctcttctccattgtcctcctgggcctcattgccactggcatgtttcagttttggccccattctatcgagtcctcaaatgactggaatgtagagaagcgcagcatccgtgatgtgccggttgttaggctgccagccgacagtcccatcccagagcggggggatctcagttgcagaatgcacacgtgttttgatgtctatcgctgtggcttcaacccaaagaacaaaatcaaggtgtatatctatgctctgaaaaagtacgtggatgactttggcgtctctgtcagcaacaccatctcccgggagtataatgaactgctcatggccatctcagacagtgactactacactgatgacatcaaccgggcctgtctgtttgttccctccatcgatgtgcttaaccagaacacactgcgcatcaaggagacagcacaagcgatggcccagctctctaggtgggatcgaggtacgaatcacctgttgttcaacatgttgcctggaggtcccccagattataacacagccctggatgtccccagagacagggccctgttggctggtggcggcttttctacgtggacttaccggcaaggctacgatgtcagcattcctgtctatagtccactgtcagctgaggtggatcttccagagaaaggaccaggtccacggcaatacttcctcctgtcatctcaggtgggtctccatcctgagtacagagaggacctagaagccctccaggtcaaacatggagagtcagtgttagtactcgataaatgcaccaacctctcagagggtgtcctttctgtccgtaagcgctgccacaagcaccaggtcttcgattacccacaggtgctacaggaggctactttctgtgtggttcttcgtggagctcggctgggccaggcagtattgagcgatgtgttacaagctggctgtgtcccggttgtcattgcagactcctatattttgcctttctctgaagttcttgactggaagagagcatctgtggttgtaccagaagaaaagatgtcagatgtgtacagtattttgcagagcatcccccaaagacagattgaagaaatgcagagacaggcccggtggttctgggaagcgtacttccagtcaattaaagccattgccctggccaccctgcagattatcaatgaccggatctatccatatgctgccatctcctatgaagaatggaatgaccctcctgctgtgaagtggggcagcgtgagcaatccactcttcctcccgctgatcccaccacagtctcaagggttcaccgccatagtcctcacctacgaccgagtagagagcctcttccgggtcatcactgaagtgtccaaggtgcccagtctatccaaactacttgtcgtctggaataatcagaataaaaaccctccagaagattctctctggcccaaaatccgggttccattaaaagttgtgaggactgctgaaaacaagttaagtaaccgtttcttcccttatgatgaaatcgagacagaagctgttctggccattgatgatgatatcattatgctgacctctgacgagctgcaatttggttatgaggtctggcgggaatttcctgaccggttggtgggttacccgggtcgtctgcatctctgggaccatgagatgaataagtggaagtatgagtctgagtggacgaatgaagtgtccatggtgctcactggggcagctttttatcacaagtattttaattacctgtatacctacaaaatgcctggggatatcaagaactgggtagatgctcatatgaactgtgaagatattgccatgaacttcctggtggccaacgtcacgggaaaagcagttatcaaggtaaccccacgaaagaaattcaagtgtcctgagtgcacagccatagatgggctttcactagaccaaacacacatggtggagaggtcagagtgcatcaacaagtttgcttcagtcttcgggaccatgcctctcaaggtggtggaacaccgagctgaccctgtcctgtacaaagatgactttcctgagaagctgaagagcttccccaacattggcagcttatgaaacgtgtcattggtggaggtctgaatgtgaggctgggacagagggagagaacaaggcctcccagcactctgatgtcagagtagtaggttaagggtggaaggttgacctacttggatcttggcatgcacccacctaacccactttctcaagaacaagaacctagaatgaatatccaagcacctcgagctatgcaacctctgttcttgtatttcttatgatctctgatgggttcttctcgaaaatgccaagtggaagactttgtggcatgctccagatttaaatccagctgaggctccctttgttttcagttccatgtaacaatctggaaggaaacttcacggacaggaagactgctggagaagagaagcgtgttagcccatttgaggtctggggaatcatgtaaagggtacccagacctcacttttagttatttacatcaatgagttctttcagggaaccaaacccagaattcggtgcaaaagccaaacatcttggtgggatttgataaatgccttgggacctggagtgctgggcttgtgcacaggaagagcaccagccgctgagtcaggatcctgtcagttccatgagctattcctctttggtttggctttttgatatgattaaaattattttttattcctttttatactgtgtcttaaacaccaattcctgatagtccaaggaaccacctttctcccttgatatatttaactccgtctttggcctgacaacagtcttctgcccatgtctgggaacacacgccaggaggaatgtctgataccctctgcatcaagcgtaagaaggtcccaaatcataaccattttaagaacagatgactcagaaacctccagaggaatctgtttgcttcctgattagatccagtcaatgttttaaaggtattgtcagagaaaaacagagggtctgtactagccatgcaaggagtcgctctagctggtacccgtaaaagttgtgggattgtgaccccccatcccaaggggatgccaaaatttctctcattcttttggtataaacttaacattagccagggaggttctggctaacgttaaatgctgctatacaactgctttgcaacagttgctggtatatttaaatcattaaatttcagcatttactaat

SEQ ID NO: 437018 - DNA, 3438 bp, Homo sapiens
ctgtctgagcatttcactgcggagcctgagcgcgcctgcctgggaaaacactgcagcggtgctcggactcctcctgtccagcaggaggcgcggcccggcagctcccgcatgcgcagtgcgctcggtgtcagacggcccggatcccggttaccggcccctcgctcgctgctcgccagcccagactcggccctggcagtggcggctggcgattcggaccgatccgacctgggcggaggtggcccgcgccccgcggcatgagccggtgaccaagctcggggccgagcgggaggcagccgtggccgaggagtgtgaggaagaggctgtctgtgtcattatgtgtgcgtcggtcaagtataatatccggggtcctgccctcatcccaagaatgaagaccaagcaccgaatctactatatcaccctcttctccattgtcctcctgggcctcattgccactggcatgtttcagttttggccccattctatcgagtcctcaaatgactggaatgtagagaagcgcagcatccgtgatgtgccggttgttaggctgccagccgacagtcccatcccagagcggggggatctcagttgcagaatgcacacgtgttttgatgtctatcgctgtggcttcaacccaaagaacaaaatcaaggtgtatatctatgctctgaaaaagtacgtggatgactttggcgtctctgtcagcaacaccatctcccgggagtataatgaactgctcatggccatctcagacagtgactactacactgatgacatcaaccgggcctgtctgtttgttccctccatcgatgtgcttaaccagaacacactgcgcatcaaggagacagcacaagcgatggcccagctctctaggtgggatcgaggtacgaatcacctgttgttcaacatgttgcctggaggtcccccagattataacacagccctggatgtccccagagacagggccctgttggctggtggcggcttttctacgtggacttaccggcaaggctacgatgtcagcattcctgtctatagtccactgtcagctgaggtggatcttccagagaaaggaccaggtccacggcaatacttcctcctgtcatctcaggtgggtctccatcctgagtacagagaggacctagaagccctccaggtcaaacatggagagtcagtgttagtactcgataaatgcaccaacctctcagagggtgtcctttctgtccgtaagcgctgccacaagcaccaggtcttcgattacccacaggtgctacaggaggctactttctgtgtggttcttcgtggagctcggctgggccaggcagtattgagcgatgtgttacaagctggctgtgtcccggttgtcattgcagactcctatattttgcctttctctgaagttcttgactggaagagagcatctgtggttgtaccagaagaaaagatgtcagatgtgtacagtattttgcagagcatcccccaaagacagattgaagaaatgcagagacaggcccggtggttctgggaagcgtacttccagtcaattaaagccattgccctggccaccctgcagattatcaatgaccggatctatccatatgctgccatctcctatgaagaatggaatgaccctcctgctgtgattctctctggcccaaaatccgggttccattaaaagttgtgaggactgctgaaaacaagttaagtaaccgtttcttcccttatgatgaaatcgagacagaagctgttctggccattgatgatgatatcattatgctgacctctgacgagctgcaatttggttatgaggtctggcgggaatttcctgaccggttggtgggttacccgggtcgtctgcatctctgggaccatgagatgaataagtggaagtatgagtctgagtggacgaatgaagtgtccatggtgctcactggggcagctttttatcacaagtattttaattacctgtatacctacaaaatgcctggggatatcaagaactgggtagatgctcatatgaactgtgaagatattgccatgaacttcctggtggccaacgtcacgggaaaagcagttatcaaggtaaccccacgaaagaaattcaagtgtcctgagtgcacagccatagatgggctttcactagaccaaacacacatggtggagaggtcagagtgcatcaacaagtttgcttcagtcttcgggaccatgcctctcaaggtggtggaacaccgagctgaccctgtcctgtacaaagatgactttcctgagaagctgaagagcttccccaacattggcagcttatgaaacgtgtcattggtggaggtctgaatgtgaggctgggacagagggagagaacaaggcctcccagcactctgatgtcagagtagtaggttaagggtggaaggttgacctacttggatcttggcatgcacccacctaacccactttctcaagaacaagaacctagaatgaatatccaagcacctcgagctatgcaacctctgttcttgtatttcttatgatctctgatgggttcttctcgaaaatgccaagtggaagactttgtggcatgctccagatttaaatccagctgaggctccctttgttttcagttccatgtaacaatctggaaggaaacttcacggacaggaagactgctggagaagagaagcgtgttagcccatttgaggtctggggaatcatgtaaagggtacccagacctcacttttagttatttacatcaatgagttctttcagggaaccaaacccagaattcggtgcaaaagccaaacatcttggtgggatttgataaatgccttgggacctggagtgctgggcttgtgcacaggaagagcaccagccgctgagtcaggatcctgtcagttccatgagctattcctctttggtttggctttttgatatgattaaaattattttttattcctttttatactgtgtcttaaacaccaattcctgatagtccaaggaaccacctttctcccttgatatatttaactccgtctttggcctgacaacagtcttctgcccatgtctgggaacacacgccaggaggaatgtctgataccctctgcatcaagcgtaagaaggtcccaaatcataaccattttaagaacagatgactcagaaacctccagaggaatctgtttgcttcctgattagatccagtcaatgttttaaaggtattgtcagagaaaaacagagggtctgtactagccatgcaaggagtcgctctagctggtacccgtaaaagttgtgggattgtgaccccccatcccaaggggatgccaaaatttctctcattcttttggtataaacttaacattagccagggaggttctggctaacgttaaatgctgctatacaactgctttgcaacagttgctggtatatttaaatcattaaatttcagcatttactaat

SEQ ID NO: 437019 - DNA, 2576 bp, Homo sapiens
ctgtctgagcatttcactgcggagcctgagcgcgcctgcctgggaaaacactgcagcggtgctcggactcctcctgtccagcaggaggcgcggcccggcagctcccgcatgcgcagtgcgctcggtgtcagacggcccggatcccggttaccggcccctcgctcgctgctcgccagcccagactcggccctggcagtggcggctggcgattcggaccgatccgacctgggcggaggtggcccgcgccccgcggcatgagccggtgaccaagctcggggccgagcgggaggcagccgtggccgaggagtgtgaggaagaggctgtctgtgtcattatgtgtgcgtcggtcaagtataatatccggggtcctgccctcatcccaagaatgaagaccaagcaccgaatctactatatcaccctcttctccattgtcctcctgggcctcattgccactggcatgtttcagttttggccccattctatcgagtcctcaaatgactggaatgtagagaagcgcagcatccgtgatgtgccggttgttaggctgccagccgacagtcccatcccagagcggggggatctcagttgcagaatgcacacgtgttttgatgtctatcgctgtggcttcaacccaaagaacaaaatcaaggtgtatatctatgctctgaaaaagtacgtggatgactttggcgtctctgtcagcaacaccatctcccgggagtataatgaactgctcatggccatctcagacagtgactactacactgatgacatcaaccgggcctgtctgtttgttccctccatcgatgtgcttaaccagaacacactgcgcatcaaggagacagcacaagcgatggcccagctctctaggtgggatcgaggtacgaatcacctgttgttcaacatgttgcctggaggtcccccagattataacacagccctggatgtccccagagacagggccctgttggctggtggcggcttttctacgtggacttaccggcaaggctacgatgtcagcattcctgtctatagtccactgtcagctgaggtggatcttccagagaaaggaccaggtccacggcaatacttcctcctgtcatctcaggtgggtctccatcctgagtacagagaggacctagaagccctccaggtcaaacatggagagtcagtgttagtactcgataaatgcaccaacctctcagagggtgtcctttctgtccgtaagcgctgccacaagcaccaggtcttcgattacccacaggtgctacaggaggctactttctgtgtggttcttcgtggagctcggctgggccaggcagtattgagcgatgtgttacaagctggctgtgtcccggttgtcattgcagactcctatattttgcctttctctgaagttcttgactggaagagagcatctgtggttgtaccagaagaaaagatgtcagatgtgtacagtattttgcagagcatcccccaaagacagattgaagaaatgcagagacaggcccggtggttctgggaagcgtacttccagtcaattaaagccattgccctggccaccctgcagattatcaatgaccggatctatccatatgctgccatctcctatgaagaatggaatgaccctcctgctgtgaagtggggcagcgtgagcaatccactcttcctcccgctgatcccaccacagtctcaagggttcaccgccatagtcctcacctacgaccgagtagagagcctcttccgggtcatcactgaagtgtccaaggtgcccagtctatccaaactacttgtcgtctggaataatcagaataaaaaccctccagaagattctctctggcccaaaatccgggttccattaaaagttgtgaggactgctgaaaacaagttaagtaaccgtttcttcccttatgatgaaatcgagacagaagctgttctggccattgatgatgatatcattatgctgacctctgacgagctgcaatttggttatgaggtctgagtcaggatcctgtcagttccatgagctattcctctttggtttggctttttgatatgattaaaattattttttattcctttttatactgtgtcttaaacaccaattcctgatagtccaaggaaccacctttctcccttgatatatttaactccgtctttggcctgacaacagtcttctgcccatgtctgggaacacacgccaggaggaatgtctgataccctctgcatcaagcgtaagaaggtcccaaatcataaccattttaagaacagatgactcagaaacctccagaggaatctgtttgcttcctgattagatccagtcaatgttttaaaggtattgtcagagaaaaacagagggtctgtactagccatgcaaggagtcgctctagctggtacccgtaaaagttgtgggattgtgaccccccatcccaaggggatgccaaaatttctctcattcttttggtataaacttaacattagccagggaggttctggctaacgttaaatgctgctatacaactgctttgcaacagttgctggtatatttaaatcattaaatttcagcatttactaat

SEQ ID NO: 437020 - DNA, 1808 bp, Homo sapiens
ctgtctgagcatttcactgcggagcctgagcgcgcctgcctgggaaaacactgcagcggtgctcggactcctcctgtccagcaggaggcgcggcccggcagctcccgcatgcgcagtgcgctcggtgtcagacggcccggatcccggttaccggcccctcgctcgctgctcgccagcccagactcggccctggcagtggcggctggcgattcggaccgatccgacctgggcggaggtggcccgcgccccgcggcatgagccggtgaccaagctcggggccgagcgggaggcagccgtggccgaggagtgtgaggaagaggctgtctgtgtcattatgtgtgcgtcggtcaagtataatatccggggtcctgccctcatcccaagaatgaagaccaagcaccgaatctactatatcaccctcttctccattgtcctcctgggcctcattgccactggcatgtttcagttttggccccattctatcgagtcctcaaatgactggaatgtagagaagcgcagcatccgtgatgtgccggttgttaggctgccagccgacagtcccatcccagagcggggggatctcagttgcagaatgcacacgtgttttgatgtctatcgctgtggcttcaacccaaagaacaaaatcaaggtgtatatctatgctctgaaaaagtacgtggatgactttggcgtctctgtcagcaacaccatctcccgggagtataatgaactgctcatggccatctcagacagtgactactacactgatgacatcaaccgggcctgtctgtttgttccctccatcgatgtgcttaaccagaacacactgcgcatcaaggagacagcacaagcgatggcccagctctctaggtgggatcgaggtacgaatcacctgttgttcaacatgttgcctggaggtcccccagattataacacagccctggatgtccccagagacagggccctgttggctggtggcggcttttctacgtggacttaccggcaaggctacgatgtcagcattcctgtctatagtccactgtcagctgaggtggatcttccagagaaaggaccaggtccacggcaatacttcctcctgtcatctcaggtgggtctccatcctgagtacagagaggacctagaagccctccaggtcaaacatggagagtcagtgttagtactcgataaatgcaccaacctctcagagggtgtcctttctgtccgtaagcgctgccacaagcaccaggtcttcgattacccacaggtgctacaggaggctactttctgtgtggttcttcgtggagctcggctgggccaggcagtattgagcgatgtgttacaagctggctgtgtcccggttgtcattgcagactcctatattttgcctttctctgaagttcttgactggaagagagcatctgtggttgtaccagaagaaaagatgtcagatgtgtacagtattttgcagagcatcccccaaagacagattgaagaaatgcagagacaggcccggtggttctgggaagcgtacttccagtcaattaaagccattgccctggccaccctgcagattatcaatgaccggatctatccatatgctgccatctcctatgaagaatggaatgaccctcctgctgtggtaagtgaattccagtgctagccacatgaggcatggtccagctgtcagggtgggtggaaggaaaaatgtactacaattgtaaaggttatttaaattctagctttctaagatgagagtgtgctttttatacttggggcctgataagggcagcataattttgaaacactga

SEQ ID NO: 437021 - DNA, 1193 bp, Homo sapiens
ctgtctgagcatttcactgcggagcctgagcgcgcctgcctgggaaaacactgcagcggtgctcggactcctcctgtccagcaggaggcgcggcccggcagctcccgcatgcgcagtgcgctcggtgtcagacggcccggatcccggttaccggcccctcgctcgctgctcgccagcccagactcggccctggcagtggcggctggcgattcggaccgatccgacctgggcggaggtggcccgcgccccgcggcatgagccggtgaccaagctcggggccgagcgggaggcagccgtggccgaggagtgtgaggaagaggctgtctgtgtcattatgtgtgcgtcggtcaagtataatatccggggtcctgccctcatcccaagaatgaagaccaagcaccgaatctactatatcaccctcttctccattgtcctcctgggcctcattgccactggcatgtttcagttttggccccattctatcgagtcctcaaatgactggaatgtagagaagcgcagcatccgtgatgtgccggttgttaggctgccagccgacagtcccatcccagagcggggggatctcagttgcagaatgcacacgtgttttgatgtctatcgctgtggcttcaacccaaagaacaaaatcaaggtgtatatctatgctctgaaaaagtacgtggatgactttggcgtctctgtcagcaacaccatctcccgggagtataatgaactgctcatggccatctcagacagtgactactacactgatgacatcaaccgggcctgtctgtttgttccctccatcgatgtgcttaaccagaacacactgcgcatcaaggagacagcacaagcgatggcccagctctctaggtgggatcgaggtacgaatcacctgttgttcaacatgttgcctggaggtcccccagattataacacagccctggatgtccccagagacagggccctgttggctggtggcggcttttctacgtggacttaccggcaaggctacgatgtcagcattcctgtctatagtccactgtcagctgaggtggatcttccagagaaaggaccaggtccacggcaatacttcctcctgtcatctcaggtgggtctccatcctgagtacagagaggacctagaagccctccagcctgagtgacagagtgaaaccctgtctcaaaacaaaacaa

SEQ ID NO: 437022 - DNA, 1976 bp, Homo sapiens
cacgctggcccaatggcacccgctgtgcccaatggcagtctcaagggttcaccgccatagtcctcacctacgaccgagtagagagcctcttccgggtcatcactgaagtgtccaaggtgcccagtctatccaaactacttgtcgtctggaataatcagaataaaaaccctccagaagattctctctggcccaaaatccgggttccattaaaagttgtgaggactgctgaaaacaagttaagtaaccgtttcttcccttatgatgaaatcgagacagaagctgttctggccattgatgatgatatcattatgctgacctctgacgagctgcaatttggttatgaggtctggcgggaatttcctgaccggttggtgggttacccgggtcgtctgcatctctgggaccatgagatgaataagtggaagtatgagtctgagtggacgaatgaagtgtccatggtgctcactggggcagctttttatcacaagtattttaattacctgtatacctacaaaatgcctggggatatcaagaactgggtagatgctcatatgaactgtgaagatattgccatgaacttcctggtggccaacgtcacgggaaaagcagttatcaaggtaaccccacgaaagaaattcaagtgtcctgagtgcacagccatagatgggctttcactagaccaaacacacatggtggagaggtcagagtgcatcaacaagtttgcttcagtcttcgggaccatgcctctcaaggtggtggaacaccgagctgaccctgtcctgtacaaagatgactttcctgagaagctgaagagcttccccaacattggcagcttatgaaacgtgtcattggtggaggtctgaatgtgaggctgggacagagggagagaacaaggcctcccagcactctgatgtcagagtagtaggttaagggtggaaggttgacctacttggatcttggcatgcacccacctaacccactttctcaagaacaagaacctagaatgaatatccaagcacctcgagctatgcaacctctgttcttgtatttcttatgatctctgatgggttcttctcgaaaatgccaagtggaagactttgtggcatgctccagatttaaatccagctgaggctccctttgttttcagttccatgtaacaatctggaaggaaacttcacggacaggaagactgctggagaagagaagcgtgttagcccatttgaggtctggggaatcatgtaaagggtacccagacctcacttttagttatttacatcaatgagttctttcagggaaccaaacccagaattcggtgcaaaagccaaacatcttggtgggatttgataaatgccttgggacctggagtgctgggcttgtgcacaggaagagcaccagccgctgagtcaggatcctgtcagttccatgagctattcctctttggtttggctttttgatatgattaaaattattttttattcctttttatactgtgtcttaaacaccaattcctgatagtccaaggaaccacctttctcccttgatatatttaactccgtctttggcctgacaacagtcttctgcccatgtctgggaacacacgccaggaggaatgtctgataccctctgcatcaagcgtaagaaggtcccaaatcataaccattttaagaacagatgactcagaaacctccagaggaatctgtttgcttcctgattagatccagtcaatgttttaaaggtattgtcagagaaaaacagagggtctgtactagccatgcaaggagtcgctctagctggtacccgtaaaagttgtgggattgtgaccccccatcccaaggggatgccaaaatttctctcattcttttggtataaacttaacattagccagggaggttctggctaacgttaaatgctgctatacaactgctttgcaacagttgctggtatatttaaatcattaaatttcagcatttactaat

SEQ ID NO: 437023 - DNA, 3136 bp, Homo sapiens
ctgtctgagcatttcactgcggagcctgagcgcgcctgcctgggaaaacactgcagcggtgctcggactcctcctgtccagcaggaggcgcggcccggcagctcccgcatgcgcagtgcgctcggtgtcagacggcccggatcccggttaccggcccctcgctcgctgctcgccagcccagactcggccctggcagtggcggctggcgattcggaccgatccgacctgggcggaggtggcccgcgccccgcggcatgagccggtgaccaagctcggggccgagcgggaggcagccgtggccgaggagtgtgaggaagaggctgtctgtgtcattatgtgtgcgtcggtcaagtataatatccggggtcctgccctcatcccaagaatgaagaccaagcaccgaatctactatatcaccctcttctccattgtcctcctgggcctcattgccactggcatgtttcagttttggccccattctatcgagtcctcaaatgactggaatgtagagaagcgcagcatccgtgatgtgccggttgttaggctgccagccgacagtcccatcccagagcggggggatctcagttgcagaatgcacacgtgttttgatgtctatcgctgtggcttcaacccaaagaacaaaatcaaggtgtatatctatgctctgaaaaagtacgtggatgactttggcgtctctgtcagcaacaccatctcccgggagtataatgaactgctcatggccatctcagacagtgactactacactgatgacatcaaccgggcctgtctgtttgttccctccatcgatgtgcttaaccagaacacactgcgcatcaaggagacagcacaagcgatggcccagctctctaggtgggatcgaggtacgaatcacctgttgttcaacatgttgcctggaggtcccccagattataacacagccctggatgtccccagagacagggccctgttggctggtggcggcttttctacgtggacttaccggcaaggctacgatgtcagcattcctgtctatagtccactgtcagctgaggtggatcttccagagaaaggaccaggtccacggcaatacttcctcctgtcatctcaggtgggtctccatcctgagtacagagaggacctagaagccctccaggtcaaacatggagagtcagtgttagtactcgataaatgcaccaacctctcagagggtgtcctttctgtccgtaagcgctgccacaagcaccaggtcttcgattacccacaggtgctacaggaggctactttctgtgtggttcttcgtggagctcggctgggccaggcagtattgagcgatgtgttacaagctggctgtgtcccggttgtcattgcagactcctatattttgcctttctctgaagttcttgactggaagagagcatctgtggttgtaccagaagaaaagatgtcagatgtgtacagtattttgcagagcatcccccaaagacagattgaagaaatgcagagacaggcccggtggttctgggaagcgtacttccagtcaattaaagccattgccctggccaccctgcagattatcaatgaccggatctatccatatgctgccatctcctatgaagaatggaatgaccctcctgctgtgaagtggggcagcgtgagcaatccactcttcctcccgctgatcccaccacagtctcaagggttcaccgccatagtcctcacctacgaccgagtagagagcctcttccgggtcatcactgaagtgtccaaggtgcccagtctatccaaactacttgtcgtctggaataatcagaataaaaaccctccagaagattctctctggcccaaaatccgggttccattaaaagttgtgaggactgctgaaaacaagttaagtaaccgtttcttcccttatgatgaaatcgagacagaagctgttctggccattgatgatgatatcattatgctgacctctgacgagctgcaatttggttatgaggtctggcgggaatttcctgaccggttggtgggttacccgggtcgtctgcatctctgggaccatgagatgaataagtggaagtatgagtctgagtggacgaatgaagtgtccatggtgctcactggggcagctttttatcacaagtattttaattacctgtatacctacaaaatgcctggggatatcaagaactgggtagatgctcatatgaactgtgaagatattgccatgaacttcctggtggccaacgtcacgggaaaagcagttatcaaggtaaccccacgaaagaaattcaagtgtcctgagtgcacagccatagatgggctttcactagaccaaacacacatggtggagaggtcagagtgcatcaacaagtttgcttcagtcttcgggaccatgcctctcaaggtggtggaacaccgagctgaccctgtcctgtacaaagatgactttcctgagaagctgaagagcttccccaacattggcagcttatgaaacgtgtcattggtggaggtctgaatgtgaggctgggacagagggagagaacaaggcctcccagcactctgatgtcagagtagtaggttaagggtggaaggttgacctacttggatcttggcatgcacccacctaacccactttctcaagaacaagaacctagaatgaatatccaagcacctcgagctatgcaacctctgttcttgtatttcttatgatctctgatgggttcttctcgaaaatgccaagtggaagactttgtggcatgctccagatttaaatccagctgaggctccctttgttttcagttccatgtaacaatctggaaggaaacttcacggacaggaagactgctggagaagagaagcgtgttagcccatttgaggtctggggaatcatgtaaagggtacccagacctcacttttagttatttacatcaatgagttctttcagggaaccaaacccagaattcggtgcaaaagccaaacatcttggtgggatttgataaatgccttgggacctggagtgctgggcttgtgcacaggaagagcaccagccgctgagtcaggatcctgtcagttccatgagctattcctctttggtttggctttttgatatgattaaaattattttttattccttttt

SEQ ID NO: 437024 - DNA, 3658 bp, Homo sapiens
  misc_feature (1524)..(1524): n is a, c, g, or t
ctgtctgagcatttcactgcggagcctgagcgcgcctgcctgggaaaacactgcagcggtgctcggactcctcctgtccagcaggaggcgcggcccggcagctcccgcatgcgcagtgcgctcggtgtcagacggcccggatcccggttaccggcccctcgctcgctgctcgccagcccagactcggccctggcagtggcggctggcgattcggaccgatccgacctgggcggaggtggcccgcgccccgcggcatgagccggtgaccaagctcggggccgagcgggaggcagccgtggccgaggagtgtgaggaagaggctgtctgtgtcattatgtgtgcgtcggtcaagtataatatccggggtcctgccctcatcccaagaatgaagaccaagcaccgaatctactatatcaccctcttctccattgtcctcctgggcctcattgccactggcatgtttcagttttggccccattctatcgagtcctcaaatgactggaatgtagagaagcgcagcatccgtgatgtgccggttgttaggctgccagccgacagtcccatcccagagcggggggatctcagttgcagaatgcacacgtgttttgatgtctatcgctgtggcttcaacccaaagaacaaaatcaaggtgtatatctatgctctgaaaaagtacgtggatgactttggcgtctctgtcagcaacaccatctcccgggagtataatgaactgctcatggccatctcagacagtgactactacactgatgacatcaaccgggcctgtctgtttgttccctccatcgatgtgcttaaccagaacacactgcgcatcaaggagacagcacaagcgatggcccagctctctaggtgggatcgaggtacgaatcacctgttgttcaacatgttgcctggaggtcccccagattataacacagccctggatgtccccagagacagggccctgttggctggtggcggcttttctacgtggacttaccggcaaggctacgatgtcagcattcctgtctatagtccactgtcagctgaggtggatcttccagagaaaggaccaggtccacggcaatacttcctcctgtcatctcaggtgggtctccatcctgagtacagagaggacctagaagccctccaggtcaaacatggagagtcagtgttagtactcgataaatgcaccaacctctcagagggtgtcctttctgtccgtaagcgctgccacaagcaccaggtcttcgattacccacaggtgctacaggaggctactttctgtgtggttcttcgtggagctcggctgggccaggcagtattgagcgatgtgttacaagctggctgtgtcccggttgtcattgcagactcctatattttgcctttctctgaagttcttgactggaagagagcatctgtggttgtaccagaagaaaagatgtcagatgtgtacagtattttgcagagcatcccccaaagacagattgaagaaatgcagagacagctcttcatggaaccagncaggagagagaactggtcagctgctaatcaccaaatgaactccctgatctggcctagggaacagtgggattcacagattatcaatgaccggatctatccatatgctgccatctcctatgaagaatggaatgaccctcctgctgtgaagtggggcagcgtgagcaatccactcttcctcccgctgatcccaccacagtctcaagggttcaccgccatagtcctcacctacgaccgagtagagagcctcttccgggtcatcactgaagtgtccaaggtgcccagtctatccaaactacttgtcgtctggaataatcagaataaaaaccctccagaagattctctctggcccaaaatccgggttccattaaaagttgtgaggactgctgaaaacaagttaagtaaccgtttcttcccttatgatgaaatcgagacagaagctgttctggccattgatgatgatatcattatgctgacctctgacgagctgcaatttggttatgaggtctggcgggaatttcctgaccggttggtgggttacccgggtcgtctgcatctctgggaccatgagatgaataagtggaagtatgagtctgagtggacgaatgaagtgtccatggtgctcactggggcagctttttatcacaagtattttaattacctgtatacctacaaaatgcctggggatatcaagaactgggtagatgctcatatgaactgtgaagatattgccatgaacttcctggtggccaacgtcacgggaaaagcagttatcaaggtaaccccacgaaagaaattcaagtgtcctgagtgcacagccatagatgggctttcactagaccaaacacacatggtggagaggtcagagtgcatcaacaagtttgcttcagtcttcgggaccatgcctctcaaggtggtggaacaccgagctgaccctgtcctgtacaaagatgactttcctgagaagctgaagagcttccccaacattggcagcttatgaaacgtgtcattggtggaggtctgaatgtgaggctgggacagagggagagaacaaggcctcccagcactctgatgtcagagtagtaggttaagggtggaaggttgacctacttggatcttggcatgcacccacctaacccactttctcaagaacaagaacctagaatgaatatccaagcacctcgagctatgcaacctctgttcttgtatttcttatgatctctgatgggttcttctcgaaaatgccaagtggaagactttgtggcatgctccagatttaaatccagctgaggctccctttgttttcagttccatgtaacaatctggaaggaaacttcacggacaggaagactgctggagaagagaagcgtgttagcccatttgaggtctggggaatcatgtaaagggtacccagacctcacttttagttatttacatcaatgagttctttcagggaaccaaacccagaattcggtgcaaaagccaaacatcttggtgggatttgataaatgccttgggacctggagtgctgggcttgtgcacaggaagagcaccagccgctgagtcaggatcctgtcagttccatgagctattcctctttggtttggctttttgatatgattaaaattattttttattcctttttatactgtgtcttaaacaccaattcctgatagtccaaggaaccacctttctcccttgatatatttaactccgtctttggcctgacaacagtcttctgcccatgtctgggaacacacgccaggaggaatgtctgataccctctgcatcaagcgtaagaaggtcccaaatcataaccattttaagaacagatgactcagaaacctccagaggaatctgtttgcttcctgattagatccagtcaatgttttaaaggtattgtcagagaaaaacagagggtctgtactagccatgcaaggagtcgctctagctggtacccgtaaaagttgtgggattgtgaccccccatcccaaggggatgccaaaatttctctcattcttttggtataaacttaacattagccagggaggttctggctaacgttaaatgctgctatacaactgctttgcaacagttgctggtatatttaaatcattaaatttcagcatttactaat

SEQ ID NO: 437025 - DNA, 3725 bp, Homo sapiens
ctgtctgagcatttcactgcggagcctgagcgcgcctgcctgggaaaacactgcagcggtgctcggactcctcctgtccagcaggaggcgcggcccggcagctcccgcatgcgcagtgcgctcggtgtcagacggcccggatcccggttaccggcccctcgctcgctgctcgccagcccagactcggccctggcagtggcggctggcgattcggaccgatccgacctgggcggaggtggcccgcgccccgcggcatgagccggtgaccaagctcggggccgagcgggaggcagccgtggccgagccacagggatctgattcctcccagggggatgtcctgcgcctcagggtccggtggtggcctgcggcatcccttgcggtgccagaagccgtgggacgaggagtgtgaggaagaggctgtctgtgtcattatgtgtgcgtcggtcaagtataatatccggggtcctgccctcatcccaagaatgaagaccaagcaccgaatctactatatcaccctcttctccattgtcctcctgggcctcattgccactggcatgtttcagttttggccccattctatcgagtcctcaaatgactggaatgtagagaagcgcagcatccgtgatgtgccggttgttaggctgccagccgacagtcccatcccagagcggggggatctcagttgcagaatgcacacgtgttttgatgtctatcgctgtggcttcaacccaaagaacaaaatcaaggtgtatatctatgctctgaaaaagtacgtggatgactttggcgtctctgtcagcaacaccatctcccgggagtataatgaactgctcatggccatctcagacagtgactactacactgatgacatcaaccgggcctgtctgtttgttccctccatcgatgtgcttaaccagaacacactgcgcatcaaggagacagcacaagcgatggcccagctctctaggtgggatcgaggtacgaatcacctgttgttcaacatgttgcctggaggtcccccagattataacacagccctggatgtccccagagacagggccctgttggctggtggcggcttttctacgtggacttaccggcaaggctacgatgtcagcattcctgtctatagtccactgtcagctgaggtggatcttccagagaaaggaccaggtccacggcaatacttcctcctgtcatctcaggtgggtctccatcctgagtacagagaggacctagaagccctccaggtcaaacatggagagtcagtgttagtactcgataaatgcaccaacctctcagagggtgtcctttctgtccgtaagcgctgccacaagcaccaggtcttcgattacccacaggtgctacaggaggctactttctgtgtggttcttcgtggagctcggctgggccaggcagtattgagcgatgtgttacaagctggctgtgtcccggttgtcattgcagactcctatattttgcctttctctgaagttcttgactggaagagagcatctgtggttgtaccagaagaaaagatgtcagatgtgtacagtattttgcagagcatcccccaaagacagattgaagaaatgcagagacaggcccggtggttctgggaagcgtacttccagtcaattaaagccattgccctggccaccctgcagattatcaatgaccggatctatccatatgctgccatctcctatgaagaatggaatgaccctcctgctgtgaagtggggcagcgtgagcaatccactcttcctcccgctgatcccaccacagtctcaagggttcaccgccatagtcctcacctacgaccgagtagagagcctcttccgggtcatcactgaagtgtccaaggtgcccagtctatccaaactacttgtcgtctggaataatcagaataaaaaccctccagaagattctctctggcccaaaatccgggttccattaaaagttgtgaggactgctgaaaacaagttaagtaaccgtttcttcccttatgatgaaatcgagacagaagctgttctggccattgatgatgatatcattatgctgacctctgacgagctgcaatttggttatgaggtctggcgggaatttcctgaccggttggtgggttacccgggtcgtctgcatctctgggaccatgagatgaataagtggaagtatgagtctgagtggacgaatgaagtgtccatggtgctcactggggcagctttttatcacaagtattttaattacctgtatacctacaaaatgcctggggatatcaagaactgggtagatgctcatatgaactgtgaagatattgccatgaacttcctggtggccaacgtcacgggaaaagcagttatcaaggtaaccccacgaaagaaattcaagtgtcctgagtgcacagccatagatgggctttcactagaccaaacacacatggtggagaggtcagagtgcatcaacaagtttgcttcagtcttcgggaccatgcctctcaaggtggtggaacaccgagctgaccctgtcctgtacaaagatgactttcctgagaagctgaagagcttccccaacattggcagcttatgaaacgtgtcattggtggaggtctgaatgtgaggctgggacagagggagagaacaaggcctcccagcactctgatgtcagagtagtaggttaagggtggaaggttgacctacttggatcttggcatgcacccacctaacccactttctcaagaacaagaacctagaatgaatatccaagcacctcgagctatgcaacctctgttcttgtatttcttatgatctctgatgggttcttctcgaaaatgccaagtggaagactttgtggcatgctccagatttaaatccagctgaggctccctttgttttcagttccatgtaacaatctggaaggaaacttcacggacaggaagactgctggagaagagaagcgtgttagcccatttgaggtctggggaatcatgtaaagggtacccagacctcacttttagttatttacatcaatgagttctttcagggaaccaaacccagaattcggtgcaaaagccaaacatcttggtgggatttgataaatgccttgggacctggagtgctgggcttgtgcacaggaagagcaccagccgctgagtcaggatcctgtcagttccatgagctattcctctttggtttggctttttgatatgattaaaattattttttattcctttttatactgtgtcttaaacaccaattcctgatagtccaaggaaccacctttctcccttgatatatttaactccgtctttggcctgacaacagtcttctgcccatgtctgggaacacacgccaggaggaatgtctgataccctctgcatcaagcgtaagaaggtcccaaatcataaccattttaagaacagatgactcagaaacctccagaggaatctgtttgcttcctgattagatccagtcaatgttttaaaggtattgtcagagaaaaacagagggtctgtactagccatgcaaggagtcgctctagctggtacccgtaaaagttgtgggattgtgaccccccatcccaaggggatgccaaaatttctctcattcttttggtataaacttaacattagccagggaggttctggctaacgttaaatgctgctatacaactgctttgcaacagttgctggtatatttaaatcattaaatttcagcatttactaat

SEQ ID NO: 437026 - DNA, 2139 bp, Homo sapiens
ctgtctgagcatttcactgcggagcctgagcgcgcctgcctgggaaaacactgcagcggtgctcggactcctcctgtccagcaggaggcgcggcccggcagctcccgcatgcgcagtgcgctcggtgtcagacggcccggatcccggttaccggcccctcgctcgctgctcgccagcccagactcggccctggcagtggcggctggcgattcggaccgatccgacctgggcggaggtggcccgcgccccgcggcatgagccggtgaccaagctcggggccgagcgggaggcagccgtggccgaggagtgtgaggaagaggctgtctgtgtcattatgtgtgcgtcggtcaagtataatatccggggtcctgccctcatcccaagaatgaagaccaagcaccgaatctactatatcaccctcttctccattgtcctcctgggcctcattgccactggcatgtttcagttttggccccattctatcgagtcctcaaatgactggaatgtagagaagcgcagcatccgtgatgtgccggttgttaggctgccagccgacagtcccatcccagagcggggggatctcagttgcagaatgcacacgtgttttgatgtctatcgctgtggcttcaacccaaagaacaaaatcaaggtgtatatctatgctctgaaaaagtacgtggatgactttggcgtctctgtcagcaacaccatctcccgggagtataatgaactgctcatggccatctcagacagtgactactacactgatgacatcaaccgggcctgtctgtttgttccctccatcgatgtgcttaaccagaacacactgcgcatcaaggagacagcacaagcgatggcccagctctctaggtgggatcgaggtacgaatcacctgttgttcaacatgttgcctggaggtcccccagattataacacagccctggatgtccccagagacagggccctgttggctggtggcggcttttctacgtggacttaccggcaaggctacgatgtcagcattcctgtctatagtccactgtcagctgaggtggatcttccagagaaaggaccaggtccacggcaatacttcctcctgtcatctcaggtgggtctccatcctgagtacagagaggacctagaagccctccaggtcaaacatggagagtcagtgttagtactcgataaatgcaccaacctctcagagggtgtcctttctgtccgtaagcgctgccacaagcaccaggtcttcgattacccacaggtgctacaggaggctactttctgtgtggttcttcgtggagctcggctgggccaggcagtattgagcgatgtgttacaagctggctgtgtcccggttgtcattgcagactcctatattttgcctttctctgaagttcttgactggaagagagcatctgtggttgtaccagaagaaaagatgtcagatgtgtacagtattttgcagagcatcccccaaagacagattgaagaaatgcagagacaggcccggtggttctgggaagcgtacttccagtcaattaaagccattgccctggccaccctgcagattatcaatgaccggatctatccatatgctgccatctcctatgaagaatggaatgaccctcctgctgtgaagtggggcagcgtgagcaatccactcttcctcccgctgatcccaccacagtctcaagggttcaccgccatagtcctcacctacgaccgagtagagagcctcttccgggtcatcactgaagtgtccaaggtgcccagtctatccaaactacttgtcgtctggaataatcagaataaaaaccctccagaagattctctctggcccaaaatccgggttccattaaaagttgtgaggactgctgaaaacaagttaagtaaccgtttcttcccttatgatgaaatcgagacagaagctgttctggccattgatgatgatatcattatgctgacctctgacgagctgcaatttggttatgaggtctggcgggaatttcctgaccggttggtgggttacccgggtcgtctgcatctctgggaccatgagatgaataagtggaagtatgagtctgagtggacgaatgaagtgtccatgtgcgcgtaagggcagcaggtaccgaccta

SEQ ID NO: 437027 - DNA, 2673 bp, Homo sapiens
  misc_feature (11)..(11): n is a, c, g, or t
acagctccagntacaacagctccagtacaacagctgtggacttaccggcaaggctacgatgtcagcattcctgtctatagtccactgtcagctgaggtggatcttccagagaaaggaccaggtccacggcaatacttcctcctgtcatctcaggtgggtctccatcctgagtacagagaggacctagaagccctccaggtcaaacatggagagtcagtgttagtactcgataaatgcaccaacctctcagagggtgtcctttctgtccgtaagcgctgccacaagcaccaggtcttcgattacccacaggtgctacaggaggctactttctgtgtggttcttcgtggagctcggctgggccaggcagtattgagcgatgtgttacaagctggctgtgtcccggttgtcattgcagactcctatattttgcctttctctgaagttcttgactggaagagagcatctgtggttgtaccagaagaaaagatgtcagatgtgtacagtattttgcagagcatcccccaaagacagattgaagaaatgcagagacaggcccggtggttctgggaagcgtacttccagtcaattaaagccattgccctggccaccctgcagattatcaatgaccggatctatccatatgctgccatctcctatgaagaatggaatgaccctcctgctgtgaagtggggcagcgtgagcaatccactcttcctcccgctgatcccaccacagtctcaagggttcaccgccatagtcctcacctacgaccgagtagagagcctcttccgggtcatcactgaagtgtccaaggtgcccagtctatccaaactacttgtcgtctggaataatcagaataaaaaccctccagaagattctctctggcccaaaatccgggttccattaaaagttgtgaggactgctgaaaacaagttaagtaaccgtttcttcccttatgatgaaatcgagacagaagctgttctggccattgatgatgatatcattatgctgacctctgacgagctgcaatttggttatgaggtctggcgggaatttcctgaccggttggtgggttacccgggtcgtctgcatctctgggaccatgagatgaataagtggaagtatgagtctgagtggacgaatgaagtgtccatggtgctcactggggcagctttttatcacaagtattttaattacctgtatacctacaaaatgcctggggatatcaagaactgggtagatgctcatatgaactgtgaagatattgccatgaacttcctggtggccaacgtcacgggaaaagcagttatcaaggtaaccccacgaaagaaattcaagtgtcctgagtgcacagccatagatgggctttcactagaccaaacacacatggtggagaggtcagagtgcatcaacaagtttgcttcagtcttcgggaccatgcctctcaaggtggtggaacaccgagctgaccctgtcctgtacaaagatgactttcctgagaagctgaagagcttccccaacattggcagcttatgaaacgtgtcattggtggaggtctgaatgtgaggctgggacagagggagagaacaaggcctcccagcactctgatgtcagagtagtaggttaagggtggaaggttgacctacttggatcttggcatgcacccacctaacccactttctcaagaacaagaacctagaatgaatatccaagcacctcgagctatgcaacctctgttcttgtatttcttatgatctctgatgggttcttctcgaaaatgccaagtggaagactttgtggcatgctccagatttaaatccagctgaggctccctttgttttcagttccatgtaacaatctggaaggaaacttcacggacaggaagactgctggagaagagaagcgtgttagcccatttgaggtctggggaatcatgtaaagggtacccagacctcacttttagttatttacatcaatgagttctttcagggaaccaaacccagaattcggtgcaaaagccaaacatcttggtgggatttgataaatgccttgggacctggagtgctgggcttgtgcacaggaagagcaccagccgctgagtcaggatcctgtcagttccatgagctattcctctttggtttggctttttgatatgattaaaattattttttattcctttttatactgtgtcttaaacaccaattcctgatagtccaaggaaccacctttctcccttgatatatttaactccgtctttggcctgacaacagtcttctgcccatgtctgggaacacacgccaggaggaatgtctgataccctctgcatcaagcgtaagaaggtcccaaatcataaccattttaagaacagatgactcagaaacctccagaggaatctgtttgcttcctgattagatccagtcaatgttttaaaggtattgtcagagaaaaacagagggtctgtactagccatgcaaggagtcgctctagctggtacccgtaaaagttgtgggattgtgaccccccatcccaaggggatgccaaaatttctctcattcttttggtataaacttaacattagccagggaggttctggctaacgttaaatgctgctatacaactgctttgcaacagttgctggtatatttaaatcattaaatttcagcatttactaat

SEQ ID NO: 437028 - DNA, 2436 bp, Homo sapiens
gactaggctaggtacgaggccgtgttaatcggccgacgctgccacaagcaccaggtcttcgattacccacaggtgctacaggaggctactttctgtgtggttcttcgtggagctcggctgggccaggcagtattgagcgatgtgttacaagctggctgtgtcccggttgtcattgcagactcctatattttgcctttctctgaagttcttgactggaagagagcatctgtggttgtaccagaagaaaagatgtcagatgtgtacagtattttgcagagcatcccccaaagacagattgaagaaatgcagagacaggcccggtggttctgggaagcgtacttccagtcaattaaagccattgccctggccaccctgcagattatcaatgaccggatctatccatatgctgccatctcctatgaagaatggaatgaccctcctgctgtgaagtggggcagcgtgagcaatccactcttcctcccgctgatcccaccacagtctcaagggttcaccgccatagtcctcacctacgaccgagtagagagcctcttccgggtcatcactgaagtgtccaaggtgcccagtctatccaaactacttgtcgtctggaataatcagaataaaaaccctccagaagattctctctggcccaaaatccgggttccattaaaagttgtgaggactgctgaaaacaagttaagtaaccgtttcttcccttatgatgaaatcgagacagaagctgttctggccattgatgatgatatcattatgctgacctctgacgagctgcaatttggttatgaggtctggcgggaatttcctgaccggttggtgggttacccgggtcgtctgcatctctgggaccatgagatgaataagtggaagtatgagtctgagtggacgaatgaagtgtccatggtgctcactggggcagctttttatcacaagtattttaattacctgtatacctacaaaatgcctggggatatcaagaactgggtagatgctcatatgaactgtgaagatattgccatgaacttcctggtggccaacgtcacgggaaaagcagttatcaaggtaaccccacgaaagaaattcaagtgtcctgagtgcacagccatagatgggctttcactagaccaaacacacatggtggagaggtcagagtgcatcaacaagtttgcttcagtcttcgggaccatgcctctcaaggtggtggaacaccgagctgaccctgtcctgtacaaagatgactttcctgagaagctgaagagcttccccaacattggcagcttatgaaacgtgtcattggtggaggtctgaatgtgaggctgggacagagggagagaacaaggcctcccagcactctgatgtcagagtagtaggttaagggtggaaggttgacctacttggatcttggcatgcacccacctaacccactttctcaagaacaagaacctagaatgaatatccaagcacctcgagctatgcaacctctgttcttgtatttcttatgatctctgatgggttcttctcgaaaatgccaagtggaagactttgtggcatgctccagatttaaatccagctgaggctccctttgttttcagttccatgtaacaatctggaaggaaacttcacggacaggaagactgctggagaagagaagcgtgttagcccatttgaggtctggggaatcatgtaaagggtacccagacctcacttttagttatttacatcaatgagttctttcagggaaccaaacccagaattcggtgcaaaagccaaacatcttggtgggatttgataaatgccttgggacctggagtgctgggcttgtgcacaggaagagcaccagccgctgagtcaggatcctgtcagttccatgagctattcctctttggtttggctttttgatatgattaaaattattttttattcctttttatactgtgtcttaaacaccaattcctgatagtccaaggaaccacctttctcccttgatatatttaactccgtctttggcctgacaacagtcttctgcccatgtctgggaacacacgccaggaggaatgtctgataccctctgcatcaagcgtaagaaggtcccaaatcataaccattttaagaacagatgactcagaaacctccagaggaatctgtttgcttcctgattagatccagtcaatgttttaaaggtattgtcagagaaaaacagagggtctgtactagccatgcaaggagtcgctctagctggtacccgtaaaagttgtgggattgtgaccccccatcccaaggggatgccaaaatttctctcattcttttggtataaacttaacattagccagggaggttctggctaacgttaaatgctgctatacaactgctttgcaacagttgctggtatatttaaatcattaaatttcagcatttactaat

SEQ ID NO: 437029 - DNA, 2633 bp, Homo sapiens
ttgtcgaccaagccagtagtaatagttattgttacttgctctgttcagcacaactgtagttcacttgaacttcactgtcattccctacgctcctctcttactgagaagcatgggtgggattcagggctgtgggacaagctacagcctactctggagcactcacccccatgactcagtccagcctgtctcttgggaagtttattgcaatgtgcagacggatgaatttctgcttttcatgccacctctctgaggtatgtattctatcttgagtatgtacaagatgataccttttggctgggcacagtggctcgtgcctgtaatcccagcactttgggagaccaagatgggcggatcacttgaggtcaggagtttgagaccagcctggccaacatggtgaaaccccgtctctactaaaaatataaaaattagccgggcgtagtacatgcctgtaatcccagctactcccgaggctgaggcagaattgcttgaacccaggaggcggaggttgcagtgagctgagatcgcgccgctgcactccagcctaagtgacagagtgagacacgttaagaagaaaaaaaaaaaaaaggataccttcatttctgactcaatatcctagatccaaaggacaggaaattagggaaggcttcaccctggtgggatcaagataagaagatcccatacttcttcccaggtaaggaggcctgtggcaggtcatgattcaaagctgacttggaatggcagaaactgctgagaggccacccttgcagatttgtgccttcaaagatgggtttcatgagtctcagagaggaaaagactggtcagctgggttgattttgcatgattattgaactagagctggtagacacgagcttctcagatggcagtggccagatcctccatctgtgagaatccgccacttgaagtggtttcctgagagtgttcacttggcagttgctgcgtttctcaagcccacctggcgaggtctcgccggacccttccctccaagtgcacttacttcttcatccccatgtacatctctaactttgaaattgtttacctctcctacaaaaatcttaccttttgacctgagcagagtagcaaagccctgttcactctgagggagcagctggcgtgttgaaggggaaaggccaggcacagcactgtcctcagaccacaccatatttggagcagaattgtgatacatgtcatctgtgtctattctggaaggttctttgttcatcactgtactcgcatcagcaaattttcagggtcctacctgtcactccaggctactgagctgaaccctcagaagctgaggtctccgagcatgctaagtaaccttttagaaaagctggaggcaaactgtcgaatgctagcaggctttatgaaaggaaacataaggagtttgtgtagtcagaacttgcttaaatttgcttcggaattaggcaccataaactttagttggagaatgggacttaaattttcacatatatgtatacttaattttcagcaattatgacacaataaaaagaatatgcaaatttattgttgtttcagaaggttttgcaggactgggaacgctttagtgtcatcaacagtaaacctcagatactgttctgcacagttcagaagtaccataccaggtattgtgagtggcaagaacgccaggggacagagatgcttctggtagatgagggccagagaaaccagctctcctccattttgacagcaatttctcactgtggccatttggcctccattatgttttgagaggaatttcttgagatcttgagaaatcaccatgattaggccaattgtcaatcagtattcagaaactagaaaggaacaatgagatacttgtttatggttctttagggcatatgtttgaaaaccctctcatctcagatctgtatagctggtgtgtgtttgtgtccataaatacacgtgcattgctgtcgtgcccattaagaaagggggagtaagtaaaagaggaatcgctcagatctttccttggatgaacagcagtggcgtggttggtgtgttgactgtgaacaggctgacttagctgttgatgtatactcagaacctccatctcctcccagaccctgcacttttccttctctgcagtctgattctctaatgactgtcactggacaaaccccagttttatgctcgcttagtaaaaataagtttaaacatttcatggtggttgacagaactttgtccccaaacatgcggattcaattccttaaaactcgttgaacgtttataccaaaggtcccgccccgcaggtgtgtatgtggtgcacagagggtgaggtttggagcatcgggcactgtgtgcattgctaaggggacatagtgagacaatgtgggatttaactaaaaacacatcaattgtgtgtcacattaccagtgttgtcaggtatttgttcttaattgttattgtaatatattttcagttgtttttctaatttaattctctccgtctgttgtctgactgtgaactgctaacagtgttaaacttgatgtaaataaatgaggcccttgaaagggactgctttctctgtcttctcacaaggtttgccaagttgtgttctgttttaaataaaggttgcaatattttattggcaa

SEQ ID NO: 437030 - DNA, 2950 bp, Homo sapiens
  misc_feature (2950)..(2950): n is a, c, g, or t
ttgtcgaccaagccagtagtaatagttattgttacttgctctgttcagcacaactgtagttcacttgaacttcactgtcattccctacgctcctctcttactgagaagcatgggtgggattcagggctgtgggacaagctacagcctactctggagcactcacccccatgactcagtccagcctgtctcttgggaagtttattgcaatgtgcagacggatgaatttctgcttttcatgccacctctctgaggtatgtattctatcttgagtatgtacaagatgataccttttggctgggcacagtggctcgtgcctgtaatcccagcactttgggagaccaagatgggcggatcacttgaggtcaggagtttgagaccagcctggccaacatggtgaaaccccgtctctactaaaaatataaaaattagccgggcgtagtacatgcctgtaatcccagctactcccgaggctgaggcagaattgcttgaacccaggaggcggaggttgcagtgagctgagatcgcgccgctgcactccagcctaagtgacagagtgagacacgttaagaagaaaaaaaaaaaaaaggataccttcatttctgactcaatatcctagatccaaaggacaggaaattagggaaggcttcaccctggtgggatcaagataagaagatcccatacttcttcccaggtaaggaggcctgtggcaggtcatgattcaaagctgacttggaatggcagaaactgctgagaggccacccttgcagatttgtgccttcaaagatgggtttcatgagtctcagagaggaaaagactggtcagctgggttgattttgcatgattattgaactagagctggtagacacgagcttctcagatggcagtggccagatcctccatctgtgagaatccgccacttgaagtggtttcctgagagtgttcacttggcagttgctgcgtttctcaagcccacctggcgaggtctcgccggacccttccctccaagtgcacttacttcttcatccccatgtacatctctaactttgaaattgtttacctctcctacaaaaatcttaccttttgacctgagcagagtagcaaagccctgttcactctgagggagcagctggcgtgttgaaggggaaaggccaggcacagcactgtcctcagaccacaccatatttggagcagaattgtgatacatgtcatctgtgtctattctggaaggttctttgttcatcactgtactcgcatcagcaaattttcagggtcctacctgtcactccaggctactgagctgaaccctcagaagctgaggtctccgagcatgctaagtaaccttttagaaaagctggaggcaaactgtcgaatgctagcaggctttatgaaaggaaacataaggagtttgtgtagtcagaacttgcttaaatttgcttcggaattaggcaccataaactttagttggagaatgggacttaaattttcacatatatgtatacttaattttcagcaattatgacacaataaaaagaatatgcaaatttattgttgtttcagaaggttttgcaggactgggaacgctttagtgtcatcaacagtaaacctcagatactgttctgcacagttcagaagtaccataccaggtattgtgagtggcaagaacgccaggggacagagatgcttctggtagatgagggccagagaaaccagctctcctccattttgacagcaatttctcactgtggccatttggcctccattatgttttgagaggaatttcttgagatcttgagaaatcaccatgattaggccaattgtcaatcagtattcagaaactagaaaggaacaatgagatacttgtttatggttctttagggcatatgtttgaaaaccctctcatctcagatctgtatagctggtgtgtgtttgtgtccataaatacacgtgcattgctgtcgtgcccattaagaaagggggagtaagtaaaagaggaatcgctcagatctttccttggatgaacagcagtggcgtggttggtgtgttgactgtgaacaggctgacttagctgttgatgtatactcagaacctccatctcctcccagaccctgcacttttccttctctgcagtctgattctctaatgactgtcactggacaaaccccagttttatgctcgcttagtaaaaataagtttaaacatttcatggtggttgacagaactttgtccccaaacatgcggattcaattccttaaaactcgttgaacgtttataccaaaggtcccgccccgcaggtgtgtatgtggtgcacagagggtgaggtttggagcatcgggcactgtgtgcattgctaaggggacatagtgagacaatgtgggatttaactaaaaacacatcaattgtgtgtcacattaccagtgttgtcaggtatttgttcttaattgttattgtaatatattttcagttgtttttctaatttaattctctccgtctgttgtctgactgtgaactgctaacagtgttaaacttgatgtaaataaatgaggcccttgaaagggaaaaaaaaaaaaacaaaaaaaaaaaaaaaaaaaaaaaaagggggggggggggaaaaaaatctccgggggggcaaagttattggtatcccatttttgtgagcagggagggcccataaggggggcaggaataaaagaagcgccgggcgcgggtaacaaagggcgtgttgcggaaactggtcggtgacactgcggacagcccactggtctgggcactgtgggaccacccccaggaggtttaggcccggacaaaacactagggctagtggacccagcgctgcgtcgtgaattggctgctttttaaattacggacaacatgggggcagactagacgcacgacgaagctagacgatgagacacgacgcagcacaaaacaagcagcagacagtaaagacgan

SEQ ID NO: 437031 - DNA, 1530 bp, Homo sapiens
ttgtcgaccaagccagtagtaatagttattgttacttgctctgttcagcacaactgtagttcacttgaacttcactgtcattccctacgctcctctcttactgagaagcatgggtgggattcagggctgtgggacaagctacagcctactctggagcactcacccccatgactcagtccagcctgtctcttgggaagtttattgcaatgtgcagacggatgaatttctgcttttcatgccacctctctgaggtatgtattctatcttgagtatgtacaagatgataccttttggctgggcacagtggctcgtgcctgtaatcccagcactttgggagaccaagatgggcggatcacttgaggtcaggagtttgagaccagcctggccaacatggtgaaaccccgtctctactaaaaatataaaaattagccgggcgtagtacatgcctgtaatcccagctactcccgaggctgaggcagaattgcttgaacccaggaggcggaggttgcagtgagctgagatcgcgccgctgcactccagcctaagtgacagagtgagacacgttaagaagaaaaaaaaaaaaaaggataccttcatttctgactcaatatcctagatccaaaggacaggaaattagggaaggcttcaccctggtgggatcaagataagaagatcccatacttcttcccaggtaaggaggcctgtggcaggtcatgattcaaagctgacttggaatggcagaaactgctgagaggccacccttgcagatttgtgccttcaaagatgggtttcatgagtctcagagaggaaaagactggtcagctgggttgattttgcatgattattgaactagagctggtagacacgagcttctcagatggcagtggccagatcctccatctgtgagaatccgccacttgaagtggtttcctgagagtgttcacttggcagttgctgcgtttctcaagcccacctggcgaggtctcgccggacccttccctccaagtgcacttacttcttcatccccatgtacatctctaactttgaaattgtttacctctcctacaaaaatcttaccttttgacctgagcagagtagcaaagccctgttcactctgagggagcagctggcgtgttgaaggggaaaggccaggcacagcactgtcctcagaccacaccatatttggagcagaattgtgatacatgtcatctgtgtctattctggaaggttctttgttcatcactgtactcgcatcagcaaattttcagggtcctacctgtcactccaggctactgagctgaaccctcagaagctgaggtctccgagcatgctaagtaaccttttagaaaagctggaggcaaactgtcgaatgctagcaggctttatgaaaggaaacataaggagtttgtgtagtcagaacttgcttaaatttgcttcggaattaggcaccataaactttagtttaacttccaaaattcaccagtactgccgagaaatgcgggtcctgaggttccagagaagtggggagtg

SEQ ID NO: 437032 - DNA, 1358 bp, Homo sapiens
ttatatgctgtctcagtggaacaatcttttgttggattgaaacagctaatcagctgcagaaactggagggcagcagtggacctgtgcggacgtctcctcacagcccacggccaggctacggcaaagagcgggctgctcaccagccacacgacagattcaccttgcagctctggtttgtcaggctggcactactagtgaagttgggccttttccagaatgctgagatggaatttgaacccttcggaaatcttgatcagccagatctttattacgagtactacccgcacgtgtaaccctgggcgcaggggctccatggtcccctttcggatgcgcatcttgcacgcggagcttcagaagtaccataccaggtattgtgagtggcaagaacgccaggggacagagatgcttctggtagatgagggccagagaaaccagctctcctccattttgacagcaatttctcactgtggccatttggcctccattatgttttgagaggaatttcttgagatcttgagaaatcaccatgattaggccaattgtcaatcagtattcagaaactagaaaggaacaatgagatacttgtttatggttctttagggcatatgtttgaaaaccctctcatctcagatctgtatagctggtgtgtgtttgtgtccataaatacacgtgcattgctgtcgtgcccattaagaaagggggagtaagtaaaagaggaatcgctcagatctttccttggatgaacagcagtggcgtggttggtgtgttgactgtgaacaggctgacttagctgttgatgtatactcagaacctccatctcctcccagaccctgcacttttccttctctgcagtctgattctctaatgactgtcactggacaaaccccagttttatgctcgcttagtaaaaataagtttaaacatttcatggtggttgacagaactttgtccccaaacatgcggattcaattccttaaaactcgttgaacgtttataccaaaggtcccgccccgcaggtgtgtatgtggtgcacagagggtgaggtttggagcatcgggcactgtgtgcattgctaaggggacatagtgagacaatgtgggatttaactaaaaacacatcaattgtgtgtcacattaccagtgttgtcaggtatttgttcttaattgttattgtaatatattttcagttgtttttctaatttaattctctccgtctgttgtctgactgtgaactgctaacagtgttaaacttgatgtaaataaatgaggcccttgaaagggactgctttctctgtcttctcacaaggtttgccaagttgtgttctgttttaaataaaggttgcaatattttattggcaa

SEQ ID NO: 437033 - DNA, 795 bp, Homo sapiens
ctggctcataataataaaagcttctacttacatagcattactttgttccaggcaattttctaagtgtgttatatatattaactcactccatcttcacaaccactctgaatagaagctgttgttatctgtgttttgcaggtggaaaatgaagcacagagaagttcagtgatggacctcagatactaccagcagaaagcagaagagctaggatttcaacttaggatgtctggatccacagtctgcactcctacccactatgctacactgcctctaactatgaggaagcaagggcatttttttttttctggtgactaaaaagataagagttcaagtatgtggctcctgataatctaacttatacagcctggaaaaattgatagttactatatccagactgtctcattcaattaacagtttctcaagtaatcttctagttactgtcgtattttatctgtatcaacttagcaaaccaagtccaaaacattttatatgtgtctatctttcctgctgttcatattattgagttagccaaataaattcaattttttttctactgtttgtttctcacaaattatgactggcatctgtatatctgggaaggttctactgcattgctgtattatcactatataattataacgagatcacagagtgcattgatgaaggccatgttgagacatgatgaaacagggtccattgtgactgggtgaaactgtcttcaatttcctggtctataaagcagaggtgagaacaactgactcatagcattgcggtgaatattagattaaataagat

SEQ ID NO: 437034 - DNA, 591 bp, Homo sapiens
gatcagattgtggaaagcgcacgtaattgtcacgcggcactacgtcgacccgcctttgttagaaggaaggatctcactatgttgccttgcatggactggaactccttggctcaagaaatcttcttgcctcagcctcccaaatagctaggactatatgcacatgctactacacctagtggaaaatgaagcacagagaagttcagtgatggacctcagatactaccagcagaaagcagaagagctaggatttcaacttaggatgtctggatccacagtctgcactcctacccactatgctacactgcctctaactatgaggaagcaagggcatttttttttttctggtgactaaaaagataagagttcaagtatgtggctcctgataatctaacttatacagcctggaaaaattgatagttactatatccagactgtctcattcaattaacagtttctcaagtaatcttctagttactgtcgtattttatctgtatcaacttagcaaaccaagtccaaaacattttatatgtgtctatctttcctgctgttcatattattgagttagccaaataaattcaattttttttctac

SEQ ID NO: 437035 - DNA, 570 bp, Homo sapiens
attcgtagggttgtacccgaaaaaagagggacccttcaggtgcaacaggatctcactatgttgccttgcatggactggaactccttggctcaagaaatcttcttgcctcagcctcccaaatagctaggactatatgcacatgctactacacctagtggaaaatgaagcacagagaagttcagtgatggacctcagatactaccagcagaaagcagaagagctaggatttcaacttaggatgtctggatccacagtctgcactcctacccactatgctacactgcctctaactatgaggaagcaagggcatttttttttttctggtgactaaaaagataagagttcaagtatgtggctcctgataatctaacttatacagcctggaaaaattgatagttactatatccagactgtctcattcaattaacagtttctcaagtaatcttctagttactgtcgtattttatctgtatcaacttagcaaaccaagtccaaaacattttatatgtgtctatctttcctgctgttcatattattgagttagccaaataaattcaattttttttctac

SEQ ID NO: 437036 - DNA, 554 bp, Homo sapiens
ctggctcataataataaaagcttctacttacatagcattactttgttccaggcaattttctaagtgtgttatatatattaactcactccatcttcacaaccactctgaatagaagctgttgttatctgtgttttgcaggtggaaaatgaagcacagagaagttcagtgatggacctcagatactaccagcagaaagcagaagagctaggatttcaacttaggatgtctggatccacagtctgcactcctacccactatgctacactgcctctaactatgaggaagcaagggcatttttttttttctggtgactaaaaagataagagttcaagtatgtggctcctgataatctaacttatacagcctggaaaaattgatagttactatatccagactgtctcattcaattaacagtttctcaagtaatcttctagttactgtcgtattttatctgtatcaacttagcaaaccaagtccaaaacattttatatgtgtctatctttcctgctgttcatattattgagttagccaaataaattcaattttttttctac

SEQ ID NO: 437037 - DNA, 651 bp, Homo sapiens
gatcagattgtggaaagcgcacgtaattgtcacgcggcactacgtcgacccgcctttgttagaaggaaggatctcactatgttgccttgcatggactggaactccttggctcaagaaatcttcttgcctcagcctcccaaatagctaggactatatgcacatgctactacacctagtggaaaatgaagcacagagaagttcagtgatggacctcagatactaccagcagaaagcagaagagctaggatttcaacttaggatgtctggatccacagtctgcactcctacccactatgctacactgcctctaactatgaggaagcaagggcatttttttttttctggtgactaaaaagataagagttcaagtatgtggctcctgataatctaacttatacagcctggaaaaattgatagttactatatccagactgtctcattcaattaacagtttctcaagtaatcttctagttactgtcgtattttatctgtatcaacttagcaaaccaagtccaaaacattttatatgtgtctatctttcctgctgttcatattattgagttagccaaataaattcaattttttttctacaaaaaaacccacccacccccttatatctcaatccggcctctttggcctcaccgggggact

SEQ ID NO: 437038 - DNA, 617 bp, Homo sapiens
tatttagccccacccccctatatcatcacgagacaccgttgcccacccccgtttagttggacacaggatctcactatgttgccttgcatggactggaactccttggctcaagaaatcttcttgcctcagcctcccaaatagctaggactatatgcacatgctactacacctagtggaaaatgaagcacagagaagttcagtgatggacctcagatactaccagcagaaagcagaagagctaggatttcaacttaggatgtctggatccacagtctgcactcctacccactatgctacactgcctctaactatgaggaagcaagggcatttttttttttctggtgactaaaaagataagagttcaagtatgtggctcctgataatctaacttatacagcctggaaaaattgatagttactatatccagactgtctcattcaattaacagtttctcaagtaatcttctagttactgtcgtattttatctgtatcaacttagcaaaccaagtccaaaacattttatatgtgtctatctttcctgctgttcatattattgagttagccaaataaattcaattttttttctacaaaagaaaaaaatgctctcgttggcctca

SEQ ID NO: 437039 - DNA, 476 bp, Homo sapiens
tatcctcccccccccccccgacagtcagcacatgatccaacacccaccccaccactttaggtggaaaatgaagcacagagaagttcagtgatggacctcagatactaccagcagaaagcagaagagctaggatttcaacttaggatgtctggatccacagtctgcactcctacccactatgctacactgcctctaactatgaggaagcaagggcatttttttttttctggtgactaaaaagataagagttcaagtatgtggctcctgataatctaacttatacagcctggaaaaattgatagttactatatccagactgtctcattcaattaacagtttctcaagtaatcttctagttactgtcgtattttatctgtatcaacttagcaaaccaagtccaaaacattttatatgtgtctatctttcctgctgttcatattattgagttagccaaataaattcaattttttttctac

SEQ ID NO: 437040 - DNA, 468 bp, Homo sapiens
  misc_feature (28)..(28): n is a, c, g, or t
tagggaagaagtgataaggtagatggtnaagcgttcaattttccttctctaggtggaaaatgaagcacagagaagttcagtgatggacctcagatactaccagcagaaagcagaagagctaggatttcaacttaggatgtctggatccacagtctgcactcctacccactatgctacactgcctctaactatgaggaagcaagggcatttttttttttctggtgactaaaaagataagagttcaagtatgtggctcctgataatctaacttatacagcctggaaaaattgatagttactatatccagactgtctcattcaattaacagtttctcaagtaatcttctagttactgtcgtattttatctgtatcaacttagcaaaccaagtccaaaacattttatatgtgtctatctttcctgctgttcatattattgagttagccaaataaattcaattttttttctac

SEQ ID NO: 437041 - DNA, 811 bp, Homo sapiens
attcgtagggttgtacccgaaaaaagagggacccttcaggtgcaacaggatctcactatgttgccttgcatggactggaactccttggctcaagaaatcttcttgcctcagcctcccaaatagctaggactatatgcacatgctactacacctagtggaaaatgaagcacagagaagttcagtgatggacctcagatactaccagcagaaagcagaagagctaggatttcaacttaggatgtctggatccacagtctgcactcctacccactatgctacactgcctctaactatgaggaagcaagggcatttttttttttctggtgactaaaaagataagagttcaagtatgtggctcctgataatctaacttatacagcctggaaaaattgatagttactatatccagactgtctcattcaattaacagtttctcaagtaatcttctagttactgtcgtattttatctgtatcaacttagcaaaccaagtccaaaacattttatatgtgtctatctttcctgctgttcatattattgagttagccaaataaattcaattttttttctactgtttgtttctcacaaattatgactggcatctgtatatctgggaaggttctactgcattgctgtattatcactatataattataacgagatcacagagtgcattgatgaaggccatgttgagacatgatgaaacagggtccattgtgactgggtgaaactgtcttcaatttcctggtctataaagcagaggtgagaacaactgactcatagcattgcggtgaatattagattaaataagat

SEQ ID NO: 437042 - DNA, 829 bp, Homo sapiens
tatttagccccacccccctatatcatcacgagacaccgttgcccacccccgtttagttggacacaggatctcactatgttgccttgcatggactggaactccttggctcaagaaatcttcttgcctcagcctcccaaatagctaggactatatgcacatgctactacacctagtggaaaatgaagcacagagaagttcagtgatggacctcagatactaccagcagaaagcagaagagctaggatttcaacttaggatgtctggatccacagtctgcactcctacccactatgctacactgcctctaactatgaggaagcaagggcatttttttttttctggtgactaaaaagataagagttcaagtatgtggctcctgataatctaacttatacagcctggaaaaattgatagttactatatccagactgtctcattcaattaacagtttctcaagtaatcttctagttactgtcgtattttatctgtatcaacttagcaaaccaagtccaaaacattttatatgtgtctatctttcctgctgttcatattattgagttagccaaataaattcaattttttttctactgtttgtttctcacaaattatgactggcatctgtatatctgggaaggttctactgcattgctgtattatcactatataattataacgagatcacagagtgcattgatgaaggccatgttgagacatgatgaaacagggtccattgtgactgggtgaaactgtcttcaatttcctggtctataaagcagaggtgagaacaactgactcatagcattgcggtgaatattagattaaataagat

SEQ ID NO: 437043 - DNA, 832 bp, Homo sapiens
gatcagattgtggaaagcgcacgtaattgtcacgcggcactacgtcgacccgcctttgttagaaggaaggatctcactatgttgccttgcatggactggaactccttggctcaagaaatcttcttgcctcagcctcccaaatagctaggactatatgcacatgctactacacctagtggaaaatgaagcacagagaagttcagtgatggacctcagatactaccagcagaaagcagaagagctaggatttcaacttaggatgtctggatccacagtctgcactcctacccactatgctacactgcctctaactatgaggaagcaagggcatttttttttttctggtgactaaaaagataagagttcaagtatgtggctcctgataatctaacttatacagcctggaaaaattgatagttactatatccagactgtctcattcaattaacagtttctcaagtaatcttctagttactgtcgtattttatctgtatcaacttagcaaaccaagtccaaaacattttatatgtgtctatctttcctgctgttcatattattgagttagccaaataaattcaattttttttctactgtttgtttctcacaaattatgactggcatctgtatatctgggaaggttctactgcattgctgtattatcactatataattataacgagatcacagagtgcattgatgaaggccatgttgagacatgatgaaacagggtccattgtgactgggtgaaactgtcttcaatttcctggtctataaagcagaggtgagaacaactgactcatagcattgcggtgaatattagattaaataagat

SEQ ID NO: 437044 - DNA, 681 bp, Homo sapiens
tggatggaggctccagattctaaggtggaaaatgaagcacagagaagttcagtgatggacctcagatactaccagcagaaagcagaagagctaggatttcaacttaggatgtctggatccacagtctgcactcctacccactatgctacactgcctctaactatgaggaagcaagggcatttttttttttctggtgactaaaaagataagagttcaagtatgtggctcctgataatctaacttatacagcctggaaaaattgatagttactatatccagactgtctcattcaattaacagtttctcaagtaatcttctagttactgtcgtattttatctgtatcaacttagcaaaccaagtccaaaacattttatatgtgtctatctttcctgctgttcatattattgagttagccaaataaattcaattttttttctactgtttgtttctcacaaattatgactggcatctgtatatctgggaaggttctactgcattgctgtattatcactatataattataacgagatcacagagtgcattgatgaaggccatgttgagacatgatgaaacagggtccattgtgactgggtgaaactgtcttcaatttcctggtctataaagcagaggtgagaacaactgactcatagcattgcggtgaatattagattaaataagat

SEQ ID NO: 437045 - DNA, 259 bp, Homo sapiens
cccactggaatcattccaactagcctattctaaacctgcttgcccagcttctcccattccctccagtgggaaccacaataaagactcctgcccacattttcctttgtgccttctgcctcctgacccaccccggtgcttccttctgtggcctccctggtggtggggcacatccccaactctttaacaaactatcttttcagtggtagttgtctcctgaacgttggcctccccgtacctgaataaaaatgaaatccacact

SEQ ID NO: 437046 - DNA, 453 bp, Homo sapiens
gcggccgccgggcgcagcatgactgccgtcggcgtgcaggtagccggcgcctggcggggcgctgacccggggtgctgccccgccgtgggaggttgggggtgggaggacggagggaggggcgtacccaccgcgagcgccggcgtcgggctgggggtgcgagcgccccccgtgcccgccccctgttgcaaacctgggtccggaggaggctgggcggggagcaacctcggggggcctgcctgcctcacatagctgctcccggggcgcggactccggctgcttctgctcgcggccttgcaagcacccgaggctcccaaacttcatttggaaagatttttcttctctttggtgtcaccagtgacttactggtcagtttaccataagggtccccctttgtgagaaatgaggcgcgtctggggtggagggacagaatcgacttgcaaagtgaggcttatg

SEQ ID NO: 437047 - DNA, 1817 bp, Homo sapiens
gtctggaagggaggaagggttccccccaaacggtgggtctggtctgttccgggcttcacaggagaccaagcagagaataagacagtgcggagcaggatggagggctcaggggtcttccctgcagaggttcctgggggcgtggcagggctgtggctgacagggtgcttcctacggttttttccaggcccagaggcctttgggccaaaggcagccccgccggtccttctttgaatccttcatccggaccctcatcatcacgtgtgtggccctggctgtggtcctgtcctcggtctccatttgtgatgggcactggctcctggctgaggaccgcctcttcgggctctggcacttctgcaccaccaccaaccagagtgtgccgatctgcttcagagacctgggccaggcccatgtgcccgggctggccgtgggcatgggcctggtacgcagcgtgggcgccttggccgtggtggccgccatttttggcctggagttcctcatggtgtcccagttgtgcgaggacaaacactcacagtgcaagtgggtcatgggttccatcctcctcctggtgtctttcgtcctctcctccggcgggctcctgggttttgtgatcctcctcaggaaccaagtcacactcatcggcttcaccctaatgttttggtgcgaattcactgcctccttcctcctcttcctgaacgccatcagcggccttcacatcaacagcatcacccatccctgggaatgaccgtggaaattttaggccccctccagggacatcagattccacaagaaaatatggtcaaaatgggacttttccagcatgtggcctctggtggggctgggttggacaagggccttgaaacggctgcctgtttgccgataacttgtgggtggtcagccagaaatggccggggggcctctgcacctggtctgcagggccagaggccaggagggtgcctcagtgccaccaactgcacaggcttagccagatgttgattttagaggaagaaaaaaacattttaaaactccttcttgaattttcttccctggactggaatacagttggaagcacaggggtaactggtacctgagctagctgcacagccaaggatagttcatgcctgtttcattgacacgtgctgggataggggctgcagaatccctggggctcccagggttgttaagaatggatcattcttccagctaagggtccaatcagtgcctattcttccaccagctcaaagggccttcgtatgtatgtccctggcttcagctttggtcatgccaaagaggcagagttcaggattccctcagaatgccctgcacacagtaggtttccaaaccatttgactcggtttgcctccctgcccgttgtttaaaccttacaaaccctggataaccccatcttctagcagctggctgtcccctctgggagctctgcctatcagaaccctaccttaaggtgggtttccttccgagaagagttcttgagcaagctctcccaggagggcccacctgactgctaatacacagccctccccaaggcccgtgtgtgcatgtgtctgtcttttgtgagggttagacagcctcagggcaccatttttaatcccagaacacatttcaaagagcacgtatctagacctgctggactctgcagggggtgagggggaacagcgagagcttgggtaatgattaacacccatgctggggatgcatggaggtgaagggggccaggaaccagtggagatttccatccttgccagcacgtctgtacttctgttcattaaagtgctccctttctagtcctttttctgcccaga

SEQ ID NO: 437048 - DNA, 1727 bp, Homo sapiens
tgaccacacacgaaactggagaaggcagtgggtgcagatgacccgacctgactgttcttctgattttaattccaggcacttccctcttggccaggcccagaggcctttgggccaaaggcagccccgccggtccttctttgaatccttcatccggaccctcatcatcacgtgtgtggccctggctgtggtcctgtcctcggtctccatttgtgatgggcactggctcctggctgaggaccgcctcttcgggctctggcacttctgcaccaccaccaaccagagtgtgccgatctgcttcagagacctgggccaggcccatgtgcccgggctggccgtgggcatgggcctggtacgcagcgtgggcgccttggccgtggtggccgccatttttggcctggagttcctcatggtgtcccagttgtgcgaggacaaacactcacagtgcaagtgggtcatgggttccatcctcctcctggtgtctttcgtcctctcctccggcgggctcctgggttttgtgatcctcctcaggaaccaagtcacactcatcggcttcaccctaatgttttggtgcgaattcactgcctccttcctcctcttcctgaacgccatcagcggccttcacatcaacagcatcacccatccctgggaatgaccgtggaaattttaggccccctccagggacatcagattccacaagaaaatatggtcaaaatgggacttttccagcatgtggcctctggtggggctgggttggacaagggccttgaaacggctgcctgtttgccgataacttgtgggtggtcagccagaaatggccggggggcctctgcacctggtctgcagggccagaggccaggagggtgcctcagtgccaccaactgcacaggcttagccagatgttgattttagaggaagaaaaaaacattttaaaactccttcttgaattttcttccctggactggaatacagttggaagcacaggggtaactggtacctgagctagctgcacagccaaggatagttcatgcctgtttcattgacacgtgctgggataggggctgcagaatccctggggctcccagggttgttaagaatggatcattcttccagctaagggtccaatcagtgcctattcttccaccagctcaaagggccttcgtatgtatgtccctggcttcagctttggtcatgccaaagaggcagagttcaggattccctcagaatgccctgcacacagtaggtttccaaaccatttgactcggtttgcctccctgcccgttgtttaaaccttacaaaccctggataaccccatcttctagcagctggctgtcccctctgggagctctgcctatcagaaccctaccttaaggtgggtttccttccgagaagagttcttgagcaagctctcccaggagggcccacctgactgctaatacacagccctccccaaggcccgtgtgtgcatgtgtctgtcttttgtgagggttagacagcctcagggcaccatttttaatcccagaacacatttcaaagagcacgtatctagacctgctggactctgcagggggtgagggggaacagcgagagcttgggtaatgattaacacccatgctggggatgcatggaggtgaagggggccaggaaccagtggagatttccatccttgccagcacgtctgtacttctgttcattaaagtgctccctttctagtcctttttctgcccaga

SEQ ID NO: 437049 - DNA, 1386 bp, Homo sapiens
cggctcggtaccggctcttcgcgtggctcatcgcgaggctcgtggcgtggcgcctggagttcctcatggtgtcccagttgtgcgaggacaaacactcacagtgcaagtgggtcatgggttccatcctcctcctggtgtctttcgtcctctcctccggcgggctcctgggttttgtgatcctcctcaggaaccaagtcacactcatcggcttcaccctaatgttttggtgcgaattcactgcctccttcctcctcttcctgaacgccatcagcggccttcacatcaacagcatcacccatccctgggaatgaccgtggaaattttaggccccctccagggacatcagattccacaagaaaatatggtcaaaatgggacttttccagcatgtggcctctggtggggctgggttggacaagggccttgaaacggctgcctgtttgccgataacttgtgggtggtcagccagaaatggccggggggcctctgcacctggtctgcagggccagaggccaggagggtgcctcagtgccaccaactgcacaggcttagccagatgttgattttagaggaagaaaaaaacattttaaaactccttcttgaattttcttccctggactggaatacagttggaagcacaggggtaactggtacctgagctagctgcacagccaaggatagttcatgcctgtttcattgacacgtgctgggataggggctgcagaatccctggggctcccagggttgttaagaatggatcattcttccagctaagggtccaatcagtgcctattcttccaccagctcaaagggccttcgtatgtatgtccctggcttcagctttggtcatgccaaagaggcagagttcaggattccctcagaatgccctgcacacagtaggtttccaaaccatttgactcggtttgcctccctgcccgttgtttaaaccttacaaaccctggataaccccatcttctagcagctggctgtcccctctgggagctctgcctatcagaaccctaccttaaggtgggtttccttccgagaagagttcttgagcaagctctcccaggagggcccacctgactgctaatacacagccctccccaaggcccgtgtgtgcatgtgtctgtcttttgtgagggttagacagcctcagggcaccatttttaatcccagaacacatttcaaagagcacgtatctagacctgctggactctgcagggggtgagggggaacagcgagagcttgggtaatgattaacacccatgctggggatgcatggaggtgaagggggccaggaaccagtggagatttccatccttgccagcacgtctgtacttctgttcattaaagtgctccctttctagtcctttttctgcccaga

SEQ ID NO: 437050 - DNA, 1998 bp, Homo sapiens
gcggccgccgggcgcagcatgactgccgtcggcgtgcaggtagccggcgcctggcggggcgctgacccggggtgctgccccgccgtgggaggttgggggtgggaggacggagggaggggcgtacccaccgcgagcgccggcgtcgggctgggggtgcgagcgccccccgtgcccgccccctgttgcaaacctgggtccggaggaggctgggcggggagcaacctcggggggcctgcctgcctcacatagctgctcccggggcgcggactccggctgcttctgctcgcggccttgcaagcacccgaggctcccaaacttcatttggaaagatttttcttctctttggtgtcaccagtgacttactggcccagaggcctttgggccaaaggcagccccgccggtccttctttgaatccttcatccggaccctcatcatcacgtgtgtggccctggctgtggtcctgtcctcggtctccatttgtgatgggcactggctcctggctgaggaccgcctcttcgggctctggcacttctgcaccaccaccaaccagagtgtgccgatctgcttcagagacctgggccaggcccatgtgcccgggctggccgtgggcatgggcctggtacgcagcgtgggcgccttggccgtggtggccgccatttttggcctggagttcctcatggtgtcccagttgtgcgaggacaaacactcacagtgcaagtgggtcatgggttccatcctcctcctggtgtctttcgtcctctcctccggcgggctcctgggttttgtgatcctcctcaggaaccaagtcacactcatcggcttcaccctaatgttttggtgcgaattcactgcctccttcctcctcttcctgaacgccatcagcggccttcacatcaacagcatcacccatccctgggaatgaccgtggaaattttaggccccctccagggacatcagattccacaagaaaatatggtcaaaatgggacttttccagcatgtggcctctggtggggctgggttggacaagggccttgaaacggctgcctgtttgccgataacttgtgggtggtcagccagaaatggccggggggcctctgcacctggtctgcagggccagaggccaggagggtgcctcagtgccaccaactgcacaggcttagccagatgttgattttagaggaagaaaaaaacattttaaaactccttcttgaattttcttccctggactggaatacagttggaagcacaggggtaactggtacctgagctagctgcacagccaaggatagttcatgcctgtttcattgacacgtgctgggataggggctgcagaatccctggggctcccagggttgttaagaatggatcattcttccagctaagggtccaatcagtgcctattcttccaccagctcaaagggccttcgtatgtatgtccctggcttcagctttggtcatgccaaagaggcagagttcaggattccctcagaatgccctgcacacagtaggtttccaaaccatttgactcggtttgcctccctgcccgttgtttaaaccttacaaaccctggataaccccatcttctagcagctggctgtcccctctgggagctctgcctatcagaaccctaccttaaggtgggtttccttccgagaagagttcttgagcaagctctcccaggagggcccacctgactgctaatacacagccctccccaaggcccgtgtgtgcatgtgtctgtcttttgtgagggttagacagcctcagggcaccatttttaatcccagaacacatttcaaagagcacgtatctagacctgctggactctgcagggggtgagggggaacagcgagagcttgggtaatgattaacacccatgctggggatgcatggaggtgaagggggccaggaaccagtggagatttccatccttgccagcacgtctgtacttctgttcattaaagtgctccctttctagtcctttttctgcccaga

SEQ ID NO: 437051 - DNA, 1993 bp, Homo sapiens
gtgaaaggatacccccgcaacaggacaggtcttcctttcccatgtgggctctttatccagaacccagagctgcggagagtctggcttctgggacccttgactggggagaaagcaggtgggggccacggagggaaggccccagagcagagaggcaccaggctggctgagcctgggcagctgccctttgccttagctcagtggttctcaaagcctggcccccaggccagcagcaccaacatcacttgaggccactcagccagaaactctgcagtggggcctcgcaatctgttttaacaaaccttccaggtgactctggtgcagaatggtggcaagaactcaaacctggactaggcctgctgggcccagaggcctttgggccaaaggcagccccgccggtccttctttgaatccttcatccggaccctcatcatcacgtgtgtggccctggctgtggtcctgtcctcggtctccatttgtgatgggcactggctcctggctgaggaccgcctcttcgggctctggcacttctgcaccaccaccaaccagagtgtgccgatctgcttcagagacctgggccaggcccatgtgcccgggctggccgtgggcatgggcctggtacgcagcgtgggcgccttggccgtggtggccgccatttttggcctggagttcctcatggtgtcccagttgtgcgaggacaaacactcacagtgcaagtgggtcatgggttccatcctcctcctggtgtctttcgtcctctcctccggcgggctcctgggttttgtgatcctcctcaggaaccaagtcacactcatcggcttcaccctaatgttttggtgcgaattcactgcctccttcctcctcttcctgaacgccatcagcggccttcacatcaacagcatcacccatccctgggaatgaccgtggaaattttaggccccctccagggacatcagattccacaagaaaatatggtcaaaatgggacttttccagcatgtggcctctggtggggctgggttggacaagggccttgaaacggctgcctgtttgccgataacttgtgggtggtcagccagaaatggccggggggcctctgcacctggtctgcagggccagaggccaggagggtgcctcagtgccaccaactgcacaggcttagccagatgttgattttagaggaagaaaaaaacattttaaaactccttcttgaattttcttccctggactggaatacagttggaagcacaggggtaactggtacctgagctagctgcacagccaaggatagttcatgcctgtttcattgacacgtgctgggataggggctgcagaatccctggggctcccagggttgttaagaatggatcattcttccagctaagggtccaatcagtgcctattcttccaccagctcaaagggccttcgtatgtatgtccctggcttcagctttggtcatgccaaagaggcagagttcaggattccctcagaatgccctgcacacagtaggtttccaaaccatttgactcggtttgcctccctgcccgttgtttaaaccttacaaaccctggataaccccatcttctagcagctggctgtcccctctgggagctctgcctatcagaaccctaccttaaggtgggtttccttccgagaagagttcttgagcaagctctcccaggagggcccacctgactgctaatacacagccctccccaaggcccgtgtgtgcatgtgtctgtcttttgtgagggttagacagcctcagggcaccatttttaatcccagaacacatttcaaagagcacgtatctagacctgctggactctgcagggggtgagggggaacagcgagagcttgggtaatgattaacacccatgctggggatgcatggaggtgaagggggccaggaaccagtggagatttccatccttgccagcacgtctgtacttctgttcattaaagtgctccctttctagtcctttttctgcccaga

SEQ ID NO: 437052 - DNA, 2444 bp, Homo sapiens
gttccctggcaggtggaaatcaggaggggagacgtggaaatgtccttccgggtgtggcagtgtgggggccagctggagatcatcccctgctctgtcgtaggccatgtgttccggaccaagagcccccacaccttccccaagggcactagtgtcattgctcgcaatcaagtgcgcctggcagaggtctggatggacagctacaagaagattttctataggagaaatctgcaggcagcaaagatggcccaagagaaatccttcggtgacatttcggaacgactgcagctgagggaacaactgcactgtcacaacttttcctggtacctgcacaatgtctacccagagatgtttgttcctgacctgacgcccaccttctatggtgccatcaagaacctcggcaccaaccaatgcctggatgtgggtgagaacaaccgcggggggaagcccctcatcatgtactcctgccacggccttggcggcaaccagtactttgagtacacaactcagagggaccttcgccacaacatcgcaaagcagctgtgtctacatgtcagcaagggtgctctgggccttgggagctgtcacttcactggcaagaatagccaggtccccaaggacgaggaatgggaattggcccaggatcagctcatcaggaactcaggatctggtacctgcctgacatcccaggacaaaaagccagccatggccccctgcaatcccagtgacccccatcagttgtggctctttgtctaggacccagatcatccccagagagagcccccacaagctcctcaggaaacaggattgctgatgtctgggaacctgatcaccagcttctctggaggccgtaaagatggatttctaaacccactgggtggcaaggcaggaccttcctaatccttgcaacaacattgggcccattttctttccttcacaccgatggaagagaccattaggacatatatttagcctagcgttttcctgttctagaaatagaggctcccaaagtagggaaggcagctgggggagggttcagggcagcaatgctgagttcaagaaaagtacttcaggctgggcacagtggctcatgcctgaaatcctagcactttgggaagacaatgtgggagaatggcttgagcccaggagttcaagaccggcctgagcaacatagtgaggatcccatctctacgcccaccctccccccggcaaaaaaaaaagctgggtatggtggcttatgcctgtagtcgcagctactcagaaggctgaggtgggaggattgcttgttccccggaggttgaagctacagtgagccttgattgtgtcactgcactccagcctgggcaacaggtaagactctgtctcaaaaaaaaaacaaaaaagaagaagaaaagtacttctacagccatgtcctattccttgatcatccaaagcacctgcagagtccagtgaaatgatatattctggctgggcacagtggctcacacctgtaatcctagcactttgggaggccaaggcaggtggatcacctgaggtcagaagtttgaaaccagcctggactacatggtgaaactccatctctactaaaagtacaaaaattagctgggcatgatggcacgcacctgcagtcccagctacttgggaggctgaggcaggagaatcactcgaacccaggaggcagaggttgcagtgagccaagacagcaccattgcaccccagcctgagcaacaagagcgaaactccatctcaggaaaaaaaaaaaaaaaaaaagtatattctaacagacagatcagaggtctaagagatcctcccttgctattattacctgaagtctgtagaactgtttacagatatctccttgacaggtgtcctttatcttactttatctgtacagtaatcctgtgagaaagacaggacagaaaccactgtgcctattttacagatacgaaaactgagacacaggtaaaggggcttgtctgtagtcccatagctagcagatggctggagccaagactgaggctcgttcttcaatgctgagccagggctccttccgctgcaccacaagaacgctagaccactcgccaccagccttctcattccctcttcctccattctaatcatttctagctggctggcctccacagagcataggaaaacagccagggccgggcacggtggctcatgcctgtaatctcaacactctgggaggccgagccgggtggataacctgaggtcaggaattcgagaccagcctggccaacatggtaaaaccccatctctactaaaaatataaaaattagccaggcatggtggcgcacacctgtaatcccagctactcaagaggctgaggcaggagaattgcttaaatctgggaggcggaagttgcagtgagccaagatcgcgccactgaactccagcctaggcaacaagagcaaaactccatctcc

SEQ ID NO: 437053 - DNA, 422 bp, Homo sapiens
tcacctgagggagctgataaactcacatttccaggtcaaaaagccaagtgatcagagctcagagtaggtatacaggcacaggtaacaaaaattaaccagcaggcttttccctaaagtgggccctggtaaacacaggaccctgcagtctccctgtgcttaagtcagagtgaaccaacatcagaaagcctgggatcgtgtagtcatggcctaggaagaagcctggtcggtatcctttttcccagggagagagagcagcatttgcccaagtccttggacctggggtctggtgctctgggaatagaatagagctgcttatggggagactgtctcacctagcccactgaaggcctcatcctgtctcctcttacatcaggtgtggcagtgtgggggccagctggagatcatcccctgctctgtcgtag

SEQ ID NO: 437054 - DNA, 306 bp, Homo sapiens
ttgagtacacaactcagagggaccttcgccacaacatcgcaaagcagctgtgtctacatgtcagcaagggtgctctgggccttgggagctgtcacttcactggcaagaatagccaggtccccaaggacgaggaatgggaattggcccaggtgagtcagtgtccagaaagctcagaatcaagaacttgaggccaggtgtggtggctcacgcctgtaatcccagcactttgagaggccgaggagggcagatcacgaggtcaggagttcgagaccacctggccaacatggtgaaaccccatctctacta

SEQ ID NO: 437055 - DNA, 3560 bp, Homo sapiens
atgaggctcctccgcagacgccacatgcccctgcgcctggccatggtgggctgcgcctttgtgctcttcctcttcctcctgcatagggatgtgagcagcagagaggaggccacagagaagccgtggctgaagtccctggtgagccggaaggatcacgtcctggacctcatgctggaggccatgaacaaccttagagattcaatgcccaagctccaaatcagggctccagaagcccagcagactctgttctccataaaccagtcctgcctccctgggttctataccccagctgaactgaagcccttctgggaacggccaccacaggaccccaatgcccctggggcagatggaaaagcatttcagaagagcaagtggacccccctggagacccaggaaaaggaagaaggctataagaagcactgtttcaatgcctttgccagcgaccggatctccctgcagaggtccctggggccagacacccgaccacctgagtgtgtggaccagaagttccggcgctgccccccactggccaccaccagcgtgatcattgtgttccacaacgaagcctggtccacactgctgcgaacagtgtacagcgtcctacacaccacccctgccatcttgctcaaggagatcatactggtggatgatgccagcacagaggagcacctaaaggagaagctggagcagtacgtgaagcagctgcaggtggtgagggtggtgcggcaggaggagcggaaggggttgatcaccgcccggctgctgggggccagcgtggcacaggcggaggtgctcacgttcctggatgcccactgtgagtgcttccacggctggctggagcccctcctggctcgaatcgctgaggacaagacagtggtggtgagcccagacatcgtcaccatcgaccttaatacttttgagttcgccaagcccgtccagaggggcagagtccatagccgaggcaactttgactggagcctgaccttcggctgggaaacacttcctccacatgagaagcagaggcgcaaggatgaaacataccccatcaaatccccgacgtttgctggtggcctcttctccatccccaagtcctactttgagcacatcggtacctatgataatcagatggagatctggggaggggagaacgtggaaatgtccttccgggtgtggcagtgtgggggccagctggagatcatcccctgctctgtcgtaggccatgtgttccggaccaagagcccccacaccttccccaagggcactagtgtcattgctcgcaatcaagtgcgcctggcagaggtctggatggacagctacaagaagattttctataggagaaatctgcaggcagcaaagatggcccaagagaaatccttcggtgacatttcggaacgactgcagctgagggaacaactgcactgtcacaacttttcctggtacctgcacaatgtctacccagagatgtttgttcctgacctgacgcccaccttctatggtgccatcaagaacctcggcaccaaccaatgcctggatgtgggtgagaacaaccgcggggggaagcccctcatcatgtactcctgccacggccttggcggcaaccagtactttgagtacacaactcagagggaccttcgccacaacatcgcaaagcagctgtgtctacatgtcagcaagggtgctctgggccttgggagctgtcacttcactggcaagaatagccaggtccccaaggacgaggaatgggaattggcccaggatcagctcatcaggaactcaggatctggtacctgcctgacatcccaggacaaaaagccagccatggccccctgcaatcccagtgacccccatcagttgtggctctttgtctaggacccagatcatccccagagagagcccccacaagctcctcaggaaacaggattgctgatgtctgggaacctgatcaccagcttctctggaggccgtaaagatggatttctaaacccactgggtggcaaggcaggaccttcctaatccttgcaacaacattgggcccattttctttccttcacaccgatggaagagaccattaggacatatatttagcctagcgttttcctgttctagaaatagaggctcccaaagtagggaaggcagctgggggagggttcagggcagcaatgctgagttcaagaaaagtacttcaggctgggcacagtggctcatgcctgaaatcctagcactttgggaagacaatgtgggagaatggcttgagcccaggagttcaagaccggcctgagcaacatagtgaggatcccatctctacgcccaccctccccccggcaaaaaaaaaagctgggtatggtggcttatgcctgtagtcgcagctactcagaaggctgaggtgggaggattgcttgttccccggaggttgaagctacagtgagccttgattgtgtcactgcactccagcctgggcaacaggtaagactctgtctcaaaaaaaaaacaaaaaagaagaagaaaagtacttctacagccatgtcctattccttgatcatccaaagcacctgcagagtccagtgaaatgatatattctggctgggcacagtggctcacacctgtaatcctagcactttgggaggccaaggcaggtggatcacctgaggtcagaagtttgaaaccagcctggactacatggtgaaactccatctctactaaaagtacaaaaattagctgggcatgatggcacgcacctgcagtcccagctacttgggaggctgaggcaggagaatcactcgaacccaggaggcagaggttgcagtgagccaagacagcaccattgcaccccagcctgagcaacaagagcgaaactccatctcaggaaaaaaaaaaaaaaaaaaagtatattctaacagacagatcagaggtctaagagatcctcccttgctattattacctgaagtctgtagaactgtttacagatatctccttgacaggtgtcctttatcttactttatctgtacagtaatcctgtgagaaagacaggacagaaaccactgtgcctattttacagatacgaaaactgagacacaggtaaaggggcttgtctgtagtcccatagctagcagatggctggagccaagactgaggctcgttcttcaatgctgagccagggctccttccgctgcaccacaagaacgctagaccactcgccaccagccttctcattccctcttcctccattctaatcatttctagctggctggcctccacagagcataggaaaacagccagggccgggcacggtggctcatgcctgtaatctcaacactctgggaggccgagccgggtggataacctgaggtcaggaattcgagaccagcctggccaacatggtaaaaccccatctctactaaaaatataaaaattagccaggcatggtggcgcacacctgtaatcccagctactcaagaggctgaggcaggagaattgcttaaatctgggaggcggaagttgcagtgagccaagatcgcgccactgaactccagcctaggcaacaagagcaaaactccatctcc

SEQ ID NO: 437056 - DNA, 2221 bp, Homo sapiens
gctatccctactttggaaccctctatttctagaacaggaaatcgctaggctaaatatatgtcctaatggtctcttccatcggtgtgaaggaaagaaaatgggcccaatgttgttgcaaggattaggaaggtcctgacctgacgcccaccttctatggtgccatcaagaacctcggcaccaaccaatgcctggatgtgggtgagaacaaccgcggggggaagcccctcatcatgtactcctgccacggccttggcggcaaccagtactttgagtacacaactcagagggaccttcgccacaacatcgcaaagcagctgtgtctacatgtcagcaagggtgctctgggccttgggagctgtcacttcactggcaagaatagccaggtccccaaggacgaggaatgggaattggcccaggatcagctcatcaggaactcaggatctggtacctgcctgacatcccaggacaaaaagccagccatggccccctgcaatcccagtgacccccatcagttgtggctctttgtctaggacccagatcatccccagagagagcccccacaagctcctcaggaaacaggattgctgatgtctgggaacctgatcaccagcttctctggaggccgtaaagatggatttctaaacccactgggtggcaaggcaggaccttcctaatccttgcaacaacattgggcccattttctttccttcacaccgatggaagagaccattaggacatatatttagcctagcgttttcctgttctagaaatagaggctcccaaagtagggaaggcagctgggggagggttcagggcagcaatgctgagttcaagaaaagtacttcaggctgggcacagtggctcatgcctgaaatcctagcactttgggaagacaatgtgggagaatggcttgagcccaggagttcaagaccggcctgagcaacatagtgaggatcccatctctacgcccaccctccccccggcaaaaaaaaaagctgggtatggtggcttatgcctgtagtcgcagctactcagaaggctgaggtgggaggattgcttgttccccggaggttgaagctacagtgagccttgattgtgtcactgcactccagcctgggcaacaggtaagactctgtctcaaaaaaaaaacaaaaaagaagaagaaaagtacttctacagccatgtcctattccttgatcatccaaagcacctgcagagtccagtgaaatgatatattctggctgggcacagtggctcacacctgtaatcctagcactttgggaggccaaggcaggtggatcacctgaggtcagaagtttgaaaccagcctggactacatggtgaaactccatctctactaaaagtacaaaaattagctgggcatgatggcacgcacctgcagtcccagctacttgggaggctgaggcaggagaatcactcgaacccaggaggcagaggttgcagtgagccaagacagcaccattgcaccccagcctgagcaacaagagcgaaactccatctcaggaaaaaaaaaaaaaaaaaaagtatattctaacagacagatcagaggtctaagagatcctcccttgctattattacctgaagtctgtagaactgtttacagatatctccttgacaggtgtcctttatcttactttatctgtacagtaatcctgtgagaaagacaggacagaaaccactgtgcctattttacagatacgaaaactgagacacaggtaaaggggcttgtctgtagtcccatagctagcagatggctggagccaagactgaggctcgttcttcaatgctgagccagggctccttccgctgcaccacaagaacgctagaccactcgccaccagccttctcattccctcttcctccattctaatcatttctagctggctggcctccacagagcataggaaaacagccagggccgggcacggtggctcatgcctgtaatctcaacactctgggaggccgagccgggtggataacctgaggtcaggaattcgagaccagcctggccaacatggtaaaaccccatctctactaaaaatataaaaattagccaggcatggtggcgcacacctgtaatcccagctactcaagaggctgaggcaggagaattgcttaaatctgggaggcggaagttgcagtgagccaagatcgcgccactgaactccagcctaggcaacaagagcaaaactccatctcc

SEQ ID NO: 437057 - DNA, 1923 bp, Homo sapiens
gggggccccccacgcggtcgcactggaattcgcagcccctctcgggtccccggggcgcattttgcagtctgagtggcaatgcacttgctccaggacaggcggctaccccgccgcagcggaggcgcggacttttcttttggggggtctcgccggctcgccgcgctccccaccttgcctgcgcccgcccggagccagcggttctccaagcacccagcatcctgctagacgcgccgcgcaccgacgtaggggacatgggcagagcaatggtggccaggctcgggctggggctgctgctgctggcactgctcctacccacgcagatttattccagtgaaacaacaactggaacttcaagtaactcctcccagagtacttccaacactgggttggccccaaatccaactaatgccaccaccaaggcggctggtggtgccctgcagtcaacagccagtctcttcgtggtctcactctctcttctgcatctctactcttaagagactcaggccaagaaacgtcttctaaacttccccatcttctaaacccaatccaaatggcgtctggaagtccaatgtggcaaggaaaaacaggtcttcatcgaatctactaattccacaccttttattgacacagaaaatgttgagaatcccaaatttgattgatttgaagaacatgtgagaggtttgactagatgatggatgccaatattaaatctgctggagtttcatgtacaagatgaaggagaggcaacatccaaaatagttaagacatgatttccttgaatgtggcttgagaaatatggacacttaatactaccttgaaaataagaatagaaataaaggatgtgattgtggaatggagattcagttttcatttggttcattaattctataaggccataaaacaggtaatataaaaagcttccatgattctatttatatgtacatgagaaggaacttccaggtgttactgtaattcctcaacgtattgtttcggcagcacttatttaatgccgatatactctagatgaagttttacattgttgagctattgctgttctcttgggaactgaactcactttcctcctgaggctttggatttgacattgcgtttgaccttttatgtagtaattgacatgtgccagggcaatgatgaatgagaatctacccccagatccaagcagcctgagcaactcttgattatccatattgagtcaaatggtaggcatttcctatcacctatttccattcaacaagagcactacattcatttagctaaacggattccaaagagtagaattgcattgaccgcgactaatttcaaaatgctttttattattattattttttagacagtctcactttgtcgcccaggctggagtgcagtggtgcgatctcagatcagtgtaccatttgcctcccgggctcaagcgattctcctgcctcagcctcccaagtagctgggattacaggcacctgccaccatgcccggctaatttttgtaattttagtagagacagggtttcaccatgttgcccaggctggtttcgaactcctgacctcaggtgatccacctgcctcggcctcccaaagtgctgggattacaggcttgagcccccgcgcccagccatcaaaatgctttttatttctgcatatgttgaatactttttacaattaaaaaaaagatctgttttgaaggcaaaattgcaaatcttgaaattaagaaggaaaatgtaaaggagtcaaaactacaaatcaagtatttgggaagtgaagactggaagctaatttgcaaaattcacaaacttttatactctttctgtatatacttttttttctttaaaaaacaactatggatcagaatagccacatttggaatactttttgttatcagtcaatatttttagatagttagaacctggtccta

SEQ ID NO: 437058 - DNA, 1690 bp, Homo sapiens
  misc_feature (1)..(1): n is a, c, g, or t
ntatgccatgctagctctcacaatgaggctcctgttgcacatcgcaggcctcccacgtagggcattgagccataagcctacactggggtgaaacaacctctcgtgcaggccttcttgcgttcccgcccggtatcttctgaagccatcacttacattcgccgtccatttgctgtcaaagggggcaatgcgcccggtgtattacctgcatttctcggcggagaaaatcccactatgatacttggggtttcacacctaaaggtgtcgttcctccctaactccacaacccgagctcacaagcggccaccatgttgggacaggaacgcaggccacacctgttcactgctccacacgaagggtcccagatttctcacagagcgcaatcagatcggcacctcatgttcctcctcccagagtacttccaacactgggttggccccaaatccaactaatgccaccaccaaggcggctggtggtgccctgcagtcaacagccagtctcttcgtggtctcactctctcttctgcatctctactcttaagagactcaggccaagaaacgtcttctaaacttccccatcttctaaacccaatccaaatggcgtctggaagtccaatgtggcaaggaaaaacaggtcttcatcgaatctactaattccacaccttttattgacacagaaaatgttgagaatcccaaatttgattgatttgaagaacatgtgagaggtttgactagatgatggatgccaatattaaatctgctggagtttcatgtacaagatgaaggagaggcaacatccaaaatagttaagacatgatttccttgaatgtggcttgagaaatatggacacttaatactaccttgaaaataagaatagaaataaaggatgtgattgtggaatggagattcagttttcatttggttcattaattctataaggccataaaacaggtaatataaaaagcttccatgattctatttatatgtacatgagaaggaacttccaggtgttactgtaattcctcaacgtattgtttcggcagcacttatttaatgccgatatactctagatgaagttttacattgttgagctattgctgttctcttgggaactgaactcactttcctcctgaggctttggatttgacattgcgtttgaccttttatgtagtaattgacatgtgccagggcaatgatgaatgagaatctacccccagatccaagcagcctgagcaactcttgattatccatattgagtcaaatggtaggcatttcctatcacctatttccattcaacaagagcactacattcatttagctaaacggattccaaagagtagaattgcattgaccgcgactaatttcaaaatgctttttattattattattttttagacagtctcactttgtcgcccaggctggagtgcagtggtgcgatctcagatcagtgtaccatttgcctcccgggctcaagcgattctcctgcctcagcctgggtaacagagtgagacctcatctctacaaattttttttaaaaattagctgggggtgttggagcacagctgtggtcccagctacatgaggggctgaggcaggaggattttctgagcccaggaagtcaaggctgcagtgagccatgttcacaccattgcactccatcctgagtgacagagcaagaccctgtctcaaaaaaa

SEQ ID NO: 437059 - DNA, 899 bp, Homo sapiens
gggggccccccacgcggtcgcactggaattcgcagcccctctcgggtccccggggcgcattttgcagtctgagtggcaatgcacttgctccaggacaggcggctaccccgccgcagcggaggcgcggacttttcttttggggggtctcgccggctcgccgcgctccccaccttgcctgcgcccgcccggagccagcggttctccaagcacccagcatcctgctagacgcgccgcgcaccgacgtaggggacatgggcagagcaatggtggccaggctcgggctggggctgctgctgctggcactgctcctacccacgcagatttattccagtgaaacaacaactggaacttcaagtaactcctcccagagtacttccaacactgggttggccccaaatccaactaatgccaccaccaaggcggctggtggtgccctgcagtcaacagccagtctcttcgtggtctcactctctcttctgcatctctactcttaagagactcaggccaagaaacgtcttctaaacttccccatcttctaaacccaatccaaatggcgtctggaagtccaatgtggcaaggaaaaacaggtcttcatcgaatctactaattccacaccttttattgacacagaaaatgttgagaatcccaaatttgattgatttgaagaacatgtgagaggtttgactagatgatggatgccaatattaaatctgctggtgctggtagcaaactaagatatttttctcttttatattacctgttttatggccttatagaattaatgaaccaaatgaaaactgaatctccattccacaatcccatcctttatttctattcttattttcaaggtagtattaagtgtccatatttctcaagccacattcaaggaaatcatgtct

SEQ ID NO: 437060 - DNA, 1647 bp, Homo sapiens
gggggccccccacgcggtcgcactggaattcgcagcccctctcgggtccccggggcgcattttgcagtctgagtggcaatgcacttgctccaggacaggcggctaccccgccgcagcggaggcgcggacttttcttttggggggtctcgccggctcgccgcgctccccaccttgcctgcgcccgcccggagccagcggttctccaagcacccagcatcctgctagacgcgccgcgcaccgacgtaggggacatgggcagagcaatggtggccaggctcgggctggggctgctgctgctggcactgctcctacccacgcagatttattccagtgaaacaacaactggaacttcaagtaactcctcccagagtacttccaacactgggttggccccaaatccaactaatgccaccaccaaggcggctggtggtgccctgcagtcaacagccagtctcttcgtggtctcactctctcttctgcatctctactcttaagagactcaggccaagaaacgtcttctaaacttccccatcttctaaacccaatccaaatggcgtctggaagtccaatgtggcaaggaaaaacaggtcttcatcgaatctactaattccacaccttttattgacacagaaaatgttgagaatcccaaatttgattgatttgaagaacatgtgagaggtttgactagatgatggatgccaatattaaatctgctggagtttcatgtacaagatgaaggagaggcaacatccaaaatagttaagacatgatttccttgaatgtggcttgagaaatatggacacttaatactaccttgaaaataagaatagaaataaaggatgtgattgtggaatggagattcagttttcatttggttcattaattctataaggccataaaacaggtaatataaaaagcttccatgattctatttatatgtacatgagaaggaacttccaggtgttactgtaattcctcaacgtattgtttcggcagcacttatttaatgccgatatactctagatgaagttttacattgttgagctattgctgttctcttgggaactgaactcactttcctcctgaggctttggatttgacattgcgtttgaccttttatgtagtaattgacatgtgccagggcaatgatgaatgagaatctacccccagatccaagcagcctgagcaactcttgattatccatattgagtcaaatggtaggcatttcctatcacctatttccattcaacaagagcactacattcatttagctaaacggattccaaagagtagaattgcattgaccgcgactaatttcaaaatgctttttattattattattttttagacagtctcactttgtcgcccaggctggagtgcagtggtgcgatctcagatcagtgtaccatttgcctcccgggctcaagcgattctcctgcctcagcctgggtaacagagtgagacctcatctctacaaattttttttaaaaattagctgggggtgttggagcacagctgtggtcccagctacatgaggggctgaggcaggaggattttctgagcccaggaagtcaaggctgcagtgagccatgttcacaccattgcactccatcctgagtgacagagcaagaccctgtctcaaaaaaa

SEQ ID NO: 437061 - DNA, 1926 bp, Homo sapiens
gggggccccccacgcggtcgcactggaattcgcagcccctctcgggtccccggggcgcattttgcagtctgagtggcaatgcacttgctccaggacaggcggctaccccgccgcagcggaggcgcggacttttcttttggggggtctcgccggctcgccgcgctccccaccttgcctgcgcccgcccggagccagcggttctccaagcacccagcatcctgctagacgcgccgcgcaccgacgtaggggacatgggcagagcaatggtggccaggctcgggctggggctgctgctgctggcactgctcctacccacgcagatttattccagtgaaacaacaactggaacttcaagtaactcctcccagagtacttccaacactgggttggccccaaatccaactaatgccaccaccaaggcggctggtggtgccctgcagtcaacagccagtctcttcgtggtctcactctctcttctgcatctctactcttaagagactcaggccaagaaacgtcttctaaacttccccatcttctaaacccaatccaaatggcgtctggaagtccaatgtggcaaggaaaaacaggtcttcatcgaatctactaattccacaccttttattgacacagaaaatgttgagaatcccaaatttgattgatttgaagaacatgtgagaggtttgactagatgatggatgccaatattaaatctgctggagtttcatgtacaagatgaaggagaggcaacatccaaaatagttaagacatgatttccttgaatgtggcttgagaaatatggacacttaatactaccttgaaaataagaatagaaataaaggatgtgattgtggaatggagattcagttttcatttggttcattaattctataaggccataaaacaggtaatataaaaagcttccatgattctatttatatgtacatgagaaggaacttccaggtgttactgtaattcctcaacgtattgtttcggcagcacttatttaatgccgatatactctagatgaagttttacattgttgagctattgctgttctcttgggaactgaactcactttcctcctgaggctttggatttgacattgcgtttgaccttttatgtagtaattgacatgtgccagggcaatgatgaatgagaatctacccccagatccaagcagcctgagcaactcttgattatccatattgagtcaaatggtaggcatttcctatcacctatttccattcaacaagagcactacattcatttagctaaacggatgctcacagactggacaggcactggccatctctaggagcactaggcgagttgtgaatgtgctaatctagacacttcggagaaagtctcttactctaatctgcaaatggtgcgatctcagatcagtgtaccatttgcctcccgggctcaagcgattctcctgcctcagcctcccaagtagctgggattacaggcacctgccaccatgcccggctaatttttgtaattttagtagagacagggtttcaccatgttgcccaggctggtttcgaactcctgacctcaggtgatccacctgcctcggcctcccaaagtgctgggattacaggcttgagcccccgcgcccagccatcaaaatgctttttatttctgcatatgttgaatactttttacaattaaaaaaaagatctgttttgaaggcaaaattgcaaatcttgaaattaagaaggaaaatgtaaaggagtcaaaactacaaatcaagtatttgggaagtgaagactggaagctaatttgcaaaattcacaaacttttatactctttctgtatatacttttttttctttaaaaaacaactatggatcagaatagccacatttggaatactttttgttatcagtcaatatttttagatagttagaacctggtccta

SEQ ID NO: 437062 - DNA, 306 bp, Homo sapiens
actgattgattgattgattgattgattgattgatagacgggtggatagagatgtttaaagttcaacaaaaataaggatagtatacttttatccttataaatataataaacattataagaatgttgaaaccctttcaaaatcacttattttttaacttagaattttttgaagaaatattaccagtaatattttcaaatcctaagaattatgctttacttaaataaaatgatattaaattaaaacctgtatgtaaaagtacatattaaagcacaatatgtgtgtgtgtttttttaagttaggacagta

SEQ ID NO: 437063 - DNA, 4145 bp, Homo sapiens
atcagaaacccgaaggcccgaggatctgggcacgacagcggttaagcaagcgcagagcaagtcgctggccgcgcaatgcccggtgggtcttgcagtttcttggctgggcatggccggaagggaggagagaaggacgcattgcatggcgggagatatagtctttgccggaagtccctcctccctcggacgcctggcggcgccggcgcacactgctcttccttaagggcgggagtctcggtttgtggtggcttcgctgaggcagtggtggccgcactataccgttagaaactcaatttcccggaggttgtgaggccctttgaggcgaaatcgctctgggcgtgaaaggagcaggcgttggcaatggaaggaccaccgcgacctcaggctgaccgtagggagggatcttgagggccctccgagtcccctgggcttgcgctttctttctttgcagccaccgtgcctaccgcgaggatgagctcggcctcggtcaccgctttcgagaaggagcatctctggatgtatctgcaggcgctcggcttcgagccaggcccggcaaccattgcctgcggaaagatcgtgtcgcacacgcacctcggagtgaacatgtttgacaagctgaaccgtgatgcctttcatataatttcttattttttgtttcaagttctggaccagtctctcaccaaagaagttttcaaattttgttggcccccatttgaccaaaaaagtgacactgaattccgaaaacattgctgtgaatggataaaaaggatttctggtgaatgtggaagtagctttcctcaagttgttggttcactatttctttctcctggtggtcctaagtttattcatctgatgtatcattttgcaagatttgttgcaatgaaatatattaaatccaattctaaaaattcttctcatcattttgtagagacatttaacataaaaccacaggacttgcacaaatgcattgccagatgccatttcgcacgtagcagatttttacaaattttgcaaagacaagattgtgttacccaaaaatatcaggaaaatgcacaattatcagttaagcaggtacgaaacttgagatctgaatgtataggattggaaaaccaaataaagaaaatggaaccctatgatgaccacagtaatatggaagaaaaaattcaaaaggttcggtctttgtgggcttcagtgaatgaaacgctcatgtttttggaaaaagagagagaagttgttagttcggtccttagtcttgttaaccaatatgctttagatggaactaatgttgctattaatattccaaggctcttacttgacaaaattgagaaacaaatgtttcagttgcacataggaaatgtttatgaggctggaaaactgaacctcttaacagttattcagttattaaatgaagtcttgaaggtgatgaaatatgaacgttgtcaggctgatcaagcaagattgacggtagaccttcactaccttgaaaaagagaccaaatttcagaaggaaagattatcagatctgaaacatatgaggtatagaataaaagatgatctcacaactataagacattctgttgttgaaaagcaaggagaatggcataaaaagtggaaagaatttcttggtttgtctcctttcagtctaattaaaggttggactccatctgtagatcttttaccaccaatgtctcccctttcgtttgatcctgcctcagaagaagtgtatgcaaagagtattctttgtcagtatcctgcttcacttccagatgcacataagcaacataaccaagaaaatggttgcagaggagacagtgataccttgggagcgctacatgatctagccaacagccctgcctctttcttgtcgcagtcagtttcatcatcagatagaaacagtgttacagtacttgaaaaggacacaaagatgggaactcccaaagaaaaaaatgaagcaatttctaagaaaataccagaatttgaagtggaaaattctccattatcagatgttgcaaagaatacagagagtagtgcatttggagggtctttgccagctaaaaaaagtgatccatttcaaaaagagcaagatcatctggtagaagaggttgccagagcagttttatctgattcaccacagctctctgaaggaaaagaaataaaattagaggaactaattgactctctgggttctaaccccttcttaacaaggaatcagattccccgtactccagaaaacttgataactgaaattaggagctcatggagaaaagctattgaaatggaagaaaacagaactaaagaaccaattcaaatggatgctgaacatagagaagtattgccagaatcattacctgtgttgcacaatcaaagagaatttagcatggctgattttctcttagaaaccactgtatcagattttggccagtctcatttgactgaagagaaagttatttcagattgcgagtgtgtgcctcagaaacatgtgctgaccagtcacatagatgaaccaccaacacaaaatcagtcagatttgttaaataagaaagtaatttgcaagcaagatttggaatgtttagccttcaccaagctttcagaaactagccgaatggagacattctcccctgctgtcggcaataggatagatgtgatgggtggcagtgaagaggagtttatgaaaatattggaccacttagaagtttcttgtaacaaaccttccacaaataaaactatgttgtggaattcttttcagatatcaagtggaattagttctaagagttttaaagataatgattttggcatattacacgaaactctcccggaagaagttggtcatctaagttttaatagttccagtagttcagaggccaattttaaactggagccaaatagtcctatgcatggtggcactcttctagaagatgttgtgggagggagacagactactccagaatcagactttaatttacaggctcttcgcagtagatacgaggctctgaagaaatctctttccaagaaaagggaagaatcttacctctcgaattcccaaacacccgaaagacacaaaccagaattgagccctactccccaaaatgtacaaacagatgatacgcttaactttttggacacctgtgatttgcatactgagcatataaagccatctttacgcacgtccatcggtgaaagaaaacggtctctttcaccactaattaagttttctccagtggaacaaagattgagaaccacaatagcatgtagtcttggagaactacctaatttaaaggaagaagacattttgaataagagccttgatgcaaaagaaccaccgtctgacttgacaagatgaagacgtacccatttaatataactatgatgcacttaaattgaagctatgccacaggatagaaaatgaattacaacttaaatacatgttggaagtgtaacactgtttttcaaggtttaaaaaaattcctaatgccttttagccttctttaatatttttaggtaaggaaagtatgtttggattttttcctctttgtaggtatatgagattgaaatgtgaagtatttggacaacaaacgtcaagcaatgggaagccattttgatttcttgagtaatcttgtaagcattaagtgaatgacaaagtagtagtgtaacttatttcttatgttataacttcagtcaattaatataaggatagtttttgttgtatgttcactaagtggttaatataatagccattgaatatactaatctttcatcttagagaactatacaacttttattgtttcttaatggaacattctggctaaccagaaaaagtgagaaaagtagtaccttgggatgtgtagtcaagatgacaaattttaagactggaaaagctctaaacaggcttaatgattcttcaggtagaatgatcctgagaagtgatgtttgatggaataaagtgcatgtgatgattaagtgaagactggggcagaatgatttaaaaaaaggaaaaagatggaagatgagtagacacttgcaaggaacactgtcaaactataaatccattcagtgggttgtataacatttatatttagtctaatttagactttgataatttaatgctacttttatattttaacaaaaatataaattaaaattttcatt

SEQ ID NO: 437064 - DNA, 5160 bp, Homo sapiens
accccattctcaagtggcatttactcatcgattccatcaatccatcaaatagttaacatccctgcctctttcttgtcgcagtcagtttcatcatcagatagaaacagtgttacagtacttgaaaaggacacaaagatgggaactcccaaagaaaaaaatgaagcaatttctaagaaaataccagaatttgaagtggaaaattctccattatcagatgttgcaaagaatacagagagtagtgcatttggagggtctttgccagctaaaaaaagtgatccatttcaaaaagagcaagatcatctggtagaagaggttgccagagcagttttatctgattcaccacagctctctgaaggaaaagaaataaaattagaggaactaattgactctctgggttctaaccccttcttaacaaggaatcagattccccgtactccagaaaacttgataactgaaattaggagctcatggagaaaagctattgaaatggaagaaaacagaactaaagaaccaattcaaatggatgctgaacatagagaagtattgccagaatcattacctgtgttgcacaatcaaagagaatttagcatggctgattttctcttagaaaccactgtatcagattttggccagtctcatttgactgaagagaaagttatttcagattgcgagtgtgtgcctcagaaacatgtgctgaccagtcacatagatgaaccaccaacacaaaatcagtcagatttgttaaataagaaagtaatttgcaagcaagatttggaatgtttagccttcaccaagctttcagaaactagccgaatggagacattctcccctgctgtcggcaataggatagatgtgatgggtggcagtgaagaggagtttatgaaaatattggaccacttagaagtttcttgtaacaaaccttccacaaataaaactatgttgtggaattcttttcagatatcaagtggaattagttctaagagttttaaagataatgattttggcatattacacgaaactctcccggaagaagttggtcatctaagttttaatagttccagtagttcagaggccaattttaaactggagccaaatagtcctatgcatggtggcactcttctagaagatgttgtgggagggagacagactactccagaatcagactttaatttacaggctcttcgcagtagatacgaggctctgaagaaatctctttccaagaaaagggaagaatcttacctctcgaattcccaaacacccgaaagacacaaaccagaattgagccctactccccaaaatgtacaaacagatgatacgcttaactttttggacacctgtgatttgcatactgagcatataaagccatctttacgcacgtccatcggtgaaagaaaacggtctctttcaccactaattaagttttctccagtggaacaaagattgagaaccacaatagcatgtagtcttggagaactacctaatttaaaggaagaagacattttgaataagagccttgatgcaaaagaaccaccgtctgacttgacaagatgaagacgtacccatttaatataactatgatgcacttaaattgaagctatgccacaggatagaaaatgaattacaacttaaatacatgttggaagtgtaacactgtttttcaaggtttaaaaaaattcctaatgccttttagccttctttaatatttttaggtaaggaaagtatgtttggattttttcctctttgtaggtatatgagattgaaatgtgaagtatttggacaacaaacgtcaagcaatgggaagccattttgatttcttgagtaatcttgtaagcattaagtgaatgacaaagtagtagtgtaacttatttcttatgttataacttcagtcaattaatataaggatagtttttgttgtatgttcactaagtggttaatataatagccattgaatatactaatctttcatcttagagaactatacaacttttattgtttcttaatggaacattctggctaaccagaaaaagtgagaaaagtagtaccttgggatgtgtagtcaagatgacaaattttaagactggaaaagctctaaacaggcttaatgattcttcaggtagaatgatcctgagaagtgatgtttgatggaataaagtgcatgtgatgattaagtgaagactggggcagaatgatttaaaaaaaggaaaaagatggaagatgagtagacacttgcaaggaacactgtcaaactataaatccattcagtgggttgtataacatttatatttagtctaatttagactttgataatttaatgctacttttatattttaacaaaaatataaattaaaattttcattagtctgttttgttgttgggtttttttgtgaggtactccctgttgggggaaaggaacaaggaacaaccatcagaatcccccagtccctacagaatagcctcacagtaacttgagaaaactgaacttggggttaaataacttgtcacacttgcagtctcctgcctcactccttcaggtgccctgcctagaaaaagacttgtgtctagcatccaagtgaacacatactattgccctctgtgaaccaggaggaatggaacaggcaatggaagggtgatagtacctacaataccctttgtagaccccatctcactaccatcaaaatcttgtccactagcccccaaaaaactggcaaggaaagaaggtggaggggaaatttatggaagtagatggcttaatagttatttcttttatcttgggctgcctttctctaagttggttgtcctgtcccagtgtgaagacccatctttttgtgagaaaagacaaaagaaagcacatgtaactaccttctttgcaatggaaaaggagaaagaaaaaatcttctcctaagttgctgttttcttttattagttaataaaacaaatcagggactatgcaggtctatggggaaacctttagtctgctttaagaaaactcagtatctgaaaatcttaacttagcatgtgatactgtcttatcagcatctgcagaagtgccaaagccactgctagacacttaatgtgtattatttcatttaattatattttaaatgtgcttccttggtaattcttaagctcgagaaagagtttgagaactgctgctaggaaatagagattcacatttaaccctgtggtacttttaagaagcaggtacgttgttgcatatatacttgggtagagattggtaactatctgatagggaagctcaagttggccacccaagtctgagaaacccttaattactgagaatcaaaagagcagaatgtctgtagacattttggatttgtaaaaatcacattgttgagttatacctgtgatgggctgaaagtttttggcattctttcctgttcttcatatgccagtaccataaacaaaaagtatctcagatctgtcactttcttctcctaaaccaatgtgattgcagctttttgccttcagccttttccctatccagtatctcctacatagttaccttttgatcttaaggaactgttttgattgggtcacttccttgcctaaaattccattgattgttcattgttaattctaaaatagagttcaaatttaaaggcatgtaagttcccctgtaacggatttcctctactcccccttccgctgtaatctcccatttttttactgaaatgcttcagtgagcatgggtctttagaggtcttgatatacaattttcctgaagcaggaataccttgctttcctctactagtttaccacaattacagctctcttttaagcctcagaaaaaaatctcacttccgtcttgaagtcttaatccacgctttttatatccatgtgcctactccttctctgaaatctcctatggtttatctttttattcatttaatatcccacgaattgattttattatatattttttatggttgcatgtggtctttctagttatagcaatatacacatacatgcataaatacatatacacctatgtaaatgtgtgttgggagtatgtattcacacacatacatataccccaaggccatgtgtcatctttatcaatatttaagttttggaattgttttgtttgcctcctatatcatggaataaatggtaaagagggctaatttattactctaagtggatttcttattacattaatatcagacatatagaatgtactttgttttactatttgtaagatacaaaggtatataaactgacatacatcagcttgaaacctgagataatgctaaaatgttctaattattttaaatgtttaaagaggacaaccatgtaatgttgctaaacatgaaaaatgtcatcaagtggaataaagaatagctgaagttaacatttgggggaaattgagctgaaaacaaaaatatgagtattttgataccttttctttaccatgagactcttgactatgaagtcaaatttatctaaaggaaaaacaggaattctggagacctgtgtaaaagcagactattatcttcctactgtgagagtactaaaattaaaatacgtttaatgacgttttcctcaatgtaaaagcattgaagtaaatgtttcttttatgttgcagatacatagttgctctagagatcacctttttctttatgcattgtgaatagcagtctgcatcctaagtttaaaatatttgagaatcctctatgggactctctgtaaatgttttaaatactgttgttttcaataaatattttatactatctggctctggaatttcctatataatctcaaaaagaactatgcccctgcaaatcataagatgatcacatgtaaagttatattaataacctgatcaacaaatttgagaggttcagtgattcaggtcaacatattttgttacttccattttaattactagatttacagtatatagtattttaaaatgaatttttaaggttatatctatactgtcagtttacacatctggagtctttatactaatgtattgccaatggccctaattaggtaatttttataaattacacctgaatagcttcttactcttcatgagtagcgtcatccacatctgctgctagaaagggtttaatgaacattaaataattttataaagccttagaaattctaaagccctatcacttatgtttactg

SEQ ID NO: 437065 - DNA, 4944 bp, Homo sapiens
tagagataaacctatgttctgacccacctagtagggtctttgccagctaaaaaaagtgatccatttcaaaaagagcaagatcatctggtagaagaggttgccagagcagttttatctgattcaccacagctctctgaaggaaaagaaataaaattagaggaactaattgactctctgggttctaaccccttcttaacaaggaatcagattccccgtactccagaaaacttgataactgaaattaggagctcatggagaaaagctattgaaatggaagaaaacagaactaaagaaccaattcaaatggatgctgaacatagagaagtattgccagaatcattacctgtgttgcacaatcaaagagaatttagcatggctgattttctcttagaaaccactgtatcagattttggccagtctcatttgactgaagagaaagttatttcagattgcgagtgtgtgcctcagaaacatgtgctgaccagtcacatagatgaaccaccaacacaaaatcagtcagatttgttaaataagaaagtaatttgcaagcaagatttggaatgtttagccttcaccaagctttcagaaactagccgaatggagacattctcccctgctgtcggcaataggatagatgtgatgggtggcagtgaagaggagtttatgaaaatattggaccacttagaagtttcttgtaacaaaccttccacaaataaaactatgttgtggaattcttttcagatatcaagtggaattagttctaagagttttaaagataatgattttggcatattacacgaaactctcccggaagaagttggtcatctaagttttaatagttccagtagttcagaggccaattttaaactggagccaaatagtcctatgcatggtggcactcttctagaagatgttgtgggagggagacagactactccagaatcagactttaatttacaggctcttcgcagtagatacgaggctctgaagaaatctctttccaagaaaagggaagaatcttacctctcgaattcccaaacacccgaaagacacaaaccagaattgagccctactccccaaaatgtacaaacagatgatacgcttaactttttggacacctgtgatttgcatactgagcatataaagccatctttacgcacgtccatcggtgaaagaaaacggtctctttcaccactaattaagttttctccagtggaacaaagattgagaaccacaatagcatgtagtcttggagaactacctaatttaaaggaagaagacattttgaataagagccttgatgcaaaagaaccaccgtctgacttgacaagatgaagacgtacccatttaatataactatgatgcacttaaattgaagctatgccacaggatagaaaatgaattacaacttaaatacatgttggaagtgtaacactgtttttcaaggtttaaaaaaattcctaatgccttttagccttctttaatatttttaggtaaggaaagtatgtttggattttttcctctttgtaggtatatgagattgaaatgtgaagtatttggacaacaaacgtcaagcaatgggaagccattttgatttcttgagtaatcttgtaagcattaagtgaatgacaaagtagtagtgtaacttatttcttatgttataacttcagtcaattaatataaggatagtttttgttgtatgttcactaagtggttaatataatagccattgaatatactaatctttcatcttagagaactatacaacttttattgtttcttaatggaacattctggctaaccagaaaaagtgagaaaagtagtaccttgggatgtgtagtcaagatgacaaattttaagactggaaaagctctaaacaggcttaatgattcttcaggtagaatgatcctgagaagtgatgtttgatggaataaagtgcatgtgatgattaagtgaagactggggcagaatgatttaaaaaaaggaaaaagatggaagatgagtagacacttgcaaggaacactgtcaaactataaatccattcagtgggttgtataacatttatatttagtctaatttagactttgataatttaatgctacttttatattttaacaaaaatataaattaaaattttcattagtctgttttgttgttgggtttttttgtgaggtactccctgttgggggaaaggaacaaggaacaaccatcagaatcccccagtccctacagaatagcctcacagtaacttgagaaaactgaacttggggttaaataacttgtcacacttgcagtctcctgcctcactccttcaggtgccctgcctagaaaaagacttgtgtctagcatccaagtgaacacatactattgccctctgtgaaccaggaggaatggaacaggcaatggaagggtgatagtacctacaataccctttgtagaccccatctcactaccatcaaaatcttgtccactagcccccaaaaaactggcaaggaaagaaggtggaggggaaatttatggaagtagatggcttaatagttatttcttttatcttgggctgcctttctctaagttggttgtcctgtcccagtgtgaagacccatctttttgtgagaaaagacaaaagaaagcacatgtaactaccttctttgcaatggaaaaggagaaagaaaaaatcttctcctaagttgctgttttcttttattagttaataaaacaaatcagggactatgcaggtctatggggaaacctttagtctgctttaagaaaactcagtatctgaaaatcttaacttagcatgtgatactgtcttatcagcatctgcagaagtgccaaagccactgctagacacttaatgtgtattatttcatttaattatattttaaatgtgcttccttggtaattcttaagctcgagaaagagtttgagaactgctgctaggaaatagagattcacatttaaccctgtggtacttttaagaagcaggtacgttgttgcatatatacttgggtagagattggtaactatctgatagggaagctcaagttggccacccaagtctgagaaacccttaattactgagaatcaaaagagcagaatgtctgtagacattttggatttgtaaaaatcacattgttgagttatacctgtgatgggctgaaagtttttggcattctttcctgttcttcatatgccagtaccataaacaaaaagtatctcagatctgtcactttcttctcctaaaccaatgtgattgcagctttttgccttcagccttttccctatccagtatctcctacatagttaccttttgatcttaaggaactgttttgattgggtcacttccttgcctaaaattccattgattgttcattgttaattctaaaatagagttcaaatttaaaggcatgtaagttcccctgtaacggatttcctctactcccccttccgctgtaatctcccatttttttactgaaatgcttcagtgagcatgggtctttagaggtcttgatatacaattttcctgaagcaggaataccttgctttcctctactagtttaccacaattacagctctcttttaagcctcagaaaaaaatctcacttccgtcttgaagtcttaatccacgctttttatatccatgtgcctactccttctctgaaatctcctatggtttatctttttattcatttaatatcccacgaattgattttattatatattttttatggttgcatgtggtctttctagttatagcaatatacacatacatgcataaatacatatacacctatgtaaatgtgtgttgggagtatgtattcacacacatacatataccccaaggccatgtgtcatctttatcaatatttaagttttggaattgttttgtttgcctcctatatcatggaataaatggtaaagagggctaatttattactctaagtggatttcttattacattaatatcagacatatagaatgtactttgttttactatttgtaagatacaaaggtatataaactgacatacatcagcttgaaacctgagataatgctaaaatgttctaattattttaaatgtttaaagaggacaaccatgtaatgttgctaaacatgaaaaatgtcatcaagtggaataaagaatagctgaagttaacatttgggggaaattgagctgaaaacaaaaatatgagtattttgataccttttctttaccatgagactcttgactatgaagtcaaatttatctaaaggaaaaacaggaattctggagacctgtgtaaaagcagactattatcttcctactgtgagagtactaaaattaaaatacgtttaatgacgttttcctcaatgtaaaagcattgaagtaaatgtttcttttatgttgcagatacatagttgctctagagatcacctttttctttatgcattgtgaatagcagtctgcatcctaagtttaaaatatttgagaatcctctatgggactctctgtaaatgttttaaatactgttgttttcaataaatattttatactatctggctctggaatttcctatataatctcaaaaagaactatgcccctgcaaatcataagatgatcacatgtaaagttatattaataacctgatcaacaaatttgagaggttcagtgattcaggtcaacatattttgttacttccattttaattactagatttacagtatatagtattttaaaatgaatttttaaggttatatctatactgtcagtttacacatctggagtctttatactaatgtattgccaatggccctaattaggtaatttttataaattacacctgaatagcttcttactcttcatgagtagcgtcatccacatctgctgctagaaagggtttaatgaacattaaataattttataaagccttagaaattctaaagccctatcacttatgtttactg

SEQ ID NO: 437066 - DNA, 4150 bp, Homo sapiens
  misc_feature (3343)..(3343): n is a, c, g, or t
atcagaaacccgaaggcccgaggatctgggcacgacagcggttaagcaagcgcagagcaagtcgctggccgcgcaatgcccggtgggtcttgcagtttcttggctgggcatggccggaagggaggagagaaggacgcattgcatggcgggagatatagtctttgccggaagtccctcctccctcggacgcctggcggcgccggcgcacactgctcttccttaagggcgggagtctcggtttgtggtggcttcgctgaggcagtggtggccgcactataccgttagaaactcaatttcccggaggttgtgaggccctttgaggcgaaatcgctctgggcgtgaaaggagcaggcgttggcaatggaaggaccaccgcgacctcaggctgaccgtagggagggatcttgagggccctccgagtcccctgggcttgcgctttctttctttgcagccaccgtgcctaccgcgaggatgagctcggcctcggtcaccgctttcgagaaggagcatctctggatgtatctgcaggcgctcggcttcgagccaggcccggcaaccattgcctgcggaaagatcgtgtcgcacacgcacctcggagtgaacatgtttgacaagctgaaccgtgatgcctttcatataatttcttattttttgtttcaagttctggaccagtctctcaccaaagaagttttcaaattttgttggcccccatttgaccaaaaaagtgacactgaattccgaaaacattgctgtgaatggataaaaaggatttctggtgaatgtggaagtagctttcctcaagttgttggttcactatttctttctcctggtggtcctaagtttattcatctgatgtatcattttgcaagatttgttgcaatgaaatatattaaatccaattctaaaaattcttctcatcattttgtagagacatttaacataaaaccacaggacttgcacaaatgcattgccagatgccatttcgcacgtagcagatttttacaaattttgcaaagacaagattgtgttacccaaaaatatcaggaaaatgcacaattatcagttaagcaggtacgaaacttgagatctgaatgtataggattggaaaaccaaataaagaaaatggaaccctatgatgaccacagtaatatggaagaaaaaattcaaaaggttcggtctttgtgggcttcagtgaatgaaacgctcatgtttttggaaaaagagagagaagttgttagttcggtccttagtcttgttaaccaatatgctttagatggaactaatgttgctattaatattccaaggctcttacttgacaaaattgagaaacaaatgtttcagttgcacataggaaatgtttatgaggctggaaaactgaacctcttaacagttattcagttattaaatgaagtcttgaaggtgatgaaatatgaacgttgtcaggctgatcaagcaagattgacggtagaccttcactaccttgaaaaagagaccaaatttcagaaggaaagattatcagatctgaaacatatgaggtatagaataaaagatgatctcacaactataagacattctgttgttgaaaagcaaggagaatggcataaaaagtggaaagaatttcttggtttgtctcctttcagtctaattaaaggttggactccatctgtagatcttttaccaccaatgtctcccctttcgtttgatcctgcctcagaagaagtgtatgcaaagagtattctttgtcagtatcctgcttcacttccagatgcacataagcaacataaccaagaaaatggttgcagaggagacagtgataccttgggagcgctacatgatctagccaacagccctgcctctttcttgtcgcagtcagtttcatcatcagatagaaacagtgttacagtacttgaaaaggacacaaagatgggaactcccaaagaaaaaaatgaagcaatttctaagaaaataccagaatttgaagtggaaaattctccattatcagatgttgcaaagaatacagagagtagtgcatttggagggtctttgccagctaaaaaaagtgatccatttcaaaaagagcaagatcatctggtagaagaggttgccagagcagttttatctgattcaccacagctctctgaaggaaaagaaataaaattagaggaactaattgactctctgggttctaaccccttcttaacaaggaatcagattccccgtactccagaaaacttgataactgaaattaggagctcatggagaaaagctattgaaatggaagaaaacagaactaaagaaccaattcaaatggatgctgaacatagagaagtattgccagaatcattacctgtgttgcacaatcaaagagaatttagcatggctgattttctcttagaaaccactgtatcagattttggccagtctcatttgactgaagagaaagttatttcagattgcgagtgtgtgcctcagaaacatgtgctgaccagtcacatagatgaaccaccaacacaaaatcagtcagatttgttaaataagaaagtaatttgcaagcaagatttggaatgtttagccttcaccaagctttcagaaactagccgaatggagacattctcccctgctgtcggcaataggatagatgtgatgggtggcagtgaagaggagtttatgaaaatattggaccacttagaagtttcttgtaacaaaccttccacaaataaaactatgttgtggaattcttttcagatatcaagtggaattagttctaagagttttaaagataatgattttggcatattacacgaaactctcccggaagaagttggtcatctaagttttaatagttccagtagttcagaggccaattttaaactggagccaaatagtcctatgcatggtggcactcttctagaagatgttgtgggagggagacagactactccagaatcagactttaatttacaggctcttcgcagtagatacgaggctctgaagaaatctctttccaagaaaagggaagaatcttacctctcgaattcccaaacacccgaaagacacaaaccagaattgagccctactccccaaaatgtacaaacagatgatacgcttaactttttggacacctgtgatttgcatactgagcatataaagccatctttacgcacgtccatcggtgaaagaaaacggtctctttcaccactaattaagttttctccagtggaacaaagattgagaaccacaatagcatgtagtcttggagaactacctaatttaaagggtaaggtttaaatagacctatgcatattcacctgttgaagttttctctcaacttttgataaaaccngtacacaaagaatgctgcatgacctttattgttaatgtgctcccccttccttcatttaggatgaggggaatgatccctcactggacaggtcctttcagaatctctgtttatgtatatatagttacaattgatttgagacaggggtgggaaaaaaaagcccccccaatctgaagcttacaggttttataatacaaatgactgaaaagtaaatgtcatcaaaatcttgcccagtggaaggtggtttttaaacacttgagaaacccaattttaaatatcatcactataatggtgtaatatctgggggtggggtgtagaaataaaagaagccaggtcagtgtattagtttcctagggctgccataacaaagcaccatcaagtgggtggcttagaacagcagaaatttattgtctctggagacagtaagttctagaggctagatgtccaaaatcaaggtgttgacagggccatgttccctctgaagccactagaagaggatccttctttgcctcttctagcctctggtagcaccaggcattccttggcttgtggcagtgtaattctaatctttgcctccattgtcacatggtattcttcccttgtgtgtgtattgtcttataaggacacagtcatattagctaattaatgggtcaccctactccagtatgacctcatcttacttagctaattatatctgtaatgaccacatttccaaataaggtcacattctgaggtactggggttagaacttcaacatatgtttttgggggtattcagttcataacagttagtattaataattattgaagc

SEQ ID NO: 437067 - DNA, 6948 bp, Homo sapiens
atcagaaacccgaaggcccgaggatctgggcacgacagcggttaagcaagcgcagagcaagtcgctggccgcgcaatgcccggtgggtcttgcagtttcttggctgggcatggccggaagggaggagagaaggacgcattgcatggcgggagatatagtctttgccggaagtccctcctccctcggacgcctggcggcgccggcgcacactgctcttccttaagggcgggagtctcggtttgtggtggcttcgctgaggcagtggtggccgcactataccgttagaaactcaatttcccggaggttgtgaggccctttgaggcgaaatcgctctgggcgtgaaaggagcaggcgttggcaatggaaggaccaccgcgacctcaggctgaccgtagggagggatcttgagggccctccgagtcccctgggcttgcgctttctttctttgcagccaccgtgcctaccgcgaggatgagctcggcctcggtcaccgctttcgagaaggagcatctctggatgtatctgcaggcgctcggcttcgagccaggcccggcaaccattgcctgcggaaagatcgtgtcgcacacgcacctcggagtgaacatgtttgacaagctgaaccgtgatgcctttcatataatttcttattttttgtttcaagttctggaccagtctctcaccaaagaagttttcaaattttgttggcccccatttgaccaaaaaagtgacactgaattccgaaaacattgctgtgaatggataaaaaggatttctggtgaatgtggaagtagctttcctcaagttgttggttcactatttctttctcctggtggtcctaagtttattcatctgatgtatcattttgcaagatttgttgcaatgaaatatattaaatccaattctaaaaattcttctcatcattttgtagagacatttaacataaaaccacaggacttgcacaaatgcattgccagatgccatttcgcacgtagcagatttttacaaattttgcaaagacaagattgtgttacccaaaaatatcaggaaaatgcacaattatcagttaagcaggtacgaaacttgagatctgaatgtataggattggaaaaccaaataaagaaaatggaaccctatgatgaccacagtaatatggaagaaaaaattcaaaaggttcggtctttgtgggcttcagtgaatgaaacgctcatgtttttggaaaaagagagagaagttgttagttcggtccttagtcttgttaaccaatatgctttagatggaactaatgttgctattaatattccaaggctcttacttgacaaaattgagaaacaaatgtttcagttgcacataggaaatgtttatgaggctggaaaactgaacctcttaacagttattcagttattaaatgaagtcttgaaggtgatgaaatatgaacgttgtcaggctgatcaagcaagattgacggtagaccttcactaccttgaaaaagagaccaaatttcagaaggaaagattatcagatctgaaacatatgaggtatagaataaaagatgatctcacaactataagacattctgttgttgaaaagcaaggagaatggcataaaaagtggaaagaatttcttggtttgtctcctttcagtctaattaaaggttggactccatctgtagatcttttaccaccaatgtctcccctttcgtttgatcctgcctcagaagaagtgtatgcaaagagtattctttgtcagtatcctgcttcacttccagatgcacataagcaacataaccaagaaaatggttgcagaggagacagtgataccttgggagcgctacatgatctagccaacagccctgcctctttcttgtcgcagtcagtttcatcatcagatagaaacagtgttacagtacttgaaaaggacacaaagatgggaactcccaaagaaaaaaatgaagcaatttctaagaaaataccagaatttgaagtggaaaattctccattatcagatgttgcaaagaatacagagagtagtgcatttggagggtctttgccagctaaaaaaagtgatccatttcaaaaagagcaagatcatctggtagaagaggttgccagagcagttttatctgattcaccacagctctctgaaggaaaagaaataaaattagaggaactaattgactctctgggttctaaccccttcttaacaaggaatcagattccccgtactccagaaaacttgataactgaaattaggagctcatggagaaaagctattgaaatggaagaaaacagaactaaagaaccaattcaaatggatgctgaacatagagaagtattgccagaatcattacctgtgttgcacaatcaaagagaatttagcatggctgattttctcttagaaaccactgtatcagattttggccagtctcatttgactgaagagaaagttatttcagattgcgagtgtgtgcctcagaaacatgtgctgaccagtcacatagatgaaccaccaacacaaaatcagtcagatttgttaaataagaaagtaatttgcaagcaagatttggaatgtttagccttcaccaagctttcagaaactagccgaatggagacattctcccctgctgtcggcaataggatagatgtgatgggtggcagtgaagaggagtttatgaaaatattggaccacttagaagtttcttgtaacaaaccttccacaaataaaactatgttgtggaattcttttcagatatcaagtggaattagttctaagagttttaaagataatgattttggcatattacacgaaactctcccggaagaagttggtcatctaagttttaatagttccagtagttcagaggccaattttaaactggagccaaatagtcctatgcatggtggcactcttctagaagatgttgtgggagggagacagactactccagaatcagactttaatttacaggctcttcgcagtagatacgaggctctgaagaaatctctttccaagaaaagggaagaatcttacctctcgaattcccaaacacccgaaagacacaaaccagaattgagccctactccccaaaatgtacaaacagatgatacgcttaactttttggacacctgtgatttgcatactgagcatataaagccatctttacgcacgtccatcggtgaaagaaaacggtctctttcaccactaattaagttttctccagtggaacaaagattgagaaccacaatagcatgtagtcttggagaactacctaatttaaaggaagaagacattttgaataagagccttgatgcaaaagaaccaccgtctgacttgacaagatgaagacgtacccatttaatataactatgatgcacttaaattgaagctatgccacaggatagaaaatgaattacaacttaaatacatgttggaagtgtaacactgtttttcaaggtttaaaaaaattcctaatgccttttagccttctttaatatttttaggtaaggaaagtatgtttggattttttcctctttgtaggtatatgagattgaaatgtgaagtatttggacaacaaacgtcaagcaatgggaagccattttgatttcttgagtaatcttgtaagcattaagtgaatgacaaagtagtagtgtaacttatttcttatgttataacttcagtcaattaatataaggatagtttttgttgtatgttcactaagtggttaatataatagccattgaatatactaatctttcatcttagagaactatacaacttttattgtttcttaatggaacattctggctaaccagaaaaagtgagaaaagtagtaccttgggatgtgtagtcaagatgacaaattttaagactggaaaagctctaaacaggcttaatgattcttcaggtagaatgatcctgagaagtgatgtttgatggaataaagtgcatgtgatgattaagtgaagactggggcagaatgatttaaaaaaaggaaaaagatggaagatgagtagacacttgcaaggaacactgtcaaactataaatccattcagtgggttgtataacatttatatttagtctaatttagactttgataatttaatgctacttttatattttaacaaaaatataaattaaaattttcattagtctgttttgttgttgggtttttttgtgaggtactccctgttgggggaaaggaacaaggaacaaccatcagaatcccccagtccctacagaatagcctcacagtaacttgagaaaactgaacttggggttaaataacttgtcacacttgcagtctcctgcctcactccttcaggtgccctgcctagaaaaagacttgtgtctagcatccaagtgaacacatactattgccctctgtgaaccaggaggaatggaacaggcaatggaagggtgatagtacctacaataccctttgtagaccccatctcactaccatcaaaatcttgtccactagcccccaaaaaactggcaaggaaagaaggtggaggggaaatttatggaagtagatggcttaatagttatttcttttatcttgggctgcctttctctaagttggttgtcctgtcccagtgtgaagacccatctttttgtgagaaaagacaaaagaaagcacatgtaactaccttctttgcaatggaaaaggagaaagaaaaaatcttctcctaagttgctgttttcttttattagttaataaaacaaatcagggactatgcaggtctatggggaaacctttagtctgctttaagaaaactcagtatctgaaaatcttaacttagcatgtgatactgtcttatcagcatctgcagaagtgccaaagccactgctagacacttaatgtgtattatttcatttaattatattttaaatgtgcttccttggtaattcttaagctcgagaaagagtttgagaactgctgctaggaaatagagattcacatttaaccctgtggtacttttaagaagcaggtacgttgttgcatatatacttgggtagagattggtaactatctgatagggaagctcaagttggccacccaagtctgagaaacccttaattactgagaatcaaaagagcagaatgtctgtagacattttggatttgtaaaaatcacattgttgagttatacctgtgatgggctgaaagtttttggcattctttcctgttcttcatatgccagtaccataaacaaaaagtatctcagatctgtcactttcttctcctaaaccaatgtgattgcagctttttgccttcagccttttccctatccagtatctcctacatagttaccttttgatcttaaggaactgttttgattgggtcacttccttgcctaaaattccattgattgttcattgttaattctaaaatagagttcaaatttaaaggcatgtaagttcccctgtaacggatttcctctactcccccttccgctgtaatctcccatttttttactgaaatgcttcagtgagcatgggtctttagaggtcttgatatacaattttcctgaagcaggaataccttgctttcctctactagtttaccacaattacagctctcttttaagcctcagaaaaaaatctcacttccgtcttgaagtcttaatccacgctttttatatccatgtgcctactccttctctgaaatctcctatggtttatctttttattcatttaatatcccacgaattgattttattatatattttttatggttgcatgtggtctttctagttatagcaatatacacatacatgcataaatacatatacacctatgtaaatgtgtgttgggagtatgtattcacacacatacatataccccaaggccatgtgtcatctttatcaatatttaagttttggaattgttttgtttgcctcctatatcatggaataaatggtaaagagggctaatttattactctaagtggatttcttattacattaatatcagacatatagaatgtactttgttttactatttgtaagatacaaaggtatataaactgacatacatcagcttgaaacctgagataatgctaaaatgttctaattattttaaatgtttaaagaggacaaccatgtaatgttgctaaacatgaaaaatgtcatcaagtggaataaagaatagctgaagttaacatttgggggaaattgagctgaaaacaaaaatatgagtattttgataccttttctttaccatgagactcttgactatgaagtcaaatttatctaaaggaaaaacaggaattctggagacctgtgtaaaagcagactattatcttcctactgtgagagtactaaaattaaaatacgtttaatgacgttttcctcaatgtaaaagcattgaagtaaatgtttcttttatgttgcagatacatagttgctctagagatcacctttttctttatgcattgtgaatagcagtctgcatcctaagtttaaaatatttgagaatcctctatgggactctctgtaaatgttttaaatactgttgttttcaataaatattttatactatctggctctggaatttcctatataatctcaaaaagaactatgcccctgcaaatcataagatgatcacatgtaaagttatattaataacctgatcaacaaatttgagaggttcagtgattcaggtcaacatattttgttacttccattttaattactagatttacagtatatagtattttaaaatgaatttttaaggttatatctatactgtcagtttacacatctggagtctttatactaatgtattgccaatggccctaattaggtaatttttataaattacacctgaatagcttcttactcttcatgagtagcgtcatccacatctgctgctagaaagggtttaatgaacattaaataattttataaagccttagaaattctaaagccctatcacttatgtttactg

SEQ ID NO: 437068 - DNA, 6086 bp, Homo sapiens
atcagaaacccgaaggcccgaggatctgggcacgacagcggttaagcaagcgcagagcaagtcgctggccgcgcaatgcccggtgggtcttgcagtttcttggctgggcatggccggaagggaggagagaaggacgcattgcatggcgggagatatagtctttgccggaagtccctcctccctcggacgcctggcggcgccggcgcacactgctcttccttaagggcgggagtctcggtttgtggtggcttcgctgaggcagtggtggccgcactataccgttagaaactcaatttcccggaggttgtgaggccctttgaggcgaaatcgctctgggcgtgaaaggagcaggcgttggcaatggaaggaccaccgcgacctcaggctgaccgtagggagggatcttgagggccctccgagtcccctgggcttgcgctttctttctttgcagccaccgtgcctaccgcgaggatgagctcggcctcggtcaccgctttcgagaaggagcatctctggatgtatctgcaggcgctcggcttcgagccaggcccggcaaccattgcctgcggaaagatcgtgtcgcacacgcacctcggagtgaacatgtttgacaagctgaaccgtgatgcctttcatataatttcttattttttgtttcaagttctggaccagtctctcaccaaagaagttttcaaattttgttggcccccatttgaccaaaaaagtgacactgaattccgaaaacattgctgtgaatggataaaaaggatttctggtgaatgtggaagtagctttcctcaagttgttggttcactatttctttctcctggtggtcctaagtttattcatctgatgtatcattttgcaagatttgttgcaatgaaatatattaaatccaattctaaaaattcttctcatcattttgtagagacatttaacataaaaccacaggacttgcacaaatgcattgccagatgccatttcgcacgtagcagatttttacaaattttgcaaagacaagattgtgttacccaaaaatatcaggaaaatgcacaattatcagttaagcaggtacgaaacttgagatctgaatgtataggattggaaaaccaaataaagaaaatggaaccctatgatgaccacagtaatatggaagaaaaaattcaaaaggttcggtctttgtgggcttcagtgaatgaaacgctcatgtttttggaaaaagagagagaagttgttagttcggtccttagtcttgttaaccaatatgctttagatggaactaatgttgctattaatattccaaggctcttacttgacaaaattgagaaacaaatgtttcagttgcacataggaaatgtttatgaggctggaaaactgaacctcttaacagttattcagttattaaatgaagtcttgaaggtgatgaaatatgaacgttgtcaggctgatcaagcaagattgacggtagaccttcactaccttgaaaaagagaccaaatttcagaaggaaagattatcagatctgaaacatatgaggtatagaataaaagatgatctcacaactataagacattctgttgttgaaaagcaaggagaatggcataaaaagtggaaagaatttcttggtttgtctcctttcagtctaattaaaggttggactccatctgtagatcttttaccaccaatgtctcccctttcgtttgatcctgcctcagaagaagtgtatgcaaagagtattctttgtcagtatcctgcttcacttccagatgcacataagcaacataaccaagaaaatggttgcagaggagacagtgataccttgggagcgctacatgatctagccaacagccctgcctctttcttgtcgcagtcagtttcatcatcagatagaaacagtgttacagtacttgaaaaggacacaaagatgggaactcccaaagaaaaaaatgaagcaatttctaagaaaataccagaatttgaagtggaaaattctccattatcagatgttgcaaagaatacagagagtagtgcatttggagggtctttgccagctaaaaaaagtgatccatttcaaaaagagcaagatcatctggtagaagaggttgccagagcagttttatctgattcaccacagctctctgaaggaaaagaaataaaattagaggaactaattgactctctgggttctaaccccttcttaacaaggaatcagattccccgtactccagaaaacttgataactgaaattaggagctcatggagaaaagctattgaaatggaagaaaacagaactaaagaaccaattcaaatggatgctgaacatagagaagtattgccagaatcattacctgtgttgcacaatcaaagagaatttagcatggctgattttctcttagaaaccactgtatcagattttggccagtctcatttgactgaagagaaagttatttcagattgcgagtgtgtgcctcagaaacatgtgctgaccagtcacatagatgaaccaccaacacaaaatcagtcagatttgttaaataagaaagtaatttgcaagcaagatttggaatgtttagccttcaccaagctttcagaaactagccgaatggagacattctcccctgctgtcggcaataggatagatgtgatgggtggcagtgaagaggagtttatgaaaatattggaccacttagaagtttcttgtaacaaaccttccacaaataaaactatgttgtggaattcttttcagatatcaagtggaattagttctaagagttttaaagataatgattttggcatattacacgaaactctcccggaagaagttggtcatctaagttttaatagttccagtagttcagaggccaattttaaactggagccaaatagtcctatgcatggtggcactcttctagaagatgttgtgggagggagacagactactccagaatcagactttaatttacaggctcttcgcagtagatacgaggctctgaagaaatctctttccaagaaaagggaagaatcttacctctcgaattcccaaacacccgaaagacacaaaccagaattgagccctactccccaaaatgtacaaacagatgatacgcttaactttttggacacctgtgatttgcatactgagcatataaagccatctttacgcacgtccatcggtgaaagaaaacggtctctttcaccactaattaagttttctccagtggaacaaagattgagaaccacaatagcatgtagtcttggagaactacctaatttaaaggaagaagacattttgaataagagccttgatgcaaaagaaccaccgtctgacttgacaagatgaagacgtacccatttaatataactatgatgcacttaaattgaagctatgccacaggatagaaaatgaattacaacttaaatacatgttggaagtgtaacactgtttttcaaggtttaaaaaaattcctaatgccttttagccttctttaatatttttaggtaaggaaagtatgtttggattttttcctctttgtaggtatatgagattgaaatgtgaagtatttggacaacaaacgtcaagcaatgggaagccattttgatttcttgagtaatcttgtaagcattaagtgaatgacaaagtagtagtgtaacttatttcttatgttataacttcagtcaattaatataaggatagtttttgttgtatgttcactaagtggttaatataatagccattgaatatactaatctttcatcttagagaactatacaacttttattgtttcttaatggaacattctggctaaccagaaaaagtgagaaaagtagtaccttgggatgtgtagtcaagatgacaaattttaagactggaaaagctctaaacaggcttaatgattcttcaggtagaatgatcctgagaagtgatgtttgatggaataaagtgcatgtgatgattaagtgaagactggggcagaatgatttaaaaaaaggaaaaagatggaagatgagtagacacttgcaaggaacactgtcaaactataaatccattcagtgggttgtataacatttatatttagtctaatttagactttgataatttaatgctacttttatattttaacaaaaatataaattaaaattttcattagtctgttttgttgttgggtttttttgtgaggtactccctgttgggggaaaggaacaaggaacaaccatcagaatcccccagtccctacagaatagcctcacagtaacttgagaaaactgaacttggggttaaataacttgtcacacttgcagtctcctgcctcactccttcaggtgccctgcctagaaaaagacttgtgtctagcatccaagtgaacacatactattgccctctgtgaaccaggaggaatggaacaggcaatggaagggtgatagtacctacaataccctttgtagaccccatctcactaccatcaaaatcttgtccactagcccccaaaaaactggcaaggaaagaaggtggaggggaaatttatggaagtagatggcttaatagttatttcttttatcttgggctgcctttctctaagttggttgtcctgtcccagtgtgaagacccatctttttgtgagaaaagacaaaagaaagcacatgtaactaccttctttgcaatggaaaaggagaaagaaaaaatcttctcctaagttgctgttttcttttattagttaataaaacaaatcagggactatgcaggtctatggggaaacctttagtctgctttaagaaaactcagtatctgaaaatcttaacttagcatgtgatactgtcttatcagcatctgcagaagtgccaaagccactgctagacacttaatgtgtattatttcatttaattatattttaaatgtgcttccttggtaattcttaagctcgagaaagagtttgagaactgctgctaggaaatagagattcacatttaaccctgtggtacttttaagaagcaggtacgttgttgcatatatacttgggtagagattggtaactatctgatagggaagctcaagttggccacccaagtctgagaaacccttaattactgagaatcaaaagagcagaatgtctgtagacattttggatttgtaaaaatcacattgttgagttatacctgtgatgggctgaaagtttttggcattctttcctgttcttcatatgccagtaccataaacaaaaagtatctcagatctgtcactttcttctcctaaaccaatgtgattgcagctttttgccttcagccttttccctatccagtatctcctacatagttaccttttgatcttaaggaactgttttgattgggtcacttccttgcctaaaattccattgattgttcattgttaattctaaaatagagttcaaatttaaaggcatgtaagttcccctgtaacggatttcctctactcccccttccgctgtaatctcccatttttttactgaaatgcttcagtgagcatgggtctttagaggtcttgatatacaattttcctgaagcaggaataccttgctttcctctactagtttaccacaattacagctctcttttaagcctcagaaaaaaatctcacttccgtcttgaagtcttaatccacgctttttatatccatgtgcctactccttctctgaaatctcctatggtttatctttttattcatttaatatcccacgaattgattttattatatattttttatggttgcatgtggtctttctagttatagcaatatacacatacatgcataaatacatatacacctatgtaaatgtgtgttgggagtatgtattcacacacatacatataccccaaggccatgtgtcatctttatcaatatttaagttttggaattgttttgtttgcctcctatatcatggaataaatggtaaagagggtcaaaaaaaaaaaaaaaggaaaaaaaaatttttggggggcgggctcgagaaaggtttaaaaccattgtgggggggcggccagaaggttatgaaagggcaaagggttccaggaacgggcagaaagggtggttcacaaaaaaagcgggacggggttgaa

SEQ ID NO: 437069 - DNA, 4768 bp, Homo sapiens
aagcagggtatcaacgcagagtggtcattatggccggggtactccagaaaactcgataactgaaattaggagctcatggagaaaagctattgaaatggaagaaaacagaactaaagaaccaattcaaatggatgctgaacatagagaagtattgccagaatcattacctgtgttgcacaatcaaagagaatttagcatggctgattttctcttagaaaccactgtatcagattttggccagtctcatttgactgaagagaaagttatttcagattgcgagtgtgtgcctcagaaacatgtgctgaccagtcacatagatgaaccaccaacacaaaatcagtcagatttgttaaataagaaagtaatttgcaagcaagatttggaatgtttagccttcaccaagctttcagaaactagccgaatggagacattctcccctgctgtcggcaataggatagatgtgatgggtggcagtgaagaggagtttatgaaaatattggaccacttagaagtttcttgtaacaaaccttccacaaataaaactatgttgtggaattcttttcagatatcaagtggaattagttctaagagttttaaagataatgattttggcatattacacgaaactctcccggaagaagttggtcatctaagttttaatagttccagtagttcagaggccaattttaaactggagccaaatagtcctatgcatggtggcactcttctagaagatgttgtgggagggagacagactactccagaatcagactttaatttacaggctcttcgcagtagatacgaggctctgaagaaatctctttccaagaaaagggaagaatcttacctctcgaattcccaaacacccgaaagacacaaaccagaattgagccctactccccaaaatgtacaaacagatgatacgcttaactttttggacacctgtgatttgcatactgagcatataaagccatctttacgcacgtccatcggtgaaagaaaacggtctctttcaccactaattaagttttctccagtggaacaaagattgagaaccacaatagcatgtagtcttggagaactacctaatttaaaggaagaagacattttgaataagagccttgatgcaaaagaaccaccgtctgacttgacaagatgaagacgtacccatttaatataactatgatgcacttaaattgaagctatgccacaggatagaaaatgaattacaacttaaatacatgttggaagtgtaacactgtttttcaaggtttaaaaaaattcctaatgccttttagccttctttaatatttttaggtaaggaaagtatgtttggattttttcctctttgtaggtatatgagattgaaatgtgaagtatttggacaacaaacgtcaagcaatgggaagccattttgatttcttgagtaatcttgtaagcattaagtgaatgacaaagtagtagtgtaacttatttcttatgttataacttcagtcaattaatataaggatagtttttgttgtatgttcactaagtggttaatataatagccattgaatatactaatctttcatcttagagaactatacaacttttattgtttcttaatggaacattctggctaaccagaaaaagtgagaaaagtagtaccttgggatgtgtagtcaagatgacaaattttaagactggaaaagctctaaacaggcttaatgattcttcaggtagaatgatcctgagaagtgatgtttgatggaataaagtgcatgtgatgattaagtgaagactggggcagaatgatttaaaaaaaggaaaaagatggaagatgagtagacacttgcaaggaacactgtcaaactataaatccattcagtgggttgtataacatttatatttagtctaatttagactttgataatttaatgctacttttatattttaacaaaaatataaattaaaattttcattagtctgttttgttgttgggtttttttgtgaggtactccctgttgggggaaaggaacaaggaacaaccatcagaatcccccagtccctacagaatagcctcacagtaacttgagaaaactgaacttggggttaaataacttgtcacacttgcagtctcctgcctcactccttcaggtgccctgcctagaaaaagacttgtgtctagcatccaagtgaacacatactattgccctctgtgaaccaggaggaatggaacaggcaatggaagggtgatagtacctacaataccctttgtagaccccatctcactaccatcaaaatcttgtccactagcccccaaaaaactggcaaggaaagaaggtggaggggaaatttatggaagtagatggcttaatagttatttcttttatcttgggctgcctttctctaagttggttgtcctgtcccagtgtgaagacccatctttttgtgagaaaagacaaaagaaagcacatgtaactaccttctttgcaatggaaaaggagaaagaaaaaatcttctcctaagttgctgttttcttttattagttaataaaacaaatcagggactatgcaggtctatggggaaacctttagtctgctttaagaaaactcagtatctgaaaatcttaacttagcatgtgatactgtcttatcagcatctgcagaagtgccaaagccactgctagacacttaatgtgtattatttcatttaattatattttaaatgtgcttccttggtaattcttaagctcgagaaagagtttgagaactgctgctaggaaatagagattcacatttaaccctgtggtacttttaagaagcaggtacgttgttgcatatatacttgggtagagattggtaactatctgatagggaagctcaagttggccacccaagtctgagaaacccttaattactgagaatcaaaagagcagaatgtctgtagacattttggatttgtaaaaatcacattgttgagttatacctgtgatgggctgaaagtttttggcattctttcctgttcttcatatgccagtaccataaacaaaaagtatctcagatctgtcactttcttctcctaaaccaatgtgattgcagctttttgccttcagccttttccctatccagtatctcctacatagttaccttttgatcttaaggaactgttttgattgggtcacttccttgcctaaaattccattgattgttcattgttaattctaaaatagagttcaaatttaaaggcatgtaagttcccctgtaacggatttcctctactcccccttccgctgtaatctcccatttttttactgaaatgcttcagtgagcatgggtctttagaggtcttgatatacaattttcctgaagcaggaataccttgctttcctctactagtttaccacaattacagctctcttttaagcctcagaaaaaaatctcacttccgtcttgaagtcttaatccacgctttttatatccatgtgcctactccttctctgaaatctcctatggtttatctttttattcatttaatatcccacgaattgattttattatatattttttatggttgcatgtggtctttctagttatagcaatatacacatacatgcataaatacatatacacctatgtaaatgtgtgttgggagtatgtattcacacacatacatataccccaaggccatgtgtcatctttatcaatatttaagttttggaattgttttgtttgcctcctatatcatggaataaatggtaaagagggctaatttattactctaagtggatttcttattacattaatatcagacatatagaatgtactttgttttactatttgtaagatacaaaggtatataaactgacatacatcagcttgaaacctgagataatgctaaaatgttctaattattttaaatgtttaaagaggacaaccatgtaatgttgctaaacatgaaaaatgtcatcaagtggaataaagaatagctgaagttaacatttgggggaaattgagctgaaaacaaaaatatgagtattttgataccttttctttaccatgagactcttgactatgaagtcaaatttatctaaaggaaaaacaggaattctggagacctgtgtaaaagcagactattatcttcctactgtgagagtactaaaattaaaatacgtttaatgacgttttcctcaatgtaaaagcattgaagtaaatgtttcttttatgttgcagatacatagttgctctagagatcacctttttctttatgcattgtgaatagcagtctgcatcctaagtttaaaatatttgagaatcctctatgggactctctgtaaatgttttaaatactgttgttttcaataaatattttatactatctggctctggaatttcctatataatctcaaaaagaactatgcccctgcaaatcataagatgatcacatgtaaagttatattaataacctgatcaacaaatttgagaggttcagtgattcaggtcaacatattttgttacttccattttaattactagatttacagtatatagtattttaaaatgaatttttaaggttatatctatactgtcagtttacacatctggagtctttatactaatgtattgccaatggccctaattaggtaatttttataaattacacctgaatagcttcttactcttcatgagtagcgtcatccacatctgctgctagaaagggtttaatgaacattaaataattttataaagccttagaaattctaaagccctatcacttatgtttactg

SEQ ID NO: 437070 - DNA, 1203 bp, Homo sapiens
gagtttgcatattgtattttagtttgcattcctttcacagacaatttaagggattttcaattaaatttctaaattttaattgaattccttaattttaattgtgggaactttcctggatccaaacaacagacgttgaccctcctagtgagatcccaggtcacaaaccgtggagcggctccagcctgactggcaagtgtggcttgcaaaacgcggaaaaccgagacacgcccagagataggaggagggaagtgcaggccccgtccaataagtattcaggccccgcccgccacgtcgctggccacgccccggcccggcctctccgttcgcgcgcagccgcctgcagacccggaagtggatggcgtggagatatggcgcaactgcggcgcgtgagttttcctttgtttagattaagtgttcgcttagcggtgccctcacgcttctgtacccgggatgtggggggcggtacagaccttgaaatccccgcaccgctctctccaccccgagtaaattcatgcgtcccgtcagagtgttaaaatcgccctagggctggttctgtctccggtcgttctgccgtagggctgcgtaggcagctgctttcgcgccgttttcctgcttaaaacccttcagtgacccctccgccagccccgcgccacgtaaagtccccgcctgcgaggcggatccacgccctccgggtcccaagcctcgtccttgtcggcccctggggcgcagcgccgcagccgccattcgggaggggccgcgtcctctgcctggtctggggattctgcagaccccacccctgatctgcctgccgccgtagtcctccttgggccgttcccttctgtccccaggccttttcgcagtcacggcttctccggatcctgtgttgggggaggtggccgggacctatctcagggcacccagtgttcttccgtcccaaattcctcccattggaaactgtgctcttgaggaggtgggtattttattccagtcccctccctgtgaatgtgaagtgaaagagagatggagagcgaggtagaggaaacagaaaaatttagagagaaaataatgaggaagatccataacaagacggcaacgcagagggagggtgagagatttgcaaagtgaaagaagcaccccaggaagtagcagggagagaaaagcaactcgagaaatgtagagaaaagttctatttctagacagatg

SEQ ID NO: 437071 - DNA, 2969 bp, Homo sapiens
ggctgggtgtgaatcggccgagggagatatggcgcaactgcggcgcggacacttgacattcagggacgtggccatagaattctctcaggaggagtggaaatgcctggaccctgtgcagaaggctttatacagggatgtgatgttggagaactacaggaacctggtctccctgggaatctgtcttcctgacctgagtattatctccatgatgaagcaaaggacagagccctggactgtggagaatgaaatgaaagtagcaaaaaatccagataggtgggaaggtatcaaagatatcaacacagggaggagctgtgcagtgagaagcaaagcaggaaacaagcctattacaaatcaacttggattaacctttcagttacctctgccagaactggagatatttcaaggtgaagggaagatttatgaatgtaatcaagttcaaaagttcatcagccacagttcttcagtttcgccacttcaaagaatttactctggggtcaaaacccacatatttaataaacataggaatgattttgttgattttccattgctgtcacaagaacagaaagcacacattaggagaaaaccttacgaatgtaatgagcagggcaaagtcttcagagtgtcttcaagccttcctaatcatcaagtaatccacactgcagataaacctaacagatgtcatgaatgtggtaaaaccgtcagggacaagtcaggcctcgcagaacattggagaattcgtacaggagagaaaccttacaaatgtaaagagtgtggcaagctcttcaatcgaattgcataccttgcacgacacgagaaagtgcatactggagagagtccttacaaatgtaatgagtgtggcaaggtcttcagtcgaattacataccttgtacgacatcagaaaattcatactagagagaaacctcataaatgtaacaaatgtggcaaggtttatagtagcagttcatacctagcacaacattggagaattcatacaggagagaaactttacaaatgtaataaatgtggcaaagaatttagtgggcattcaagcctcaccacccatctgttaatccacactggagagaaaccttacaaatgtaaagaatgtgacaaagcttttaggcacaagttctccctgacagttcatcagagaaatcataatggagagaaaccttataaatgtcatgaatgtggcaaagtcttcactcaagtttcacatcttgcacgacatcagaaaattcacactggagagaaaccttacaaatgtaatgagtgtggcaaagtcttcactcagaattcacaccttgcaaatcatcagagaatccacactggagagaaaccttacaaatgccatgtgtgtggtaaggtctttaggcacagttcatggtttgtacagcatcagagaagtgttcatgagagagtccttacaaactgagtttggcaaactctatcataagttctagcagtaatcaacatccgagagtctatactagaaagaaatcatttaaatgtactatatgtggcacaggctgtatcgagacctaccaaatcactagacatcgaaacattcatctttggtgaaaccacacaaatggattgtgtgtgccaaggccaacaagtcaaaatatgttgaacctaatgatatgatgtgtataaagggtgcaaggacacgtggaaatgatctgtaatattcgggttattaaaaatgtaattggctgggcgcagtggctcacacctgtaatcctagcactttgggaggttgaggcaggtggatcacaaggtcaggagtttgagaccagcctggccaatatggtgaaacaccatatctactataaatacaaaaaaattagccaggcgtggtggcacatgcctgcaatcccagctactcgggaggctgaggcaggagaattgcttgaatccaggaggcagaggttgttgcagtgagctgagatcgcgccactgcactccaacctgggtgacagagcgagactccgtctcaaaaaaaaaaaaaaattatttgggtttgaaaggccaggggcagtggttcatgcctataatctcagcacaatagaaagccaagacaggagggtcacttgatgcctggagatcaagataagtatgggcaacgtagcaaggcccatccctacaaaataaaaaaaataagccaggcccttggcatgtgtctgtagttccagctactcaagaggccgaggcaagaggattgctcaagcccaggagtttgagagtttgagcagtgagctctgatcttgccatttgtactccagcttgggtgacagagcgagaccctgtctcaaaagaaaaaaaaggctagtttttatgacttcaacctgaactttgaaatttcttcatgtgccttccctacaggcctttcactgtggtctgggaaagaatcagtaagatgacagggctgacttcattagatgaggagcgtttctatccagtttcctggaggaataaggacactgccttttcagattaaagattgtctgatttagagaccatggaggtggacagagaataacaaaaccgtgatggcagtcatcatgcttattgcagttagcacacacttttcctgacaggcacagtgctgctgtgctctacaaatgaccatgaaatagagcacgccatgactttaggacacagggatttttatgggaagagagttcatcagggactgattacgtaggagagacgatgcaggggaaatggtggccaccgtctccattgaatagcaatagctgctgtttagcaaagactgattaaaaagtactctgatttttcaaatggaagagagaacagttaaatcagagtagagagtttaatcaaaactaccagtggaacatgttcttgagtaggattcacatttaactgctggcataatttgcaactgttggattttctcatgtttggaacaataaagttgaaattttccaaagtgtgaatgattt

SEQ ID NO: 437072 - DNA, 3056 bp, Homo sapiens
  misc_feature (59)..(59): n is a, c, g, or t
tccttatactataatctgtaacgaaaatacatacaaagttgaaaaacaggacttctcgnggacacttgacattcagggacgtggccatagaattctctcaggaggagtggaaatgcctggaccctgtgcagaaggctttatacagggatgtgatgttggagaactacaggaacctggtctccctgggaatctgtcttcctgacctgagtattatctccatgatgaagcaaaggacagagccctggactgtggagaatgaaatgaaagtagcaaaaaatccagataggtgggaaggtatcaaagatatcaacacagatggagtcctgttctgtcgcccaggctggagtacagtggtgtgatctcggctcactgcaacttccgcctcccagggaggagctgtgcagtgagaagcaaagcaggaaacaagcctattacaaatcaacttggattaacctttcagttacctctgccagaactggagatatttcaaggtgaagggaagatttatgaatgtaatcaagttcaaaagttcatcagccacagttcttcagtttcgccacttcaaagaatttactctggggtcaaaacccacatatttaataaacataggaatgattttgttgattttccattgctgtcacaagaacagaaagcacacattaggagaaaaccttacgaatgtaatgagcagggcaaagtcttcagagtgtcttcaagccttcctaatcatcaagtaatccacactgcagataaacctaacagatgtcatgaatgtggtaaaaccgtcagggacaagtcaggcctcgcagaacattggagaattcgtacaggagagaaaccttacaaatgtaaagagtgtggcaagctcttcaatcgaattgcataccttgcacgacacgagaaagtgcatactggagagagtccttacaaatgtaatgagtgtggcaaggtcttcagtcgaattacataccttgtacgacatcagaaaattcatactagagagaaacctcataaatgtaacaaatgtggcaaggtttatagtagcagttcatacctagcacaacattggagaattcatacaggagagaaactttacaaatgtaataaatgtggcaaagaatttagtgggcattcaagcctcaccacccatctgttaatccacactggagagaaaccttacaaatgtaaagaatgtgacaaagcttttaggcacaagttctccctgacagttcatcagagaaatcataatggagagaaaccttataaatgtcatgaatgtggcaaagtcttcactcaagtttcacatcttgcacgacatcagaaaattcacactggagagaaaccttacaaatgtaatgagtgtggcaaagtcttcactcagaattcacaccttgcaaatcatcagagaatccacactggagagaaaccttacaaatgccatgtgtgtggtaaggtctttaggcacagttcatggtttgtacagcatcagagaagtgttcatgagagagtccttacaaactgagtttggcaaactctatcataagttctagcagtaatcaacatccgagagtctatactagaaagaaatcatttaaatgtactatatgtggcacaggctgtatcgagacctaccaaatcactagacatcgaaacattcatctttggtgaaaccacacaaatggattgtgtgtgccaaggccaacaagtcaaaatatgttgaacctaatgatatgatgtgtataaagggtgcaaggacacgtggaaatgatctgtaatattcgggttattaaaaatgtaattggctgggcgcagtggctcacacctgtaatcctagcactttgggaggttgaggcaggtggatcacaaggtcaggagtttgagaccagcctggccaatatggtgaaacaccatatctactataaatacaaaaaaattagccaggcgtggtggcacatgcctgcaatcccagctactcgggaggctgaggcaggagaattgcttgaatccaggaggcagaggttgttgcagtgagctgagatcgcgccactgcactccaacctgggtgacagagcgagactccgtctcaaaaaaaaaaaaaaattatttgggtttgaaaggccaggggcagtggttcatgcctataatctcagcacaatagaaagccaagacaggagggtcacttgatgcctggagatcaagataagtatgggcaacgtagcaaggcccatccctacaaaataaaaaaaataagccaggcccttggcatgtgtctgtagttccagctactcaagaggccgaggcaagaggattgctcaagcccaggagtttgagagtttgagcagtgagctctgatcttgccatttgtactccagcttgggtgacagagcgagaccctgtctcaaaagaaaaaaaaggctagtttttatgacttcaacctgaactttgaaatttcttcatgtgccttccctacaggcctttcactgtggtctgggaaagaatcagtaagatgacagggctgacttcattagatgaggagcgtttctatccagtttcctggaggaataaggacactgccttttcagattaaagattgtctgatttagagaccatggaggtggacagagaataacaaaaccgtgatggcagtcatcatgcttattgcagttagcacacacttttcctgacaggcacagtgctgctgtgctctacaaatgaccatgaaatagagcacgccatgactttaggacacagggatttttatgggaagagagttcatcagggactgattacgtaggagagacgatgcaggggaaatggtggccaccgtctccattgaatagcaatagctgctgtttagcaaagactgattaaaaagtactctgatttttcaaatggaagagagaacagttaaatcagagtagagagtttaatcaaaactaccagtggaacatgttcttgagtaggattcacatttaactgctggcataatttgcaactgttggattttctcatgtttggaacaataaagttgaaattttccaaagtgtgaatgattt

SEQ ID NO: 437073 - DNA, 667 bp, Homo sapiens
  misc_feature (31)..(32): n is a, c, g, or t
tgatctagaggatcccaagtaccacctgcanngtacccacctgcaactgaactttgaaatttcttcatgtgccttccctacaggcctttcactgtggtctgggaaagaatcagtaagatgacagggctgacttcattagatgaggagcgtttctatccagtttcctggaggaataaggacactgccttttcagattaaagattgtctgatttagagaccatggaggtggacagagaataacaaaaccgtgatggcagtcatcatgcttattgcagttagcacacacttttcctgacaggcacagtgctgctgtgctctacaaatgaccatgaaatagagcacgccatgactttaggacacagggatttttatgggaagagagttcatcagggactgattacgtaggagagacgatgcaggggaaatggtggccaccgtctccattgaatagcaatagctgctgtttagcaaagactgattaaaaagtactctgatttttcaaatggaagagagaacagttaaatcagagtagagagtttaatcaaaactaccagtggaacatgttcttgagtaggattcacatttaactgctggcataatttgcaactgttggattttctcatgtttggaacaataaagttgaaattttccaaagtgtgaatgattt

SEQ ID NO: 437074 - DNA, 683 bp, Homo sapiens
gagtttgcatattgtattttagtttgcattcctttcacagacaatttaagggattttcaattaaatttctaaattttaattgaattccttaattttaattgtgggaactttcctggatccaaacaacagacgttgaccctcctagtgagatcccaggtcacaaaccgtggagcggctccagcctgactggcaagtgtggcttgcaaaacgcggaaaaccgagacacgcccagagataggaggagggaagtgcaggccccgtccaataagtattcaggccccgcccgccacgtcgctggccacgccccggcccggcctctccgttcgcgcgcagccgcctgcagacccggaagtggatggcgtggagatatggcgcaactgcggcgcggacacttgacattcagggacgtggccatagaattctctcaggaggagtggaaatgcctggaccctgtgcagaaggctttatacagggatgtgatgttggagaactacaggaacctggtctccctgggaatctgtcttcctgacctgagtattatctccatgatgaagcaaaggacagagccctggactgtggagaatgaaatgaaagtagcaaaaaatcccgcatcttgctcccatcaggactctgtttttataacctacagaggtcaatgtatagaaatccgtctgatgggaact

SEQ ID NO: 437075 - DNA, 3383 bp, Homo sapiens
gagtttgcatattgtattttagtttgcattcctttcacagacaatttaagggattttcaattaaatttctaaattttaattgaattccttaattttaattgtgggaactttcctggatccaaacaacagacgttgaccctcctagtgagatcccaggtcacaaaccgtggagcggctccagcctgactggcaagtgtggcttgcaaaacgcggaaaaccgagacacgcccagagataggaggagggaagtgcaggccccgtccaataagtattcaggccccgcccgccacgtcgctggccacgccccggcccggcctctccgttcgcgcgcagccgcctgcagacccggaagtggatggcgtggagatatggcgcaactgcggcgcggacacttgacattcagggacgtggccatagaattctctcaggaggagtggaaatgcctggaccctgtgcagaaggctttatacagggatgtgatgttggagaactacaggaacctggtctccctgggaatctgtcttcctgacctgagtattatctccatgatgaagcaaaggacagagccctggactgtggagaatgaaatgaaagtagcaaaaaatccagataggtgggaaggtatcaaagatatcaacacagatggagtcctgttctgtcgcccaggctggagtacagtggtgtgatctcggctcactgcaacttccgcctcccagggaggagctgtgcagtgagaagcaaagcaggaaacaagcctattacaaatcaacttggattaacctttcagttacctctgccagaactggagatatttcaaggtgaagggaagatttatgaatgtaatcaagttcaaaagttcatcagccacagttcttcagtttcgccacttcaaagaatttactctggggtcaaaacccacatatttaataaacataggaatgattttgttgattttccattgctgtcacaagaacagaaagcacacattaggagaaaaccttacgaatgtaatgagcagggcaaagtcttcagagtgtcttcaagccttcctaatcatcaagtaatccacactgcagataaacctaacagatgtcatgaatgtggtaaaaccgtcagggacaagtcaggcctcgcagaacattggagaattcgtacaggagagaaaccttacaaatgtaaagagtgtggcaagctcttcaatcgaattgcataccttgcacgacacgagaaagtgcatactggagagagtccttacaaatgtaatgagtgtggcaaggtcttcagtcgaattacataccttgtacgacatcagaaaattcatactagagagaaacctcataaatgtaacaaatgtggcaaggtttatagtagcagttcatacctagcacaacattggagaattcatacaggagagaaactttacaaatgtaataaatgtggcaaagaatttagtgggcattcaagcctcaccacccatctgttaatccacactggagagaaaccttacaaatgtaaagaatgtgacaaagcttttaggcacaagttctccctgacagttcatcagagaaatcataatggagagaaaccttataaatgtcatgaatgtggcaaagtcttcactcaagtttcacatcttgcacgacatcagaaaattcacactggagagaaaccttacaaatgtaatgagtgtggcaaagtcttcactcagaattcacaccttgcaaatcatcagagaatccacactggagagaaaccttacaaatgccatgtgtgtggtaaggtctttaggcacagttcatggtttgtacagcatcagagaagtgttcatgagagagtccttacaaactgagtttggcaaactctatcataagttctagcagtaatcaacatccgagagtctatactagaaagaaatcatttaaatgtactatatgtggcacaggctgtatcgagacctaccaaatcactagacatcgaaacattcatctttggtgaaaccacacaaatggattgtgtgtgccaaggccaacaagtcaaaatatgttgaacctaatgatatgatgtgtataaagggtgcaaggacacgtggaaatgatctgtaatattcgggttattaaaaatgtaattggctgggcgcagtggctcacacctgtaatcctagcactttgggaggttgaggcaggtggatcacaaggtcaggagtttgagaccagcctggccaatatggtgaaacaccatatctactataaatacaaaaaaattagccaggcgtggtggcacatgcctgcaatcccagctactcgggaggctgaggcaggagaattgcttgaatccaggaggcagaggttgttgcagtgagctgagatcgcgccactgcactccaacctgggtgacagagcgagactccgtctcaaaaaaaaaaaaaaattatttgggtttgaaaggccaggggcagtggttcatgcctataatctcagcacaatagaaagccaagacaggagggtcacttgatgcctggagatcaagataagtatgggcaacgtagcaaggcccatccctacaaaataaaaaaaataagccaggcccttggcatgtgtctgtagttccagctactcaagaggccgaggcaagaggattgctcaagcccaggagtttgagagtttgagcagtgagctctgatcttgccatttgtactccagcttgggtgacagagcgagaccctgtctcaaaagaaaaaaaaggctagtttttatgacttcaacctgaactttgaaatttcttcatgtgccttccctacaggcctttcactgtggtctgggaaagaatcagtaagatgacagggctgacttcattagatgaggagcgtttctatccagtttcctggaggaataaggacactgccttttcagattaaagattgtctgatttagagaccatggaggtggacagagaataacaaaaccgtgatggcagtcatcatgcttattgcagttagcacacacttttcctgacaggcacagtgctgctgtgctctacaaatgaccatgaaatagagcacgccatgactttaggacacagggatttttatgggaagagagttcatcagggactgattacgtaggagagacgatgcaggggaaatggtggccaccgtctccattgaatagcaatagctgctgtttagcaaagactgattaaaaagtactctgatttttcaaatggaagagagaacagttaaatcagagtagagagtttaatcaaaactaccagtggaacatgttcttgagtaggattcacatttaactgctggcataatttgcaactgttggattttctcatgtttggaacaataaagttgaaattttccaaagtgtgaatgattt

SEQ ID NO: 437076 - DNA, 2729 bp, Homo sapiens
aaaaaaataatggcattatttgggccacttggaaaacccggtggtattccatgaagaaaaccactatgaagataatcccattcaccagactcacaattggagaaggacagcaacaccacctggggggagccaaacaggctggagacagaaactcccggtgtggcagctgagatggcccaggaaagaactatattaccttcaaaaagagaggtacatgcgatgtttgaggtggcatgaagctcagtggtgttatattggaatgagtgagtgaccatcctggagccttcctgaaagaggattggaacatcagttaacatctgaccactgccagcccaccccctcccacccacgtcgattgcatctctgggctccagggataaagcaggtcttggggtgcaccatgatttcaccattcttagtactggccattggcacctgccttactaactccttagtgccagagaaagagaaagaccccaagtactggcgagaccaagcgcaagagacactgaaatatgccctggagcttcagaagctcaacaccaacgtggctaagaatgtcatcatgttcctgggagatgggatgggtgtctccacagtgacggctgcccgcatcctcaagggtcagctccaccacaaccctggggaggagaccaggctggagatggacaagttccccttcgtggccctctccaagacgtacaacaccaatgcccaggtccctgacagcgccggcaccgccaccgcctacctgtgtggggtgaaggccaatgagggcaccgtgggggtaagcgcagccactgagcgttcccggtgcaacaccacccaggggaacgaggtcacctccatcctgcgctgggccaaggacgctgggaaatctgtgggcattgtgaccaccacgagagtgaaccatgccacccccagcgccgcctacgcccactcggctgaccgggactggtactcagacaacgagatgccccctgaggccttgagccagggctgtaaggacatcgcctaccagctcatgcataacatcagggacattgacgtgatcatggggggtggccggaaatacatgtaccccaagaataaaactgatgtggagtatgagagtgacgagaaagccaggggcacgaggctggacggcctggacctcgttgacacctggaagagcttcaaaccgagatacaagcactcccacttcatctggaaccgcacggaactcctgacccttgacccccacaatgtggactacctattgggtctcttcgagccaggggacatgcagtacgagctgaacaggaacaacgtgacggacccgtcactctccgagatggtggtggtggccatccagatcctgcggaagaaccccaaaggcttcttcttgctggtggaaggaggcagaattgaccacgggcaccatgaaggaaaagccaagcaggccctgcatgaggcggtggagatggaccgggccatcgggcaggcaggcagcttgacctcctcggaagacactctgaccgtggtcactgcggaccattcccacgtcttcacatttggtggatacaccccccgtggcaactctatctttggtctggcccccatgctgagtgacacagacaagaagcccttcactgccatcctgtatggcaatgggcctggctacaaggtggtgggcggtgaacgagagaatgtctccatggtggactatgctcacaacaactaccaggcgcagtctgctgtgcccctgcgccacgagacccacggcggggaggacgtggccgtcttctccaagggccccatggcgcacctgctgcacggcgtccacgagcagaactacgtcccccacgtgatggcgtatgcagcctgcatcggggccaacctcggccactgtgctcctgccagctcggcaggcagccttgctgcaggccccctgctgctcgcgctggccctctaccccctgagcgtcctgttctgagggcccagggcccgggcacccacaagcccgtgacagatgccaacttcccacacggcagcccccccctcaaggggcagggaggtgggggcctcctcagcctctgcaactgcaagaaaggggacccaggaaaccaaagtctgccgcccacctcgctcccctctggaatcttccccaagggccaaacccacttctggcctccagcctttgctccctccccgctgccctttggccaacagggtagatttctcttgggcaggcagagagtacagactgcagacattctcaaagcctcttatttttctagcgaacgtatttctccagacccagaggccctgaagcctccgtggaacattctggatctgaccctcccagtctcatctcctgaccctcccactcccatctccttacctctggaaccccccaggccctacaatgctcatgtccctgtccccaggcccagccctccttcaggggagttgaggtctttctcctcaggacaaggccttgctcactcactcactccaagaccaccagggtcccaggaagccggtgcctgggtggccatcctacccagcgtggcccaggccgggaagagccacctggcagggctcacactcctgggctctgaacacacacgccagctcctctctgaagcgactctcctgtttggaacggcaaaaaaaaatttttttttctctttttggtggtggttaaaagggaacacaaaacatttaaataaaactttccaaatatt

SEQ ID NO: 437077 - DNA, 2446 bp, Homo sapiens
cctcactcgggccccgcggccgcctttataaggcggcgggggtggtggcccgggccgcgttgcgctcccgccactccgcgcccgctatcctggctccgtgctcccacgcgcttgtgcctggacggaccctcgccagtgctctgcgcaggattggaacatcagttaacatctgaccactgccagcccaccccctcccacccacgtcgattgcatctctgggctccagggataaagcaggtcttggggtgcaccatgatttcaccattcttagtactggccattggcacctgccttactaactccttagtgccagagaaagagaaagaccccaagtactggcgagaccaagcgcaagagacactgaaatatgccctggagcttcagaagctcaacaccaacgtggctaagaatgtcatcatgttcctgggagatgggatgggtgtctccacagtgacggctgcccgcatcctcaagggtcagctccaccacaaccctggggaggagaccaggctggagatggacaagttccccttcgtggccctctccaagacgtacaacaccaatgcccaggtccctgacagcgccggcaccgccaccgcctacctgtgtggggtgaaggccaatgagggcaccgtgggggtaagcgcagccactgagcgttcccggtgcaacaccacccaggggaacgaggtcacctccatcctgcgctgggccaaggacgctgggaaatctgtgggcattgtgaccaccacgagagtgaaccatgccacccccagcgccgcctacgcccactcggctgaccgggactggtactcagacaacgagatgccccctgaggccttgagccagggctgtaaggacatcgcctaccagctcatgcataacatcagggacattgacgtgatcatggggggtggccggaaatacatgtaccccaagaataaaactgatgtggagtatgagagtgacgagaaagccaggggcacgaggctggacggcctggacctcgttgacacctggaagagcttcaaaccgagatacaagcactcccacttcatctggaaccgcacggaactcctgacccttgacccccacaatgtggactacctattgggaggcagaattgaccacgggcaccatgaaggaaaagccaagcaggccctgcatgaggcggtggagatggaccgggccatcgggcaggcaggcagcttgacctcctcggaagacactctgaccgtggtcactgcggaccattcccacgtcttcacatttggtggatacaccccccgtggcaactctatctttggtctggcccccatgctgagtgacacagacaagaagcccttcactgccatcctgtatggcaatgggcctggctacaaggtggtgggcggtgaacgagagaatgtctccatggtggactatgctcacaacaactaccaggcgcagtctgctgtgcccctgcgccacgagacccacggcggggaggacgtggccgtcttctccaagggccccatggcgcacctgctgcacggcgtccacgagcagaactacgtcccccacgtgatggcgtatgcagcctgcatcggggccaacctcggccactgtgctcctgccagctcggcaggcagccttgctgcaggccccctgctgctcgcgctggccctctaccccctgagcgtcctgttctgagggcccagggcccgggcacccacaagcccgtgacagatgccaacttcccacacggcagcccccccctcaaggggcagggaggtgggggcctcctcagcctctgcaactgcaagaaaggggacccaggaaaccaaagtctgccgcccacctcgctcccctctggaatcttccccaagggccaaacccacttctggcctccagcctttgctccctccccgctgccctttggccaacagggtagatttctcttgggcaggcagagagtacagactgcagacattctcaaagcctcttatttttctagcgaacgtatttctccagacccagaggccctgaagcctccgtggaacattctggatctgaccctcccagtctcatctcctgaccctcccactcccatctccttacctctggaaccccccaggccctacaatgctcatgtccctgtccccaggcccagccctccttcaggggagttgaggtctttctcctcaggacaaggccttgctcactcactcactccaagaccaccagggtcccaggaagccggtgcctgggtggccatcctacccagcgtggcccaggccgggaagagccacctggcagggctcacactcctgggctctgaacacacacgccagctcctctctgaagcgactctcctgtttggaacggcaaaaaaaaatttttttttctctttttggtggtggttaaaagggaacacaaaacatttaaataaaactttccaaatatt

SEQ ID NO: 437078 - DNA, 2416 bp, Homo sapiens
cctcactcgggccccgcggccgcctttataaggcggcgggggtggtggcccgggccgcgttgcgctcccgccactccgcgcccgctatcctggctccgtgctcccacgcgcttgtgcctggacggaccctcgccagtgctctgcgcagagaaagagaaagaccccaagtactggcgagaccaagcgcaagagacactgaaatatgccctggagcttcagaagctcaacaccaacgtggctaagaatgtcatcatgttcctgggagatgggatgggtgtctccacagtgacggctgcccgcatcctcaagggtcagctccaccacaaccctggggaggagaccaggctggagatggacaagttccccttcgtggccctctccaagacgtacaacaccaatgcccaggtccctgacagcgccggcaccgccaccgcctacctgtgtggggtgaaggccaatgagggcaccgtgggggtaagcgcagccactgagcgttcccggtgcaacaccacccaggggaacgaggtcacctccatcctgcgctgggccaaggacgctgggaaatctgtgggcattgtgaccaccacgagagtgaaccatgccacccccagcgccgcctacgcccactcggctgaccgggactggtactcagacaacgagatgccccctgaggccttgagccagggctgtaaggacatcgcctaccagctcatgcataacatcagggacattgacgtgatcatggggggtggccggaaatacatgtaccccaagaataaaactgatgtggagtatgagagtgacgagaaagccaggggcacgaggctggacggcctggacctcgttgacacctggaagagcttcaaaccgagatacaagcactcccacttcatctggaaccgcacggaactcctgacccttgacccccacaatgtggactacctattgggtctcttcgagccaggggacatgcagtacgagctgaacaggaacaacgtgacggacccgtcactctccgagatggtggtggtggccatccagatcctgcggaagaaccccaaaggcttcttcttgctggtggaaggaggcagaattgaccacgggcaccatgaaggaaaagccaagcaggccctgcatgaggcggtggagatggaccgggccatcgggcaggcaggcagcttgacctcctcggaagacactctgaccgtggtcactgcggaccattcccacgtcttcacatttggtggatacaccccccgtggcaactctatctttggtctggcccccatgctgagtgacacagacaagaagcccttcactgccatcctgtatggcaatgggcctggctacaaggtggtgggcggtgaacgagagaatgtctccatggtggactatgctcacaacaactaccaggcgcagtctgctgtgcccctgcgccacgagacccacggcggggaggacgtggccgtcttctccaagggccccatggcgcacctgctgcacggcgtccacgagcagaactacgtcccccacgtgatggcgtatgcagcctgcatcggggccaacctcggccactgtgctcctgccagctcggcaggcagccttgctgcaggccccctgctgctcgcgctggccctctaccccctgagcgtcctgttctgagggcccagggcccgggcacccacaagcccgtgacagatgccaacttcccacacggcagcccccccctcaaggggcagggaggtgggggcctcctcagcctctgcaactgcaagaaaggggacccaggaaaccaaagtctgccgcccacctcgctcccctctggaatcttccccaagggccaaacccacttctggcctccagcctttgctccctccccgctgccctttggccaacagggtagatttctcttgggcaggcagagagtacagactgcagacattctcaaagcctcttatttttctagcgaacgtatttctccagacccagaggccctgaagcctccgtggaacattctggatctgaccctcccagtctcatctcctgaccctcccactcccatctccttacctctggaaccccccaggccctacaatgctcatgtccctgtccccaggcccagccctccttcaggggagttgaggtctttctcctcaggacaaggccttgctcactcactcactccaagaccaccagggtcccaggaagccggtgcctgggtggccatcctacccagcgtggcccaggccgggaagagccacctggcagggctcacactcctgggctctgaacacacacgccagctcctctctgaagcgactctcctgtttggaacggcaaaaaaaaatttttttttctctttttggtggtggttaaaagggaacacaaaacatttaaataaaactttccaaatatt

SEQ ID NO: 437079 - DNA, 1593 bp, Homo sapiens
cctcactcgggccccgcggccgcctttataaggcggcgggggtggtggcccgggccgcgttgcgctcccgccactccgcgcccgctatcctggctccgtgctcccacgcgcttgtgcctggacggaccctcgccagtgctctgcgcaggattggaacatcagttaacatctgaccactgccagcccaccccctcccacccacgtcgattgcatctctgggctccagggataaagcaggtcttggggtgcaccatgatttcaccattcttagtactggccattggcacctgccttactaactccttagtgccagagaaagagaaagaccccaagtactggcgagaccaagcgcaagagacactgaaatatgccctggagcttcagaagctcaacaccaacgtggctaagaatgtcatcatgttcctgggagatgggatgggtgtctccacagtgacggctgcccgcatcctcaagggtcagctccaccacaaccctggggaggagaccaggctggagatggacaagttccccttcgtggccctctccaagacgtacaacaccaatgcccaggtccctgacagcgccggcaccgccaccgcctacctgtgtggggtgaaggccaatgagggcaccgtgggggtaagcgcagccactgagcgttcccggtgcaacaccacccaggggaacgaggtcacctccatcctgcgctgggccaaggacgctgggaaatctgtgggcattgtgaccaccacgagagtgaaccatgccacccccagcgccgcctacgcccactcggctgaccgggactggtactcagacaacgagatgccccctgaggccttgagccagggctgtaaggacatcgcctaccagctcatgcataacatcagggacattgacgtgatcatggggggtggccggaaatacatgtaccccaagaataaaactgatgtggagtatgagagtgacgagaaagccaggggcacgaggctggacggcctggacctcgttgacacctggaagagcttcaaaccgagatacaagtgctccctccccgctgccctttggccaacagggtagatttctcttgggcaggcagagagtacagactgcagacattctcaaagcctcttatttttctagcgaacgtatttctccagacccagaggccctgaagcctccgtggaacattctggatctgaccctcccagtctcatctcctgaccctcccactcccatctccttacctctggaaccccccaggccctacaatgctcatgtccctgtccccaggcccagccctccttcaggggagttgaggtctttctcctcaggacaaggccttgctcactcactcactccaagaccaccagggtcccaggaagccggtgcctgggtggccatcctacccagcgtggcccaggccgggaagagccacctggcagggctcacactcctgggctctgaacacacacgccagctcctctctgaagcgactctcctgtttggaacggcaaaaaaaaatttttttttctctttttggtggtggttaaaagggaacacaaaacatttaaataaaactttccaaatatt

SEQ ID NO: 437080 - DNA, 2602 bp, Homo sapiens
cctcactcgggccccgcggccgcctttataaggcggcgggggtggtggcccgggccgcgttgcgctcccgccactccgcgcccgctatcctggctccgtgctcccacgcgcttgtgcctggacggaccctcgccagtgctctgcgcaggattggaacatcagttaacatctgaccactgccagcccaccccctcccacccacgtcgattgcatctctgggctccagggataaagcaggtcttggggtgcaccatgatttcaccattcttagtactggccattggcacctgccttactaactccttagtgccagagaaagagaaagaccccaagtactggcgagaccaagcgcaagagacactgaaatatgccctggagcttcagaagctcaacaccaacgtggctaagaatgtcatcatgttcctgggagatgggatgggtgtctccacagtgacggctgcccgcatcctcaagggtcagctccaccacaaccctggggaggagaccaggctggagatggacaagttccccttcgtggccctctccaagacgtacaacaccaatgcccaggtccctgacagcgccggcaccgccaccgcctacctgtgtggggtgaaggccaatgagggcaccgtgggggtaagcgcagccactgagcgttcccggtgcaacaccacccaggggaacgaggtcacctccatcctgcgctgggccaaggacgctgggaaatctgtgggcattgtgaccaccacgagagtgaaccatgccacccccagcgccgcctacgcccactcggctgaccgggactggtactcagacaacgagatgccccctgaggccttgagccagggctgtaaggacatcgcctaccagctcatgcataacatcagggacattgacgtgatcatggggggtggccggaaatacatgtaccccaagaataaaactgatgtggagtatgagagtgacgagaaagccaggggcacgaggctggacggcctggacctcgttgacacctggaagagcttcaaaccgagatacaagcactcccacttcatctggaaccgcacggaactcctgacccttgacccccacaatgtggactacctattgggtctcttcgagccaggggacatgcagtacgagctgaacaggaacaacgtgacggacccgtcactctccgagatggtggtggtggccatccagatcctgcggaagaaccccaaaggcttcttcttgctggtggaaggaggcagaattgaccacgggcaccatgaaggaaaagccaagcaggccctgcatgaggcggtggagatggaccgggccatcgggcaggcaggcagcttgacctcctcggaagacactctgaccgtggtcactgcggaccattcccacgtcttcacatttggtggatacaccccccgtggcaactctatctttggtctggcccccatgctgagtgacacagacaagaagcccttcactgccatcctgtatggcaatgggcctggctacaaggtggtgggcggtgaacgagagaatgtctccatggtggactatgctcacaacaactaccaggcgcagtctgctgtgcccctgcgccacgagacccacggcggggaggacgtggccgtcttctccaagggccccatggcgcacctgctgcacggcgtccacgagcagaactacgtcccccacgtgatggcgtatgcagcctgcatcggggccaacctcggccactgtgctcctgccagctcggcaggcagccttgctgcaggccccctgctgctcgcgctggccctctaccccctgagcgtcctgttctgagggcccagggcccgggcacccacaagcccgtgacagatgccaacttcccacacggcagcccccccctcaaggggcagggaggtgggggcctcctcagcctctgcaactgcaagaaaggggacccaggaaaccaaagtctgccgcccacctcgctcccctctggaatcttccccaagggccaaacccacttctggcctccagcctttgctccctccccgctgccctttggccaacagggtagatttctcttgggcaggcagagagtacagactgcagacattctcaaagcctcttatttttctagcgaacgtatttctccagacccagaggccctgaagcctccgtggaacattctggatctgaccctcccagtctcatctcctgaccctcccactcccatctccttacctctggaaccccccaggccctacaatgctcatgtccctgtccccaggcccagccctccttcaggggagttgaggtctttctcctcaggacaaggccttgctcactcactcactccaagaccaccagggtcccaggaagccggtgcctgggtggccatcctacccagcgtggcccaggccgggaagagccacctggcagggctcacactcctgggctctgaacacacacgccagctcctctctgaagcgactctcctgtttggaacggcaaaaaaaaatttttttttctctttttggtggtggttaaaagggaacacaaaacatttaaataaaactttccaaatatttccgaggacaaaaaaaagtct

SEQ ID NO: 437081 - DNA, 2574 bp, Homo sapiens
  misc_feature (2570)..(2570): n is a, c, g, or t
cctcactcgggccccgcggccgcctttataaggcggcgggggtggtggcccgggccgcgttgcgctcccgccactccgcgcccgctatcctggctccgtgctcccacgcgcttgtgcctggacggaccctcgccagtgctctgcgcaggattggaacatcagttaacatctgaccactgccagcccaccccctcccacccacgtcgattgcatctctgggctccagggataaagcaggtcttggggtgcaccatgatttcaccattcttagtactggccattggcacctgccttactaactccttagtgccagagaaagagaaagaccccaagtactggcgagaccaagcgcaagagacactgaaatatgccctggagcttcagaagctcaacaccaacgtggctaagaatgtcatcatgttcctgggagatgggatgggtgtctccacagtgacggctgcccgcatcctcaagggtcagctccaccacaaccctggggaggagaccaggctggagatggacaagttccccttcgtggccctctccaagacgtacaacaccaatgcccaggtccctgacagcgccggcaccgccaccgcctacctgtgtggggtgaaggccaatgagggcaccgtgggggtaagcgcagccactgagcgttcccggtgcaacaccacccaggggaacgaggtcacctccatcctgcgctgggccaaggacgctgggaaatctgtgggcattgtgaccaccacgagagtgaaccatgccacccccagcgccgcctacgcccactcggctgaccgggactggtactcagacaacgagatgccccctgaggccttgagccagggctgtaaggacatcgcctaccagctcatgcataacatcagggacattgacgtgatcatggggggtggccggaaatacatgtaccccaagaataaaactgatgtggagtatgagagtgacgagaaagccaggggcacgaggctggacggcctggacctcgttgacacctggaagagcttcaaaccgagatacaagcactcccacttcatctggaaccgcacggaactcctgacccttgacccccacaatgtggactacctattgggtctcttcgagccaggggacatgcagtacgagctgaacaggaacaacgtgacggacccgtcactctccgagatggtggtggtggccatccagatcctgcggaagaaccccaaaggcttcttcttgctggtggaaggaggcagaattgaccacgggcaccatgaaggaaaagccaagcaggccctgcatgaggcggtggagatggaccgggccatcgggcaggcaggcagcttgacctcctcggaagacactctgaccgtggtcactgcggaccattcccacgtcttcacatttggtggatacaccccccgtggcaactctatctttggtctggcccccatgctgagtgacacagacaagaagcccttcactgccatcctgtatggcaatgggcctggctacaaggtggtgggcggtgaacgagagaatgtctccatggtggactatgctcacaacaactaccaggcgcagtctgctgtgcccctgcgccacgagacccacggcggggaggacgtggccgtcttctccaagggccccatggcgcacctgctgcacggcgtccacgagcagaactacgtcccccacgtgatggcgtatgcagcctgcatcggggccaacctcggccactgtgctcctgccagctcggcaggcagccttgctgcaggccccctgctgctcgcgctggccctctaccccctgagcgtcctgttctgagggcccagggcccgggcacccacaagcccgtgacagatgccaacttcccacacggcagcccccccctcaaggggcagggaggtgggggcctcctcagcctctgcaactgcaagaaaggggacccaggaaaccaaagtctgccgcccacctcgctcccctctggaatcttccccaagggccaaacccacttctggcctccagcctttgctccctccccgctgccctttggccaacagggtagatttctcttgggcaggcagagagtacagactgcagacattctcaaagcctcttatttttctagcgaacgtatttctccagacccagaggccctgaagcctccgtggaacattctggatctgaccctcccagtctcatctcctgaccctcccactcccatctccttacctctggaaccccccaggccctacaatgctcatgtccctgtccccaggcccagccctccttcaggggagttgaggtctttctcctcaggacaaggccttgctcactcactcactccaagaccaccagggtcccaggaagccggtgcctgggtggccatcctacccagcgtggcccaggccgggaagagccacctggcagggctcacactcctgggctctgaacacacacgccagctcctctctgaagcgactctcctgtttggaacggcaaaaaaaaatttttttttctctttttggtggtggttccggccggcgcgctggccggactcgagacgncgct

SEQ ID NO: 437082 - DNA, 2581 bp, Homo sapiens
cctcactcgggccccgcggccgcctttataaggcggcgggggtggtggcccgggccgcgttgcgctcccgccactccgcgcccgctatcctggctccgtgctcccacgcgcttgtgcctggacggaccctcgccagtgctctgcgcaggattggaacatcagttaacatctgaccactgccagcccaccccctcccacccacgtcgattgcatctctgggctccagggataaagcaggtcttggggtgcaccatgatttcaccattcttagtactggccattggcacctgccttactaactccttagtgccagagaaagagaaagaccccaagtactggcgagaccaagcgcaagagacactgaaatatgccctggagcttcagaagctcaacaccaacgtggctaagaatgtcatcatgttcctgggagatgggatgggtgtctccacagtgacggctgcccgcatcctcaagggtcagctccaccacaaccctggggaggagaccaggctggagatggacaagttccccttcgtggccctctccaagacgtacaacaccaatgcccaggtccctgacagcgccggcaccgccaccgcctacctgtgtggggtgaaggccaatgagggcaccgtgggggtaagcgcagccactgagcgttcccggtgcaacaccacccaggggaacgaggtcacctccatcctgcgctgggccaaggacgctgggaaatctgtgggcattgtgaccaccacgagagtgaaccatgccacccccagcgccgcctacgcccactcggctgaccgggactggtactcagacaacgagatgccccctgaggccttgagccagggctgtaaggacatcgcctaccagctcatgcataacatcagggacattgacgtgatcatggggggtggccggaaatacatgtaccccaagaataaaactgatgtggagtatgagagtgacgagaaagccaggggcacgaggctggacggcctggacctcgttgacacctggaagagcttcaaaccgagatacaagcactcccacttcatctggaaccgcacggaactcctgacccttgacccccacaatgtggactacctattgggtctcttcgagccaggggacatgcagtacgagctgaacaggaacaacgtgacggacccgtcactctccgagatggtggtggtggccatccagatcctgcggaagaaccccaaaggcttcttcttgctggtggaaggaggcagaattgaccacgggcaccatgaaggaaaagccaagcaggccctgcatgaggcggtggagatggaccgggccatcgggcaggcaggcagcttgacctcctcggaagacactctgaccgtggtcactgcggaccattcccacgtcttcacatttggtggatacaccccccgtggcaactctatctttggtctggcccccatgctgagtgacacagacaagaagcccttcactgccatcctgtatggcaatgggcctggctacaaggtggtgggcggtgaacgagagaatgtctccatggtggactatgctcacaacaactaccaggcgcagtctgctgtgcccctgcgccacgagacccacggcggggaggacgtggccgtcttctccaagggccccatggcgcacctgctgcacggcgtccacgagcagaactacgtcccccacgtgatggcgtatgcagcctgcatcggggccaacctcggccactgtgctcctgccagctcggcaggcagccttgctgcaggccccctgctgctcgcgctggccctctaccccctgagcgtcctgttctgagggcccagggcccgggcacccacaagcccgtgacagatgccaacttcccacacggcagcccccccctcaaggggcagggaggtgggggcctcctcagcctctgcaactgcaagaaaggggacccaggaaaccaaagtctgccgcccacctcgctcccctctggaatcttccccaagggccaaacccacttctggcctccagcctttgctccctccccgctgccctttggccaacagggtagatttctcttgggcaggcagagagtacagactgcagacattctcaaagcctcttatttttctagcgaacgtatttctccagacccagaggccctgaagcctccgtggaacattctggatctgaccctcccagtctcatctcctgaccctcccactcccatctccttacctctggaaccccccaggccctacaatgctcatgtccctgtccccaggcccagccctccttcaggggagttgaggtctttctcctcaggacaaggccttgctcactcactcactccaagaccaccagggtcccaggaagccggtgcctgggtggccatcctacccagcgtggcccaggccgggaagagccacctggcagggctcacactcctgggctctgaacacacacgccagctcctctctgaagcgactctcctgtttggaacggcaaaaaaaaatttttttttctctttttggtggtggttaaaagggaacacaaaacatttaaataaaactttccaaatatt

SEQ ID NO: 437083 - DNA, 2947 bp, Homo sapiens
cctcactcgggccccgcggccgcctttataaggcggcgggggtggtggcccgggccgcgttgcgctcccgccactccgcgcccgctatcctggctccgtgctcccacgcgcttgtgcctggacggaccctcgccagtgctctgcgcaggattggaacatcagttaacatctgaccactgccagcccaccccctcccacccacgtcgattgcatctctgggctccagggataaagcaggtcttggggtgcaccatgatttcaccattcttagtactggccattggcacctgccttactaactccttagtgccagagaaagagaaagaccccaagtactggcgagaccaagcgcaagagacactgaaatatgccctggagcttcagaagctcaacaccaacgtggctaagaatgtcatcatgttcctgggagatgggatgggtgtctccacagtgacggctgcccgcatcctcaagggtcagctccaccacaaccctggggaggagaccaggctggagatggacaagttccccttcgtggccctctccaagacgtacaacaccaatgcccaggtccctgacagcgccggcaccgccaccgcctacctgtgtggggtgaaggccaatgagggcaccgtgggggtaagcgcagccactgagcgttcccggtgcaacaccacccaggggaacgaggtcacctccatcctgcgctgggccaaggacgctgggaaatctgtgggcattgtgaccaccacgagagtgaaccatgccacccccagcgccgcctacgcccactcggctgaccgggactggtactcagacaacgagatgccccctgaggccttgagccagggctgtaaggacatcgcctaccagctcatgcataacatcagggacattgacgtgatcatggggggtggccggaaatacatgtaccccaagaataaaactgatgtggagtatgagagtgacgagaaagccaggggcacgaggctggacggcctggacctcgttgacacctggaagagcttcaaaccgagatacaagcactcccacttcatctggaaccgcacggaactcctgacccttgacccccacaatgtggactacctattgggtctcttcgagccaggggacatgcagtacgagctgaacaggaacaacgtgacggacccgtcactctccgagatggtggtggtggccatccagatcctgcggaagaaccccaaaggcttcttcttgctggtggaaggaggcagaattgaccacgggcaccatgaaggaaaagccaagcaggccctgcatgaggcggtggagatggaccgggccatcgggcaggcaggcagcttgacctcctcggaagacactctgaccgtggtcactgcggaccattcccacgtcttcacatttggtggatacaccccccgtggcaactctatctttggtctggcccccatgctgagtgacacagacaagaagcccttcactgccatcctgtatggcaatgggcctggctacaaggtggtgggcggtgaacgagagaatgtctccatggtggactatgctcacaacaactaccaggcgcagtctgctgtgcccctgcgccacgagacccacggcggggaggacgtggccgtcttctccaagggccccatggcgcacctgctgcacggcgtccacgagcagaactacgtcccccacgtgatggcgtatgcagcctgcatcggggccaacctcggccactgtgctcctgccagctcggcaggcagccttgctgcaggccccctgctgctcgcgctggccctctaccccctgagcgtcctgttctgagggcccagggcccgggcacccacaagcccgtgacagatgccaacttcccacacggcagcccccccctcaaggggcagggaggtgggggcctcctcagcctctgcaactgcaagaaaggggacccaggaaaccaaagtctgccgcccacctcgctcccctctggaatcttccccaagggccaaacccacttctggcctccagcctttgctccctccccgctgccctttggccaacagggtagatttctcttgggcaggcagagagtacagactgcagacattctcaaagcctcttatttttctagcgaacgtatttctccagacccagaggccctgaagcctccgtggaacattctggatctgaccctcccagtctcatctcctgaccctcccactcccatctccttacctctggaaccccccaggccctacaatgctcatgtccctgtccccaggcccagccctccttcaggggagttgaggtctttctcctcaggacaaggccttgctcactcactcactccaagaccaccagggtcccaggaagccggtgcctgggtggccatcctacccagcgtggcccaggccgggaagagccacctggcagggctcacactcctgggctctgaacacacacgccagctcctctctgaagcgactctcctgtttggaacggcaaaaaaaaatttttttttctctttttggtggtggttaaaagggaacacaaaacatttaaataaaactttccaaatattaaaaaaaaaaaaaaaaaaaaaaaaaaaaaaaaaaaaaaaaaaaaaaaaaaaaaaaaaaacaagaaaaaaaaaaaaaaaaacaaaaacaaaacaaaaaaaacaaaaaagaaaaaaagcgaggagggccggcccgatagaaacattcattcaggggagccgaaccacaagagcaaaccaaccccgagttatagaagagagaggggacgtcaccaaagagagaagaagtatgtattttgtttgcggtgggtgggtgggtgagtgaaaaaaaaaacgagaggagaaaagaaaggcgcacgcgtggatctctatagggaaagagcaacctactgtgcggtggggagagaacacgtgagcgcggccagaagg

SEQ ID NO: 437084 - DNA, 2518 bp, Homo sapiens
ggctggtacggccggaagtgatggatctggctccgtgctcccacgcgcttgtgcctggacggaccctcgccagtgctctgcgcaggattggaacatcagttaacatctgaccactgccagcccaccccctcccacccacgtcgattgcatctctgggctccagggataaagcaggtcttggggtgcaccatgatttcaccattcttagtactggccattggcacctgccttactaactccttagtgccagagaaagagaaagaccccaagtactggcgagaccaagcgcaagagacactgaaatatgccctggagcttcagaagctcaacaccaacgtggctaagaatgtcatcatgttcctgggagatgggatgggtgtctccacagtgacggctgcccgcatcctcaagggtcagctccaccacaaccctggggaggagaccaggctggagatggacaagttccccttcgtggccctctccaagacgtacaacaccaatgcccaggtccctgacagcgccggcaccgccaccgcctacctgtgtggggtgaaggccaatgagggcaccgtgggggtaagcgcagccactgagcgttcccggtgcaacaccacccaggggaacgaggtcacctccatcctgcgctgggccaaggacgctgggaaatctgtgggcattgtgaccaccacgagagtgaaccatgccacccccagcgccgcctacgcccactcggctgaccgggactggtactcagacaacgagatgccccctgaggccttgagccagggctgtaaggacatcgcctaccagctcatgcataacatcagggacattgacgtgatcatggggggtggccggaaatacatgtaccccaagaataaaactgatgtggagtatgagagtgacgagaaagccaggggcacgaggctggacggcctggacctcgttgacacctggaagagcttcaaaccgagatacaagcactcccacttcatctggaaccgcacggaactcctgacccttgacccccacaatgtggactacctattgggtctcttcgagccaggggacatgcagtacgagctgaacaggaacaacgtgacggacccgtcactctccgagatggtggtggtggccatccagatcctgcggaagaaccccaaaggcttcttcttgctggtggaaggaggcagaattgaccacgggcaccatgaaggaaaagccaagcaggccctgcatgaggcggtggagatggaccgggccatcgggcaggcaggcagcttgacctcctcggaagacactctgaccgtggtcactgcggaccattcccacgtcttcacatttggtggatacaccccccgtggcaactctatctttggtctggcccccatgctgagtgacacagacaagaagcccttcactgccatcctgtatggcaatgggcctggctacaaggtggtgggcggtgaacgagagaatgtctccatggtggactatgctcacaacaactaccaggcgcagtctgctgtgcccctgcgccacgagacccacggcggggaggacgtggccgtcttctccaagggccccatggcgcacctgctgcacggcgtccacgagcagaactacgtcccccacgtgatggcgtatgcagcctgcatcggggccaacctcggccactgtgctcctgccagctcggcaggcagccttgctgcaggccccctgctgctcgcgctggccctctaccccctgagcgtcctgttctgagggcccagggcccgggcacccacaagcccgtgacagatgccaacttcccacacggcagcccccccctcaaggggcagggaggtgggggcctcctcagcctctgcaactgcaagaaaggggacccaggaaaccaaagtctgccgcccacctcgctcccctctggaatcttccccaagggccaaacccacttctggcctccagcctttgctccctccccgctgccctttggccaacagggtagatttctcttgggcaggcagagagtacagactgcagacattctcaaagcctcttatttttctagcgaacgtatttctccagacccagaggccctgaagcctccgtggaacattctggatctgaccctcccagtctcatctcctgaccctcccactcccatctccttacctctggaaccccccaggccctacaatgctcatgtccctgtccccaggcccagccctccttcaggggagttgaggtctttctcctcaggacaaggccttgctcactcactcactccaagaccaccagggtcccaggaagccggtgcctgggtggccatcctacccagcgtggcccaggccgggaagagccacctggcagggctcacactcctgggctctgaacacacacgccagctcctctctgaagcgactctcctgtttggaacggcaaaaaaaaatttttttttctctttttggtggtggttaaaagggaacacaaaacatttaaataaaactttccaaatatt

SEQ ID NO: 437085 - DNA, 2620 bp, Homo sapiens
gggacacgtgggcagagacggataaagacagagacccagagaaagccagatatgttgacagacacagagacagacgccagagaggaaggcagacaaagagacgggtggagacaaagactcccaccaagagacgcagaaggaagatgccgacggtaaagacaaaacaggagacgcgcgcaaggagcaggattggaacatcagttaacatctgaccactgccagcccaccccctcccacccacgtcgattgcatctctgggctccagggataaagcaggtcttggggtgcaccatgatttcaccattcttagtactggccattggcacctgccttactaactccttagtgccagagaaagagaaagaccccaagtactggcgagaccaagcgcaagagacactgaaatatgccctggagcttcagaagctcaacaccaacgtggctaagaatgtcatcatgttcctgggagatgggatgggtgtctccacagtgacggctgcccgcatcctcaagggtcagctccaccacaaccctggggaggagaccaggctggagatggacaagttccccttcgtggccctctccaagacgtacaacaccaatgcccaggtccctgacagcgccggcaccgccaccgcctacctgtgtggggtgaaggccaatgagggcaccgtgggggtaagcgcagccactgagcgttcccggtgcaacaccacccaggggaacgaggtcacctccatcctgcgctgggccaaggacgctgggaaatctgtgggcattgtgaccaccacgagagtgaaccatgccacccccagcgccgcctacgcccactcggctgaccgggactggtactcagacaacgagatgccccctgaggccttgagccagggctgtaaggacatcgcctaccagctcatgcataacatcagggacattgacgtgatcatggggggtggccggaaatacatgtaccccaagaataaaactgatgtggagtatgagagtgacgagaaagccaggggcacgaggctggacggcctggacctcgttgacacctggaagagcttcaaaccgagatacaagcactcccacttcatctggaaccgcacggaactcctgacccttgacccccacaatgtggactacctattgggtctcttcgagccaggggacatgcagtacgagctgaacaggaacaacgtgacggacccgtcactctccgagatggtggtggtggccatccagatcctgcggaagaaccccaaaggcttcttcttgctggtggaaggaggcagaattgaccacgggcaccatgaaggaaaagccaagcaggccctgcatgaggcggtggagatggaccgggccatcgggcaggcaggcagcttgacctcctcggaagacactctgaccgtggtcactgcggaccattcccacgtcttcacatttggtggatacaccccccgtggcaactctatctttggtctggcccccatgctgagtgacacagacaagaagcccttcactgccatcctgtatggcaatgggcctggctacaaggtggtgggcggtgaacgagagaatgtctccatggtggactatgctcacaacaactaccaggcgcagtctgctgtgcccctgcgccacgagacccacggcggggaggacgtggccgtcttctccaagggccccatggcgcacctgctgcacggcgtccacgagcagaactacgtcccccacgtgatggcgtatgcagcctgcatcggggccaacctcggccactgtgctcctgccagctcggcaggcagccttgctgcaggccccctgctgctcgcgctggccctctaccccctgagcgtcctgttctgagggcccagggcccgggcacccacaagcccgtgacagatgccaacttcccacacggcagcccccccctcaaggggcagggaggtgggggcctcctcagcctctgcaactgcaagaaaggggacccaggaaaccaaagtctgccgcccacctcgctcccctctggaatcttccccaagggccaaacccacttctggcctccagcctttgctccctccccgctgccctttggccaacagggtagatttctcttgggcaggcagagagtacagactgcagacattctcaaagcctcttatttttctagcgaacgtatttctccagacccagaggccctgaagcctccgtggaacattctggatctgaccctcccagtctcatctcctgaccctcccactcccatctccttacctctggaaccccccaggccctacaatgctcatgtccctgtccccaggcccagccctccttcaggggagttgaggtctttctcctcaggacaaggccttgctcactcactcactccaagaccaccagggtcccaggaagccggtgcctgggtggccatcctacccagcgtggcccaggccgggaagagccacctggcagggctcacactcctgggctctgaacacacacgccagctcctctctgaagcgactctcctgtttggaacggcaaaaaaaaatttttttttctctttttggtggtggttaaaagggaacacaaaacatttaaataaaactttccaaatatt

SEQ ID NO: 437086 - DNA, 1531 bp, Homo sapiens
gctgtccctctctggcctccgtcaggttgaatggctgcgtaaaatgcctaggctgtggtgctagctcagagtggtgcccggcgaaggttcctgtccttccctagctaacaaaggttaatccagcagcagtgttgtggggctggggagcagatcttcctcccctcctccctcaccgaggcctttgccttggtgtcccaaggaggcagaattgaccacgggcaccatgaaggaaaagccaagcaggccctgcatgaggcggtggagatggaccgggccatcgggcaggcaggcagcttgacctcctcggaagacactctgaccgtggtcactgcggaccattcccacgtcttcacatttggtggatacaccccccgtggcaactctatctttggtctggcccccatgctgagtgacacagacaagaagcccttcactgccatcctgtatggcaatgggcctggctacaaggtggtgggcggtgaacgagagaatgtctccatggtggactatgctcacaacaactaccaggcgcagtctgctgtgcccctgcgccacgagacccacggcggggaggacgtggccgtcttctccaagggccccatggcgcacctgctgcacggcgtccacgagcagaactacgtcccccacgtgatggcgtatgcagcctgcatcggggccaacctcggccactgtgctcctgccagctcggcaggcagccttgctgcaggccccctgctgctcgcgctggccctctaccccctgagcgtcctgttctgagggcccagggcccgggcacccacaagcccgtgacagatgccaacttcccacacggcagcccccccctcaaggggcagggaggtgggggcctcctcagcctctgcaactgcaagaaaggggacccaggaaaccaaagtctgccgcccacctcgctcccctctggaatcttccccaagggccaaacccacttctggcctccagcctttgctccctccccgctgccctttggccaacagggtagatttctcttgggcaggcagagagtacagactgcagacattctcaaagcctcttatttttctagcgaacgtatttctccagacccagaggccctgaagcctccgtggaacattctggatctgaccctcccagtctcatctcctgaccctcccactcccatctccttacctctggaaccccccaggccctacaatgctcatgtccctgtccccaggcccagccctccttcaggggagttgaggtctttctcctcaggacaaggccttgctcactcactcactccaagaccaccagggtcccaggaagccggtgcctgggtggccatcctacccagcgtggcccaggccgggaagagccacctggcagggctcacactcctgggctctgaacacacacgccagctcctctctgaagcgactctcctgtttggaacggcaaaaaaaaatttttttttctctttttggtggtggttaaaagggaacacaaaacatttaaataaaactttccaaatatt

SEQ ID NO: 437087 - DNA, 1140 bp, Homo sapiens
caattgtgctactcaaatcacagtttggatccaggcgctgtaatctttcctcaccctctgtccagtagattcatcaccattctcgatttaggaatgctttaaagatgcttgttatttggaacatatttgagaaagtgacaggaacgtggcaaacaagctgccttaaacagagactgtacctagacctagagtgtaatatcaacttgtcaagtatatcttctgcaactttgctttttgaaagcctagcacaaagtagatcatgagtaaaatgtgattgccgataattacatggagaaatgtgaataaatgactctttaaaccctgtaaactaaactcggcttaaaataggtggtttgaacatttgggaaaccttagttttccctgaaatccaatccttgcaaagcaataatgacaagaggtggataaagcggacttacagaaaagggcgtcttaccggtcccctctaatcacaccatcccccctcttttaaaaaaattttcttctcagataaccaagttaaatctagctcaaatgaaccttttagtttttgaggagggcaataatagtagtgaacaccaaaacgaaaggggatctgggcttcaaaatactaacagttctatttcctagccagtcgtctcccgggctggatgtgccgccgtcccagatctcagcggcggccgcagagcgcagaggtagggagagaaaaaggaggcgtcggcggggcgcgagcgaccagggcgctaagtgccgcctcacagtcctgccagagacaggagacgccgggccgcccgcgccgtctgtcccaagagctcctcctggacatccgcttgactctccgtcgtctccaattggccgtcggggaacggaagccgaagcaaactagtgaacccggaagtgcttcgcggcggaggcccgggcaactcttttgaatggaatcgggctgattcatcgccggtttgcagactgagccgcgtcgggtgtgcgccgctgctgctgttgcctctgtcttcgcgtcaccacagaggcaagacaagggtccatatcgcggcatccggctcccgcccgtcttcaggtaagacccagaaggcaggcctgggaggtctggggaggcagccgtgctaggccgccgccagccccgtg

SEQ ID NO: 437088 - DNA, 1511 bp, Homo sapiens
caattgtgctactcaaatcacagtttggatccaggcgctgtaatctttcctcaccctctgtccagtagattcatcaccattctcgatttaggaatgctttaaagatgcttgttatttggaacatatttgagaaagtgacaggaacgtggcaaacaagctgccttaaacagagactgtacctagacctagagtgtaatatcaacttgtcaagtatatcttctgcaactttgctttttgaaagcctagcacaaagtagatcatgagtaaaatgtgattgccgataattacatggagaaatgtgaataaatgactctttaaaccctgtaaactaaactcggcttaaaataggtggtttgaacatttgggaaaccttagttttccctgaaatccaatccttgcaaagcaataatgacaagaggtggataaagcggacttacagaaaagggcgtcttaccggtcccctctaatcacaccatcccccctcttttaaaaaaattttcttctcagataaccaagttaaatctagctcaaatgaaccttttagtttttgaggagggcaataatagtagtgaacaccaaaacgaaaggggatctgggcttcaaaatactaacagttctatttcctagccagtcgtctcccgggctggatgtgccgccgtcccagatctcagcggcggccgcagagcgcagaggtagggagagaaaaaggaggcgtcggcggggcgcgagcgaccagggcgctaagtgccgcctcacagtcctgccagagacaggagacgccgggccgcccgcgccgtctgtcccaagagctcctcctggacatccgcttgactctccgtcgtctccaattggccgtcggggaacggaagccgaagcaaactagtgaacccggaagtgcttcgcggcggaggcccgggcaactcttttgaatggaatcgggctgattcatcgccggtttgcagactgagccgcgtcgggtgtgcgccgctgctgctgttgcctctgtcttcgcgtcaccacagaggcaagacaagggtccatatcgcggcatccggctcccgcccgtcttcaggagagaaagaaaaaataaaatatacttggggaagttgtacctgccagaattagcaagagctttctttaagaagacatttgtcaaactcaacaaattgaaggttaacaccttaagagttgtagttactgaccagaaatatggacagacttcttagacttggaggaggtatgcctggactgggccagatggagtcttgctctgtcacccaggctagagtgcagtggcatgatcttggctcattgcaacctccacctcctggactcaagagattcttctgcctcagcctcctgagtatcacagaattaatgcaccatctggaaacctctgagatcatgccataaaaggaatttggacttttttggcaaccaatcatcagactatgctgtgattatgcaccttatcagaataataaaacataattggaaaggtgaaataaaaa

SEQ ID NO: 437089 - DNA, 1636 bp, Homo sapiens
caattgtgctactcaaatcacagtttggatccaggcgctgtaatctttcctcaccctctgtccagtagattcatcaccattctcgatttaggaatgctttaaagatgcttgttatttggaacatatttgagaaagtgacaggaacgtggcaaacaagctgccttaaacagagactgtacctagacctagagtgtaatatcaacttgtcaagtatatcttctgcaactttgctttttgaaagcctagcacaaagtagatcatgagtaaaatgtgattgccgataattacatggagaaatgtgaataaatgactctttaaaccctgtaaactaaactcggcttaaaataggtggtttgaacatttgggaaaccttagttttccctgaaatccaatccttgcaaagcaataatgacaagaggtggataaagcggacttacagaaaagggcgtcttaccggtcccctctaatcacaccatcccccctcttttaaaaaaattttcttctcagataaccaagttaaatctagctcaaatgaaccttttagtttttgaggagggcaataatagtagtgaacaccaaaacgaaaggggatctgggcttcaaaatactaacagttctatttcctagccagtcgtctcccgggctggatgtgccgccgtcccagatctcagcggcggccgcagagcgcagaggtagggagagaaaaaggaggcgtcggcggggcgcgagcgaccagggcgctaagtgccgcctcacagtcctgccagagacaggagacgccgggccgcccgcgccgtctgtcccaagagctcctcctggacatccgcttgactctccgtcgtctccaattggccgtcggggaacggaagccgaagcaaactagtgaacccggaagtgcttcgcggcggaggcccgggcaactcttttgaatggaatcgggctgattcatcgccggtttgcagactgagccgcgtcgggtgtgcgccgctgctgctgttgcctctgtcttcgcgtcaccacagaggcaagacaagggtccatatcgcggcatccggctcccgcccgtcttcaggagagaaagaaaaaataaaatatacttggggaagttgtacctgccagaattagcaagagctttctttaagaagacatttgtcaaactcaacaaattgaaggttaacaccttaagagttgtagttactgaccagaaatatggacagacttcttagacttggaggaggtatgcctggactgggccaggttagtatatagtctcttgagcatttccttgtgtgtaaactacaagcctttttgtagttagccaaagagaaagaaattatccccaagaaaatcacctaacagataactctatggtaagaatcttaccttattgatgtttgttatcttgcaacactagataacatgtggaaaacatttattgtcttagtttacttttctcctgggaataagaattttctgttatttgctttgtttaaaattttgagatatgtaggattatcaaagttggcttttaggaaaaaaaaaccctcaaaatagcttacttcctgaatttacagtgtaaactttagatgtaacacaagaaaaagtaagcatgtcatcctgcttgccagatccagaa

SEQ ID NO: 437090 - DNA, 966 bp, Homo sapiens
ctgggattacaggaatgagccaccgtgcctggcctaagagttatttttgatcagaggcatgatatgcttagaacctgactttagaaacatgatttcacaacagtatagaaggaacactgtaagagaagatttgaaatggagagtgtgtttaagaggagcttgctactacccaaacaaaaggctgtagaagaagaagataagatgacacctgaacagctggcaataaagaatgttggcaagcaggaccccaaacgtcatttggaggaacatgtggatgtacttatgacctcaaatattgtccagtgtttagcagctatgttggatactgtcgtatttaaataaagcaacgaaaaacgctattaatgatgccttcagtgtatattcctctgttgttcctaatgctcaaaatcaagggacctctgaaggtgtacttggctaaatgtaagacatctggcatcatttgcagcactgtaacaccttcagtctcagttgtgcaattacttctgtttctttagtcagggtctttgcagattctaaagttatacatgaatacatcaaagtggacaaattttgttaagatcccatttaatatttgaaaaaatcagtagcacaaatatattttgattgtcacttacaaaataaaatacatttacagtctaaaaaaaaaaaacaacacaggcattctgtgccaccccacccccgcaactcaccctcccagctgccctccttgccctccgcgcgggaaaccttgcaggcgtctgtctcctcgaccggcgggtaatctactgacgttcgcaaccggaactacgccagcctcgaacattcggtggcgccacctgaatcagctcatcagaacgaggagctcaagctccccccaaaccccccgtatcaacgccatagaccccctcctatctaaagggcacccacttcaatttaattaaatacacgcccccaacccacgcaaag

SEQ ID NO: 437091 - DNA, 2630 bp, Homo sapiens
caattgtgctactcaaatcacagtttggatccaggcgctgtaatctttcctcaccctctgtccagtagattcatcaccattctcgatttaggaatgctttaaagatgcttgttatttggaacatatttgagaaagtgacaggaacgtggcaaacaagctgccttaaacagagactgtacctagacctagagtgtaatatcaacttgtcaagtatatcttctgcaactttgctttttgaaagcctagcacaaagtagatcatgagtaaaatgtgattgccgataattacatggagaaatgtgaataaatgactctttaaaccctgtaaactaaactcggcttaaaataggtggtttgaacatttgggaaaccttagttttccctgaaatccaatccttgcaaagcaataatgacaagaggtggataaagcggacttacagaaaagggcgtcttaccggtcccctctaatcacaccatcccccctcttttaaaaaaattttcttctcagataaccaagttaaatctagctcaaatgaaccttttagtttttgaggagggcaataatagtagtgaacaccaaaacgaaaggggatctgggcttcaaaatactaacagttctatttcctagccagtcgtctcccgggctggatgtgccgccgtcccagatctcagcggcggccgcagagcgcagaggtagggagagaaaaaggaggcgtcggcggggcgcgagcgaccagggcgctaagtgccgcctcacagtcctgccagagacaggagacgccgggccgcccgcgccgtctgtcccaagagctcctcctggacatccgcttgactctccgtcgtctccaattggccgtcggggaacggaagccgaagcaaactagtgaacccggaagtgcttcgcggcggaggcccgggcaactcttttgaatggaatcgggctgattcatcgccggtttgcagactgagccgcgtcgggtgtgcgccgctgctgctgttgcctctgtcttcgcgtcaccacagaggcaagacaagggtccatatcgcggcatccggctcccgcccgtcttcaggagagaaagaaaaaataaaatatacttggggaagttgtacctgccagaattagcaagagctttctttaagaagacatttgtcaaactcaacaaattgaaggttaacaccttaagagttgtagttactgaccagaaatatggacagacttcttagacttggaggaggtatgcctggactgggccaggggccacctacagatgctcctgcagtggacacagcagaacaagtctatatctcttccctggcactgttaaaaatgttaaaacatggccgtgctggagttccaatggaagttatgggtttgatgcttggagaatttgttgatgattataccgtcagagtgattgatgtgtttgctatgccacagtcaggaacaggtgtcagtgtggaggcagttgatccagtgttccaagctaaaatgttggatatgttgaagcagacaggaaggccggagatggttgttggttggtatcacagtcaccctggctttggttgttggctttctggtgtggatatcaacactcagcagagctttgaagccttgtcggagagagctgtggcagtggttgtggatcccattcagagtgtaaaaggaaaggttgttattgatgccttcagattgatcaatgctaatatgatggtcttaggacatgaaccaagacaaacaacttcgaatctgggtcacttaaacaagccatctatccaggcattaattcatggactaaacagacattattactccattactattaactatcggaaaaatgaactggaacagaagatgttgctaaatttgcataagaagagttggatggaaggtttgacacttcaggactacagtgaacattgtaaacacaatgaatcagtggtaaaagagatgttggaattagccaagaattacaataaggctgtagaagaagaagataagatgacacctgaacagctggcaataaagaatgttggcaagcaggaccccaaacgtcatttggaggaacatgtggatgtacttatgacctcaaatattgtccagtgtttagcagctatgttggatactgtcgtatttaaataaagcaacgaaaaacgctattaatgatgccttcagtgtatattcctctgttgttcctaatgctcaaaatcaagggacctctgaaggtgtacttggctaaatgtaagacatctggcatcatttgcagcactgtaacaccttcagtctcagttgtgcaattacttctgtttctttagtcagggtctttgcagattctaaagttatacatgaatacatcaaagtggacaaattttgttaagatcccatttaatatttgaaaaaatcagtagcacaaatatattttgattgtcacttacaaaataaaatacatttacagtctaaaaaaaaaaatagatggagagagtggtgaaatagtcacagaagtgtgatgagtgtattatttaaaacgcagagtttatttgccccggccggcccctctttttttggagaggaaattaaaaaaaccccgaacaacgcactgcgcctggagaaagaagggggagaatatattt

SEQ ID NO: 437092 - DNA, 2483 bp, Homo sapiens
caattgtgctactcaaatcacagtttggatccaggcgctgtaatctttcctcaccctctgtccagtagattcatcaccattctcgatttaggaatgctttaaagatgcttgttatttggaacatatttgagaaagtgacaggaacgtggcaaacaagctgccttaaacagagactgtacctagacctagagtgtaatatcaacttgtcaagtatatcttctgcaactttgctttttgaaagcctagcacaaagtagatcatgagtaaaatgtgattgccgataattacatggagaaatgtgaataaatgactctttaaaccctgtaaactaaactcggcttaaaataggtggtttgaacatttgggaaaccttagttttccctgaaatccaatccttgcaaagcaataatgacaagaggtggataaagcggacttacagaaaagggcgtcttaccggtcccctctaatcacaccatcccccctcttttaaaaaaattttcttctcagataaccaagttaaatctagctcaaatgaaccttttagtttttgaggagggcaataatagtagtgaacaccaaaacgaaaggggatctgggcttcaaaatactaacagttctatttcctagccagtcgtctcccgggctggatgtgccgccgtcccagatctcagcggcggccgcagagcgcagaggtagggagagaaaaaggaggcgtcggcggggcgcgagcgaccagggcgctaagtgccgcctcacagtcctgccagagacaggagacgccgggccgcccgcgccgtctgtcccaagagctcctcctggacatccgcttgactctccgtcgtctccaattggccgtcggggaacggaagccgaagcaaactagtgaacccggaagtgcttcgcggcggaggcccgggcaactcttttgaatggaatcgggctgattcatcgccggtttgcagactgagccgcgtcgggtgtgcgccgctgctgctgttgcctctgtcttcgcgtcaccacagaggcaagacaagggtccatatcgcggcatccggctcccgcccgtcttcaggagagaaagaaaaaataaaatatacttggggaagttgtacctgccagaattagcaagagctttctttaagaagacatttgtcaaactcaacaaattgaaggttaacaccttaagagttgtagttactgaccagaaatatggacagacttcttagacttggaggaggtatgcctggactgggccaggggccacctacagatgctcctgcagtggacacagcagaacaagtctatatctcttccctggcactgttaaaaatgttaaaacatggccgtgctggagttccaatggaagttatgggtttgatgcttggagaatttgttgatgattataccgtcagagtgattgatgtgtttgctatgccacagtcaggaacaggtgtcagtgtggaggcagttgatccagtgttccaagctaaaatgttggatatgttgaagcagacaggaaggccggagatggttgttggttggtatcacagtcaccctggctttggttgttggctttctggtgtggatatcaacactcagcagagctttgaagccttgtcggagagagctgtggcagtggttgtggatcccattcagagtgtaaaaggaaaggttgttattgatgccttcagattgatcaatgctaatatgatggtcttaggacatgaaccaagacaaacaacttcgaatctgggtcacttaaacaagccatctatccaggcattaattcatggactaaacagacattattactccattactattaactatcggaaaaatgaactggaacagaagatgttgctaaatttgcataagaagagttggatggaaggtttgacacttcaggactacagtgaacattgtaaacacaatgaatcagtggtaaaagagatgttggaattagccaagaattacaataaggctgtagaagaagaagataagatgacacctgaacagctggcaataaagaatgttggcaagcaggaccccaaacgtcatttggaggaacatgtggatgtacttatgacctcaaatattgtccagtgtttagcagctatgttggatactgtcgtatttaaataaagcaacgaaaaacgctattaatgatgccttcagtgtatattcctctgttgttcctaatgctcaaaatcaagggacctctgaaggtgtacttggctaaatgtaagacatctggcatcatttgcagcactgtaacaccttcagtctcagttgtgcaattacttctgtttctttagtcagggtctttgcagattctaaagttatacatgaatacatcaaagtggacaaattttgttaagatcccatttaatatttgaaaaaatcagtagcacaaatatattttgattgtcacttacaaaataaaatacatttacagtctaatgcctcctgagatctttttggca

SEQ ID NO: 437093 - DNA, 2451 bp, Homo sapiens
  misc_feature (2428)..(2428): n is a, c, g, or t
caattgtgctactcaaatcacagtttggatccaggcgctgtaatctttcctcaccctctgtccagtagattcatcaccattctcgatttaggaatgctttaaagatgcttgttatttggaacatatttgagaaagtgacaggaacgtggcaaacaagctgccttaaacagagactgtacctagacctagagtgtaatatcaacttgtcaagtatatcttctgcaactttgctttttgaaagcctagcacaaagtagatcatgagtaaaatgtgattgccgataattacatggagaaatgtgaataaatgactctttaaaccctgtaaactaaactcggcttaaaataggtggtttgaacatttgggaaaccttagttttccctgaaatccaatccttgcaaagcaataatgacaagaggtggataaagcggacttacagaaaagggcgtcttaccggtcccctctaatcacaccatcccccctcttttaaaaaaattttcttctcagataaccaagttaaatctagctcaaatgaaccttttagtttttgaggagggcaataatagtagtgaacaccaaaacgaaaggggatctgggcttcaaaatactaacagttctatttcctagccagtcgtctcccgggctggatgtgccgccgtcccagatctcagcggcggccgcagagcgcagaggtagggagagaaaaaggaggcgtcggcggggcgcgagcgaccagggcgctaagtgccgcctcacagtcctgccagagacaggagacgccgggccgcccgcgccgtctgtcccaagagctcctcctggacatccgcttgactctccgtcgtctccaattggccgtcggggaacggaagccgaagcaaactagtgaacccggaagtgcttcgcggcggaggcccgggcaactcttttgaatggaatcgggctgattcatcgccggtttgcagactgagccgcgtcgggtgtgcgccgctgctgctgttgcctctgtcttcgcgtcaccacagaggcaagacaagggtccatatcgcggcatccggctcccgcccgtcttcaggagagaaagaaaaaataaaatatacttggggaagttgtacctgccagaattagcaagagctttctttaagaagacatttgtcaaactcaacaaattgaaggttaacaccttaagagttgtagttactgaccagaaatatggacagacttcttagacttggaggaggtatgcctggactgggccaggggccacctacagatgctcctgcagtggacacagcagaacaagtctatatctcttccctggcactgttaaaaatgttaaaacatggccgtgctggagttccaatggaagttatgggtttgatgcttggagaatttgttgatgattataccgtcagagtgattgatgtgtttgctatgccacagtcaggaacaggtgtcagtgtggaggcagttgatccagtgttccaagctaaaatgttggatatgttgaagcagacaggaaggccggagatggttgttggttggtatcacagtcaccctggctttggttgttggctttctggtgtggatatcaacactcagcagagctttgaagccttgtcggagagagctgtggcagtggttgtggatcccattcagagtgtaaaaggaaaggttgttattgatgccttcagattgatcaatgctaatatgatggtcttaggacatgaaccaagacaaacaacttcgaatctgggtcacttaaacaagccatctatccaggcattaattcatggactaaacagacattattactccattactattaactatcggaaaaatgaactggaacagaagatgttgctaaatttgcataagaagagttggatggaaggtttgacacttcaggactacagtgaacattgtaaacacaatgaatcagtggtaaaagagatgttggaattagccaagaattacaataaggctgtagaagaagaagataagatgacacctgaacagctggcaataaagaatgttggcaagcaggaccccaaacgtcatttggaggaacatgtggatgtacttatgacctcaaatattgtccagtgtttagcagctatgttggatactgtcgtatttaaataaagcaacgaaaaacgctattaatgatgccttcagtgtatattcctctgttgttcctaatgctcaaaatcaagggacctctgaaggtgtacttggctaaatgtaagacatctggcatcatttgcagcactgtaacaccttcagtctcagttgtgcaattacttctgtttctttagtcagggtctttgcagattctaaagttatacatgaatacatcaaagtggacaaattgagggcgcgctgctcggggcggtcgaggcggcgcgcaggctggcgtagccgcggtgtncggcgggcgagcggccggcggcg

SEQ ID NO: 437094 - DNA, 1237 bp, Homo sapiens
  misc_feature (22)..(23): n is a, c, g, or t
  misc_feature (35)..(35): n is a, c, g, or t
catgctgaacgactctctaatnnccaccgctacangggccacctacagatgctcctgcagtggacacagcagaacaagtctatatctcttccctggcactgttaaaaatgttaaaacatggccgtgctggagttccaatggaagttatgggtttgatgcttggagaatttgttgatgattataccgtcagagtgattgatgtgtttgctatgccacagtcaggaacaggtgtcagtgtggaggcagttgatccagtgttccaagctaaaatgttggatatgttgaagcagacaggaaggccggagatggttgttggttggtatcacagtcaccctggctttggttgttggctttctggtgtggatatcaacactcagcagagctttgaagccttgtcggagagagctgtggcagtggttgtggatcccattcagagtgtaaaaggaaaggttgttattgatgccttcagattgatcaatgctaatatgatggtcttaggacatgaaccaagacaaacaacttcgaatctgggtcacttaaacaagccatctatccaggcattaattcatggactaaacagacattattactccattactattaactatcggaaaaatgaactggaacagaagatgttgctaaatttgcataagaagagttggatggaaggtttgacacttcaggactacagtgaacattgtaaacacaatgaatcagtggtaaaagagatgttggaattagccaagaattacaataaggctgtagaagaagaagataagatgacacctgaacagctggcaataaagaatgttggcaagcaggaccccaaacgtcatttggaggaacatgtggatgtacttatgacctcaaatattgtccagtgtttagcagctatgttggatactgtcgtatttaaataaagcaacgaaaaacgctattaatgatgccttcagtgtatattcctctgttgttcctaatgctcaaaatcaagggacctctgaaggtgtacttggctaaatgtaagacatctggcatcatttgcagcactgtaacaccttcagtctcagttgtgcaattacttctgtttctttagtcagggtctttgcagattctaaagttatacatgaatacatcaaagtggacaaattttgttaagatcccatttaatatttgaaaaaatcagtagcacaaatatattttgattgtcacttacaaaataaaatacatttacagtcta

SEQ ID NO: 437095 - DNA, 2212 bp, Homo sapiens
  misc_feature (2164)..(2165): n is a, c, g, or t
caattgtgctactcaaatcacagtttggatccaggcgctgtaatctttcctcaccctctgtccagtagattcatcaccattctcgatttaggaatgctttaaagatgcttgttatttggaacatatttgagaaagtgacaggaacgtggcaaacaagctgccttaaacagagactgtacctagacctagagtgtaatatcaacttgtcaagtatatcttctgcaactttgctttttgaaagcctagcacaaagtagatcatgagtaaaatgtgattgccgataattacatggagaaatgtgaataaatgactctttaaaccctgtaaactaaactcggcttaaaataggtggtttgaacatttgggaaaccttagttttccctgaaatccaatccttgcaaagcaataatgacaagaggtggataaagcggacttacagaaaagggcgtcttaccggtcccctctaatcacaccatcccccctcttttaaaaaaattttcttctcagataaccaagttaaatctagctcaaatgaaccttttagtttttgaggagggcaataatagtagtgaacaccaaaacgaaaggggatctgggcttcaaaatactaacagttctatttcctagccagtcgtctcccgggctggatgtgccgccgtcccagatctcagcggcggccgcagagcgcagaggtagggagagaaaaaggaggcgtcggcggggcgcgagcgaccagggcgctaagtgccgcctcacagtcctgccagagacaggagacgccgggccgcccgcgccgtctgtcccaagagctcctcctggacatccgcttgactctccgtcgtctccaattggccgtcggggaacggaagccgaagcaaactagtgaacccggaagtgcttcgcggcggaggcccgggcaactcttttgaatggaatcgggctgattcatcgccggtttgcagactgagccgcgtcgggtgtgcgccgctgctgctgttgcctctgtcttcgcgtcaccacagaggcaagacaagggtccatatcgcggcatccggctcccgcccgtcttcaggagagaaagaaaaaataaaatatacttggggaagttgtacctgccagaattagcaagagctttctttaagaagacatttgtcaaactcaacaaattgaaggttaacaccttaagagttgtagttactgaccagaaatatggacagacttcttagacttggaggaggtatgcctggactgggccaggggccacctacagatgctcctgcagtggacacagcagaacaagtctatatctcttccctggcactgttaaaaatgttaaaacatggccgtgctggagttccaatggaagttatgggtttgatgcttggagaatttgttgatgattataccgtcagagtgattgatgtgtttgctatgccacagtcaggaacaggtgtcagtgtggaggcagttgatccagtgttccaagctaaaatgttggatatgttgaagcagacaggaaggccggagatggttgttggttggtatcacagtcaccctggctttggttgttggctttctggtgtggatatcaacactcagcagagctttgaagccttgtcggagagagctgtggcagtggttgtggatcccattcagagtgtaaaaggaaaggttgttattgatgccttcagattgatcaatgctaatatgatggtcttaggacatgaaccaagacaaacaacttcgaatctgggtcacttaaacaagccatctatccaggcattaattcatggactaaacagacattattactccattactattaactatcggaaaaatgaactggaacagaagatgttgctaaatttgcataagaagagttggatggaaggtttgacacttcaggactacagtgaacattgtaaacacaatgaatcagtggtaaaagagatgttggaattagccaagaattacaataaggctgtagaagaagaagataagatgacacctgaacagctggcaataaagaatgttggcaagcaggaccccaaacgtcatttggaggaacatgtggatgtacttatgacctcaaatattgtccagtgtttagcagctatgttggatactgtcgtatttaaataaagcaacgaaaaacggagccgcnnctcttataattattaaaataatgataagttatatatataccgataag

SEQ ID NO: 437096 - DNA, 857 bp, Homo sapiens
ttagggcagtttgtccgggattgtgcatccttccggggttgtggatcccattcagagtgtcaaaggaaagttgttattgatgccttcagattgatcaatgctaatatgatggtcttaggacatgaaccaagacaaacaacttcgaatctgggtcacttaaacaagccatctatccaggcattaattcatggactaaacagacattattactccattactattaactatcggaaaaatgaactggaacagaagatgttgctaaatttgcataagaagagttggatggaaggtttgacacttcaggactacagtgaacattgtaaacacaatgaatcagtggtaaaagagatgttggaattagccaagaattacaataaggctgtagaagaagaagataagatgacacctgaacagctggcaataaagaatgttggcaagcaggaccccaaacgtcatttggaggaacatgtggatgtacttatgacctcaaatattgtccagtgtttagcagctatgttggatactgtcgtatttaaataaagcaacgaaaaacgctattaatgatgccttcagtgtatattcctctgttgttcctaatgctcaaaatcaagggacctctgaaggtgtacttggctaaatgtaagacatctggcatcatttgcagcactgtaacaccttcagtctcagttgtgcaattacttctgtttctttagtcagggtctttgcagattctaaagttatacatgaatacatcaaagtggacaaattttgttaagatcccatttaatatttgaaaaaatcagtagcacaaatatattttgattgtcacttacaaaataaaatacatttacagtcta

SEQ ID NO: 437097 - DNA, 659 bp, Homo sapiens
ctgggattacaggaatgagccaccgtgcctggcctaagagttatttttgatcagaggcatgatatgcttagaacctgactttagaaacatgatttcacaacagtatagaaggaacactgtaagagaagatttgaaatggagagtgtgtttaagaggagcttgctactacccaaacaaaaggctgtagaagaagaagataagatgacacctgaacagctggcaataaagaatgttggcaagcaggaccccaaacgtcatttggaggaacatgtggatgtacttatgacctcaaatattgtccagtgtttagcagctatgttggatactgtcgtatttaaataaagcaacgaaaaacgctattaatgatgccttcagtgtatattcctctgttgttcctaatgctcaaaatcaagggacctctgaaggtgtacttggctaaatgtaagacatctggcatcatttgcagcactgtaacaccttcagtctcagttgtgcaattacttctgtttctttagtcagggtctttgcagattctaaagttatacatgaatacatcaaagtggacaaattttgttaagatcccatttaatatttgaaaaaatcagtagcacaaatatattttgattgtcacttacaaaataaaatacatttacagtcta

SEQ ID NO: 437098 - DNA, 539 bp, Homo sapiens
acaatacatcattatcattaatttacaatcactcctacgtttgtggaatctatgctctccgctgtagaagaagaagataagatgacacctgaacagctggcaataaagaatgttggcaagcaggaccccaaacgtcatttggaggaacatgtggatgtacttatgacctcaaatattgtccagtgtttagcagctatgttggatactgtcgtatttaaataaagcaacgaaaaacgctattaatgatgccttcagtgtatattcctctgttgttcctaatgctcaaaatcaagggacctctgaaggtgtacttggctaaatgtaagacatctggcatcatttgcagcactgtaacaccttcagtctcagttgtgcaattacttctgtttctttagtcagggtctttgcagattctaaagttatacatgaatacatcaaagtggacaaattttgttaagatcccatttaatatttgaaaaaatcagtagcacaaatatattttgattgtcacttacaaaataaaatacatttacagtcta

SEQ ID NO: 437099 - DNA, 546 bp, Homo sapiens
tcacactctacacttcaccaaaacctttacctccacattacagatgacaccatctgagctgacgcaagctgtagaagaagaagataagatgacacctgaacagctggcaataaagaatgttggcaagcaggaccccaaacgtcatttggaggaacatgtggatgtacttatgacctcaaatattgtccagtgtttagcagctatgttggatactgtcgtatttaaataaagcaacgaaaaacgctattaatgatgccttcagtgtatattcctctgttgttcctaatgctcaaaatcaagggacctctgaaggtgtacttggctaaatgtaagacatctggcatcatttgcagcactgtaacaccttcagtctcagttgtgcaattacttctgtttctttagtcagggtctttgcagattctaaagttatacatgaatacatcaaagtggacaaattttgttaagatcccatttaatatttgaaaaaatcagtagcacaaatatattttgattgtcacttacaaaataaaatacatttacagtcta

SEQ ID NO: 437100 - DNA, 2459 bp, Homo sapiens
caattgtgctactcaaatcacagtttggatccaggcgctgtaatctttcctcaccctctgtccagtagattcatcaccattctcgatttaggaatgctttaaagatgcttgttatttggaacatatttgagaaagtgacaggaacgtggcaaacaagctgccttaaacagagactgtacctagacctagagtgtaatatcaacttgtcaagtatatcttctgcaactttgctttttgaaagcctagcacaaagtagatcatgagtaaaatgtgattgccgataattacatggagaaatgtgaataaatgactctttaaaccctgtaaactaaactcggcttaaaataggtggtttgaacatttgggaaaccttagttttccctgaaatccaatccttgcaaagcaataatgacaagaggtggataaagcggacttacagaaaagggcgtcttaccggtcccctctaatcacaccatcccccctcttttaaaaaaattttcttctcagataaccaagttaaatctagctcaaatgaaccttttagtttttgaggagggcaataatagtagtgaacaccaaaacgaaaggggatctgggcttcaaaatactaacagttctatttcctagccagtcgtctcccgggctggatgtgccgccgtcccagatctcagcggcggccgcagagcgcagaggtagggagagaaaaaggaggcgtcggcggggcgcgagcgaccagggcgctaagtgccgcctcacagtcctgccagagacaggagacgccgggccgcccgcgccgtctgtcccaagagctcctcctggacatccgcttgactctccgtcgtctccaattggccgtcggggaacggaagccgaagcaaactagtgaacccggaagtgcttcgcggcggaggcccgggcaactcttttgaatggaatcgggctgattcatcgccggtttgcagactgagccgcgtcgggtgtgcgccgctgctgctgttgcctctgtcttcgcgtcaccacagaggcaagacaagggtccatatcgcggcatccggctcccgcccgtcttcaggagagaaagaaaaaataaaatatacttggggaagttgtacctgccagaattagcaagagctttctttaagaagacatttgtcaaactcaacaaattgaaggttaacaccttaagagttgtagttactgaccagaaatatggacagacttcttagacttggaggaggtatgcctggactgggccaggggccacctacagatgctcctgcagtggacacagcagaacaagtctatatctcttccctggcactgttaaaaatgttaaaacatggccgtgctggagttccaatggaagttatgggtttgatgcttggagaatttgttgatgattataccgtcagagtgattgatgtgtttgctatgccacagtcaggaacaggtgtcagtgtggaggcagttgatccagtgttccaagctaaaatgttggatatgttgaagcagacaggaaggccggagatggttgttggttggtatcacagtcaccctggctttggttgttggctttctggtgtggatatcaacactcagcagagctttgaagccttgtcggagagagctgtggcagtggttgtggatcccattcagagtgtaaaaggaaaggttgttattgatgccttcagattgatcaatgctaatatgatggtcttaggacatgaaccaagacaaacaacttcgaatctgggtcacttaaacaagccatctatccaggcattaattcatggactaaacagacattattactccattactattaactatcggaaaaatgaactggaacagaagatgttgctaaatttgcataagaagagttggatggaaggtttgacacttcaggactacagtgaacattgtaaacacaatgaatcagtggtaaaagagatgttggaattagccaagaattacaataaggctgtagaagaagaagataagatgacacctgaacagctggcaataaagaatgttggcaagcaggaccccaaacgtcatttggaggaacatgtggatgtacttatgacctcaaatattgtccagtgtttagcagctatgttggatactgtcgtatttaaataaagcaacgaaaaacgctattaatgatgccttcagtgtatattcctctgttgttcctaatgctcaaaatcaagggacctctgaaggtgtacttggctaaatgtaagacatctggcatcatttgcagcactgtaacaccttcagtctcagttgtgcaattacttctgtttctttagtcagggtctttgcagattctaaagttatacatgaatacatcaaagtggacaaattttgttaagatcccatttaatatttgaaaaaatcagtagcacaaatatattttgattgtcacttacaaaataaaatacatttacagtcta

SEQ ID NO: 437101 - DNA, 2766 bp, Homo sapiens
caattgtgctactcaaatcacagtttggatccaggcgctgtaatctttcctcaccctctgtccagtagattcatcaccattctcgatttaggaatgctttaaagatgcttgttatttggaacatatttgagaaagtgacaggaacgtggcaaacaagctgccttaaacagagactgtacctagacctagagtgtaatatcaacttgtcaagtatatcttctgcaactttgctttttgaaagcctagcacaaagtagatcatgagtaaaatgtgattgccgataattacatggagaaatgtgaataaatgactctttaaaccctgtaaactaaactcggcttaaaataggtggtttgaacatttgggaaaccttagttttccctgaaatccaatccttgcaaagcaataatgacaagaggtggataaagcggacttacagaaaagggcgtcttaccggtcccctctaatcacaccatcccccctcttttaaaaaaattttcttctcagataaccaagttaaatctagctcaaatgaaccttttagtttttgaggagggcaataatagtagtgaacaccaaaacgaaaggggatctgggcttcaaaatactaacagttctatttcctagccagtcgtctcccgggctggatgtgccgccgtcccagatctcagcggcggccgcagagcgcagaggtagggagagaaaaaggaggcgtcggcggggcgcgagcgaccagggcgctaagtgccgcctcacagtcctgccagagacaggagacgccgggccgcccgcgccgtctgtcccaagagctcctcctggacatccgcttgactctccgtcgtctccaattggccgtcggggaacggaagccgaagcaaactagtgaacccggaagtgcttcgcggcggaggcccgggcaactcttttgaatggaatcgggctgattcatcgccggtttgcagactgagccgcgtcgggtgtgcgccgctgctgctgttgcctctgtcttcgcgtcaccacagaggcaagacaagggtccatatcgcggcatccggctcccgcccgtcttcaggagagaaagaaaaaataaaatatacttggggaagttgtacctgccagaattagcaagagctttctttaagaagacatttgtcaaactcaacaaattgaaggttaacaccttaagagttgtagttactgaccagaaatatggacagacttcttagacttggaggaggtatgcctggactgggccaggggccacctacagatgctcctgcagtggacacagcagaacaagtctatatctcttccctggcactgttaaaaatgttaaaacatggccgtgctggagttccaatggaagttatgggtttgatgcttggagaatttgttgatgattataccgtcagagtgattgatgtgtttgctatgccacagtcaggaacaggtgtcagtgtggaggcagttgatccagtgttccaagctaaaatgttggatatgttgaagcagacaggaaggccggagatggttgttggttggtatcacagtcaccctggctttggttgttggctttctggtgtggatatcaacactcagcagagctttgaagccttgtcggagagagctgtggcagtggttgtggatcccattcagagtgtaaaaggaaaggttgttattgatgccttcagattgatcaatgctaatatgatggtcttaggacatgaaccaagacaaacaacttcgaatctgggtcacttaaacaagccatctatccaggcattaattcatggactaaacagacattattactccattactattaactatcggaaaaatgaactggaacagaagatgttgctaaatttgcataagaagagttggatggaaggtttgacacttcaggactacagtgaacattgtaaacacaatgaatcagtggtaaaagagatgttggaattagccaagaattacaataaggctgtagaagaagaagataagatgacacctgaacagctggcaataaagaatgttggcaagcaggaccccaaacgtcatttggaggaacatgtggatgtacttatgacctcaaatattgtccagtgtttagcagctatgttggatactgtcgtatttaaataaagcaacgaaaaacgctattaatgatgccttcagtgtatattcctctgttgttcctaatgctcaaaatcaagggacctctgaaggtgtacttggctaaatgtaagacatctggcatcatttgcagcactgtaacaccttcagtctcagttgtgcaattacttctgtttctttagtcagggtctttgcagattctaaagttatacatgaatacatcaaagtggacaaattttgttaagatcccatttaatatttgaaaaaatcagtagcacaaatatattttgattgtcacttacaaaataaaatacatttacagtctaaaaaaaaaaaacaacacaggcattctgtgccaccccacccccgcaactcaccctcccagctgccctccttgccctccgcgcgggaaaccttgcaggcgtctgtctcctcgaccggcgggtaatctactgacgttcgcaaccggaactacgccagcctcgaacattcggtggcgccacctgaatcagctcatcagaacgaggagctcaagctccccccaaaccccccgtatcaacgccatagaccccctcctatctaaagggcacccacttcaatttaattaaatacacgcccccaacccacgcaaag

SEQ ID NO: 437102 - DNA, 2574 bp, Homo sapiens
caattgtgctactcaaatcacagtttggatccaggcgctgtaatctttcctcaccctctgtccagtagattcatcaccattctcgatttaggaatgctttaaagatgcttgttatttggaacatatttgagaaagtgacaggaacgtggcaaacaagctgccttaaacagagactgtacctagacctagagtgtaatatcaacttgtcaagtatatcttctgcaactttgctttttgaaagcctagcacaaagtagatcatgagtaaaatgtgattgccgataattacatggagaaatgtgaataaatgactctttaaaccctgtaaactaaactcggcttaaaataggtggtttgaacatttgggaaaccttagttttccctgaaatccaatccttgcaaagcaataatgacaagaggtggataaagcggacttacagaaaagggcgtcttaccggtcccctctaatcacaccatcccccctcttttaaaaaaattttcttctcagataaccaagttaaatctagctcaaatgaaccttttagtttttgaggagggcaataatagtagtgaacaccaaaacgaaaggggatctgggcttcaaaatactaacagttctatttcctagccagtcgtctcccgggctggatgtgccgccgtcccagatctcagcggcggccgcagagcgcagaggtagggagagaaaaaggaggcgtcggcggggcgcgagcgaccagggcgctaagtgccgcctcacagtcctgccagagacaggagacgccgggccgcccgcgccgtctgtcccaagagctcctcctggacatccgcttgactctccgtcgtctccaattggccgtcggggaacggaagccgaagcaaactagtgaacccggaagtgcttcgcggcggaggcccgggcaactcttttgaatggaatcgggctgattcatcgccggtttgcagactgagccgcgtcgggtgtgcgccgctgctgctgttgcctctgtcttcgcgtcaccacagaggcaagacaagggtccatatcgcggcatccggctcccgcccgtcttcaggagagaaagaaaaaataaaatatacttggggaagttgtacctgccagaattagcaagagctttctttaagaagacatttgtcaaactcaacaaattgaaggttaacaccttaagagttgtagttactgaccagaaatatggacagacttcttagacttggaggaggtatgcctggactgggccagatggagtcttgctctgtcacccaggctagagtgcagtggcatgatcttggctcattgcaacctccacctcctggactcaagagattcttctgcctcagcctcctgagtatcacaggggccacctacagatgctcctgcagtggacacagcagaacaagtctatatctcttccctggcactgttaaaaatgttaaaacatggccgtgctggagttccaatggaagttatgggtttgatgcttggagaatttgttgatgattataccgtcagagtgattgatgtgtttgctatgccacagtcaggaacaggtgtcagtgtggaggcagttgatccagtgttccaagctaaaatgttggatatgttgaagcagacaggaaggccggagatggttgttggttggtatcacagtcaccctggctttggttgttggctttctggtgtggatatcaacactcagcagagctttgaagccttgtcggagagagctgtggcagtggttgtggatcccattcagagtgtaaaaggaaaggttgttattgatgccttcagattgatcaatgctaatatgatggtcttaggacatgaaccaagacaaacaacttcgaatctgggtcacttaaacaagccatctatccaggcattaattcatggactaaacagacattattactccattactattaactatcggaaaaatgaactggaacagaagatgttgctaaatttgcataagaagagttggatggaaggtttgacacttcaggactacagtgaacattgtaaacacaatgaatcagtggtaaaagagatgttggaattagccaagaattacaataaggctgtagaagaagaagataagatgacacctgaacagctggcaataaagaatgttggcaagcaggaccccaaacgtcatttggaggaacatgtggatgtacttatgacctcaaatattgtccagtgtttagcagctatgttggatactgtcgtatttaaataaagcaacgaaaaacgctattaatgatgccttcagtgtatattcctctgttgttcctaatgctcaaaatcaagggacctctgaaggtgtacttggctaaatgtaagacatctggcatcatttgcagcactgtaacaccttcagtctcagttgtgcaattacttctgtttctttagtcagggtctttgcagattctaaagttatacatgaatacatcaaagtggacaaattttgttaagatcccatttaatatttgaaaaaatcagtagcacaaatatattttgattgtcacttacaaaataaaatacatttacagtcta

SEQ ID NO: 437103 - DNA, 1354 bp, Homo sapiens
tcaggagtcgacatactgtccatattgcttggtcactacctacgactcttaaggtgttatcctctaatatgtaattacggatcagagaatatgcgcatcagacttccccatattttcgctggacgtgaatgcctgcgactgcagcgggggccgcctacagtatgctccgtggcttgaacaagtcagaatcggtctagtatctgcttctctgtgagaagttcaaaatgttaaaacatggccgtgctggagttccaatggaagttatgggtttgatgcttggagaatttgttgatgattataccgtcagagtgattgatgtgtttgctatgccacagtcaggaacaggtgtcagtgtggaggcagttgatccagtgttccaagctaaaatgttggatatgttgaagcagacaggaaggccggagatggttgttggttggtatcacagtcaccctggctttggttgttggctttctggtgtggatatcaacactcagcagagctttgaagccttgtcggagagagctgtggcagtggttgtggatcccattcagagtgtaaaaggaaaggttgttattgatgccttcagattgatcaatgctaatatgatggtcttaggacatgaaccaagacaaacaacttcgaatctgggtcacttaaacaagccatctatccaggcattaattcatggactaaacagacattattactccattactattaactatcggaaaaatgaactggaacagaagatgttgctaaatttgcataagaagagttggatggaaggtttgacacttcaggactacagtgaacattgtaaacacaatgaatcagtggtaaaagagatgttggaattagccaagaattacaataaggctgtagaagaagaagataagatgacacctgaacagctggcaataaagaatgttggcaagcaggaccccaaacgtcatttggaggaacatgtggatgtacttatgacctcaaatattgtccagtgtttagcagctatgttggatactgtcgtatttaaataaagcaacgaaaaacgctattaatgatgccttcagtgtatattcctctgttgttcctaatgctcaaaatcaagggacctctgaaggtgtacttggctaaatgtaagacatctggcatcatttgcagcactgtaacaccttcagtctcagttgtgcaattacttctgtttctttagtcagggtctttgcagattctaaagttatacatgaatacatcaaagtggacaaattttgttaagatcccatttaatatttgaaaaaatcagtagcacaaatatattttgattgtcacttacaaaataaaatacatttacagtcta

SEQ ID NO: 437104 - DNA, 1006 bp, Homo sapiens
gagattaggcgtaggtagaagtagaggttaaggagggtgaagatgatatgttgaagcagacaggaaggccggagatggttgttggttggtatcacagtcaccctggctttggttgttggctttctggtgtggatatcaacactcagcagagctttgaagccttgtcggagagagctgtggcagtggttgtggatcccattcagagtgtaaaaggaaaggttgttattgatgccttcagattgatcaatgctaatatgatggtcttaggacatgaaccaagacaaacaacttcgaatctgggtcacttaaacaagccatctatccaggcattaattcatggactaaacagacattattactccattactattaactatcggaaaaatgaactggaacagaagatgttgctaaatttgcataagaagagttggatggaaggtttgacacttcaggactacagtgaacattgtaaacacaatgaatcagtggtaaaagagatgttggaattagccaagaattacaataaggctgtagaagaagaagataagatgacacctgaacagctggcaataaagaatgttggcaagcaggaccccaaacgtcatttggaggaacatgtggatgtacttatgacctcaaatattgtccagtgtttagcagctatgttggatactgtcgtatttaaataaagcaacgaaaaacgctattaatgatgccttcagtgtatattcctctgttgttcctaatgctcaaaatcaagggacctctgaaggtgtacttggctaaatgtaagacatctggcatcatttgcagcactgtaacaccttcagtctcagttgtgcaattacttctgtttctttagtcagggtctttgcagattctaaagttatacatgaatacatcaaagtggacaaattttgttaagatcccatttaatatttgaaaaaatcagtagcacaaatatattttgattgtcacttacaaaataaaatacatttacagtcta

SEQ ID NO: 437105 - DNA, 1845 bp, Homo sapiens
caattgtgctactcaaatcacagtttggatccaggcgctgtaatctttcctcaccctctgtccagtagattcatcaccattctcgatttaggaatgctttaaagatgcttgttatttggaacatatttgagaaagtgacaggaacgtggcaaacaagctgccttaaacagagactgtacctagacctagagtgtaatatcaacttgtcaagtatatcttctgcaactttgctttttgaaagcctagcacaaagtagatcatgagtaaaatgtgattgccgataattacatggagaaatgtgaataaatgactctttaaaccctgtaaactaaactcggcttaaaataggtggtttgaacatttgggaaaccttagttttccctgaaatccaatccttgcaaagcaataatgacaagaggtggataaagcggacttacagaaaagggcgtcttaccggtcccctctaatcacaccatcccccctcttttaaaaaaattttcttctcagataaccaagttaaatctagctcaaatgaaccttttagtttttgaggagggcaataatagtagtgaacaccaaaacgaaaggggatctgggcttcaaaatactaacagttctatttcctagccagtcgtctcccgggctggatgtgccgccgtcccagatctcagcggcggccgcagagcgcagaggtagggagagaaaaaggaggcgtcggcggggcgcgagcgaccagggcgctaagtgccgcctcacagtcctgccagagacaggagacgccgggccgcccgcgccgtctgtcccaagagctcctcctggacatccgcttgactctccgtcgtctccaattggccgtcggggaacggaagccgaagcaaactagtgaacccggaagtgcttcgcggcggaggcccgggcaactcttttgaatggaatcgggctgattcatcgccggtttgcagactgagccgcgtcgggtgtgcgccgctgctgctgttgcctctgtcttcgcgtcaccacagaggcaagacaagggtccatatcgcggcatccggctcccgcccgtcttcaggagagaaagaaaaaataaaatatacttggggaagttgtacctgccagaattagcaagagctttctttaagaagacatttgtcaaactcaacaaattgaaggttaacaccttaagagttgtagttactgaccagaaatatggacagacttcttagacttggaggaggtatgcctggactgggccaggggccacctacagatgctcctgcagtggacacagcagaacaagtctatatctcttccctggcactgttaaaaatgttaaaacatggccgtgctggagttccaatggaagttatgggtttgatgcttggagaatttgttgatgattataccgtcagagtgattgatgtgtttgctatgccacagtcaggaacaggtgtcagtgtggaggcagttgatccagtgttccaagctaaaatgttggatatgttgaagcagacaggaaggccggagatggttgttggttggtatcacagtcaccctggctttggttgttggctttctggtgtggatatcaacactcagcagagctttgaagccttgtcggagagagctgtggcagtggttgtggatcccattcagagtgtaaaaggaaaggttgttattgatgccttcagattgatcaatgctaatatgatggtcttaggacatgaaccaagacaaacaacttcgaatctgggtcacttaaacaagccatctatccaggcattaattcatggactaacagacattatactcccagtgtagagcacagatgcagtcggtatcctc

SEQ ID NO: 437106 - DNA, 10229 bp, Homo sapiens
ggaaactctgaaagaacttagaatcagcattttgagagcagaagcttgggcatgctgtgattttccaataaactgctatcacaatgtcaaaatgcagttcagacaagagcaacacagagatctcaaacattaaaacgtaagctgtgctagaacaaaaatgcaatgaaagaaacactggatgaatgaaaagccctgctttgcaacccctcagcatggcaggcctgcagctcatgacccctgcttcctcaccaatgggtcctttctttggactgccatggcaacaagaagcaattcatgataacatttatacgccaagaaaatatcaggttgaactgcttgaagcagctctggatcataataccatcgtctgtttaaacactggctcagggaagacatttattgctagtactactctactaaagagctgtctctatctagatctaggggagacttcagctagaaatggaaaaaggacggtgttcttggtcaactctgcaaaccaggttgctcaacaagtgtcagctgtcagaactcattcagatctcaaggttggggaatactcaaacctagaagtaaatgcatcttggacaaaagagagatggaaccaagagtttactaagcaccaggttctcattatgacttgctatgtcgccttgaatgttttgaaaaatggttacttatcactgtcagacattaaccttttggtgtttgatgagtgtcatcttgcaatcctagaccacccctatcgagaatttatgaagctctgtgaaatttgtccatcatgtcctcgcattttgggactaactgcttccattttaaatgggaaatgggatccagaggatttggaagaaaagtttcagaaactagagaaaattcttaagagtaatgctgaaactgcaactgacctggtggtcttagacaggtatacttctcagccatgtgagattgtggtggattgtggaccatttactgacagaagtgggctttatgaaagactgctgatggaattagaagaagcacttaattttatcaatgattgtaatatatctgtacattcaaaagaaagagattctactttaatttcgaaacagatactatcagactgtcgtgccgtattggtagttctgggaccctggtgtgcagataaagtagctggaatgatggtaagagaactacagaaatacatcaaacatgagcaagaggagctgcacaggaaatttttattgtttacagacactttcctaaggaaaatacatgcactatgtgaagagcacttctcacctgcctcacttgacctgaaatttgtaactcctaaagtaatcaaactgctcgaaatcttacgcaaatataaaccatatgagcgacacagttttgaaagcgttgagtggtataataatagaaatcaggataattatgtgtcatggagtgattctgaggatgatgatgaggatgaagaaattgaagaaaaagagaagccagagacaaattttccttctccttttaccaacattttgtgcggaattatttttgtggaaagaagatacacagcagttgtcttaaacagattgataaaggaagctggcaaacaagatccagagctggcttatatcagtagcaatttcataactggacatggcattgggaagaatcagcctcgcaacaaacacgatggaagcagaattcagaaaacaggaagaggtacttaggaaatttcgagcacatgagaccaacctgcttattgcaacaagtattgtagaagagggtgttgatataccaaaatgcaacttggtggttcgttttgatttgcccacagaatatcgatcctatgttcaatctaaaggaagagcaagggcacccatctctaattatataatgttagcggatacagacaaaataaaaagttttgaagaagaccttaaaacctacaaagctattgaaaagatcttgagaaacaagtgttccaagtcggttgatactggtgagactgacattgatcctgtcatggatgatgatgacgttttcccaccatatgtgttgaggcctgacgatggtggtccacgagtcacaatcaacacggccattggacacatcaatagatactgtgctagattaccaagtgatccgtttactcatctagctcctaaatgcagaacccgagagttgcctgatggtacattttattcaactctttatctgccaattaactcacctcttcgagcctccattgttggtccaccaatgagctgtgtacgattggctgaaagagttgtagctctcatttgctgtgagaaactgcacaaaattggcgaactggatgaccatttgatgccagttgggaaagagactgttaaatatgaagaggagcttgatttgcatgatgaagaagagaccagtgttccaggaagaccaggttccacgaaacgaaggcagtgctacccaaaagcaattccagagtgtttgagggatagttatcccagacctgatcagccctgttacctgtatgtgataggaatggttttaactacacctttacctgatgaactcaactttagaaggcggaagctctatcctcctgaagataccacaagatgctttggaatactgacggccaaacccatacctcagattccacactttcctgtgtacacacgctctggagaggttaccatatccattgagttgaagaagtctggtttcatgttgtctctacaaatgcttgagttgattacaagacttcaccagtatatattctcacatattcttcggcttgaaaaacctgcactagaatttaaacctacagacgctgattcagcatactgtgttctacctcttaatgttgttaatgactccagcactttggatattgactttaaattcatggaagatattgagaagtctgaagctcgcataggcattcccagtacaaagtatacaaaagaaacaccctttgtttttaaattagaagattaccaagatgccgttatcattccaagatatcgcaattttgatcagcctcatcgattttatgtagctgatgtgtacactgatcttaccccactcagtaaatttccttcccctgagtatgaaacttttgcagaatattataaaacaaagtacaaccttgacctaaccaatctcaaccagccactgctggatgtggaccacacatcttcaagacttaatcttttgacacctcgacatttgaatcagaaggggaaagcgcttcctttaagcagtgctgagaagaggaaagccaaatgggaaagtctgcagaataaacagatactggttccagaactctgtgctatacatccaattccagcatcactgtggagaaaagctgtttgtctccccagcatactttatcgccttcactgccttttgactgcagaggagctaagagcccagactgccagcgatgctggcgtgggagtcagatcacttcctgcggattttagataccctaacttagacttcgggtggaaaaaatctattgacagcaaatctttcatctcaatttctaactcctcttcagctgaaaatgataattactgtaagcacagcacaattgtccctgaaaatgctgcacatcaaggtgctaatagaacctcctctctagaaaatcatgaccaaatgtctgtgaactgcagaacgttgctcagcgagtcccctggtaagctccacgttgaagtttcagcagatcttacagcaattaatggtctttcttacaatcaaaatctcgccaatggcagttatgatttagctaacagagacttttgccaaggaaatcagctaaattactacaagcaggaaatacccgtgcaaccaactacctcatattccattcagaatttatacagttacgagaaccagccccagcccagcgatgaatgtactctcctgagtaataaataccttgatggaaatgctaacaaatctacctcagatggaagtcctgtgatggccgtaatgcctggtacgacagacactattcaagtgctcaagggcaggatggattctgagcagagcccttctattgggtactcctcaaggactcttggccccaatcctggacttattcttcaggctttgactctgtcaaacgctagtgatggatttaacctggagcggcttgaaatgcttggcgactcctttttaaagcatgccatcaccacatatctattttgcacttaccctgatgcgcatgagggccgcctttcatatatgagaagcaaaaaggtcagcaactgtaatctgtatcgccttggaaaaaagaagggactacccagccgcatggtggtgtcaatatttgatccccctgtgaattggcttcctcctggttatgtagtaaatcaagacaaaagcaacacagataaatgggaaaaagatgaaatgacaaaagactgcatgctggcgaatggcaaactggatgaggattacgaggaggaggatgaggaggaggagagcctgatgtggagggctccgaaggaagaggctgactatgaagatgatttcctggagtatgatcaggaacatatcagatttatagataatatgttaatggggtcaggagcttttgtaaagaaaatctctctttctcctttttcaaccactgattctgcatatgaatggaaaatgcccaaaaaatcctccttaggtagtatgccattttcatcagattttgaggattttgactacagctcttgggatgcaatgtgctatctggatcctagcaaagctgttgaagaagatgactttgtggtggggttctggaatccatcagaagaaaactgtggtgttgacacgggaaagcagtccatttcttacgacttgcacactgagcagtgtattgctgacaaaagcatagcggactgtgtggaagccctgctgggctgctatttaaccagctgtggggagagggctgctcagcttttcctctgttcactggggctgaaggtgctcccggtaattaaaaggactgatcgggaaaaggccctgtgccctactcgggagaatttcaacagccaacaaaagaacctttcagtgagctgtgctgctgcttctgtggccagttcacgctcttctgtattgaaagactcggaatatggttgtttgaagattccaccaagatgtatgtttgatcatccagatgcagataaaacactgaatcaccttatatcggggtttgaaaattttgaaaagaaaatcaactacagattcaagaataaggcttaccttctccaggcttttacacatgcctcctaccactacaatactatcactgattgttaccagcgcttagaattcctgggagatgcgattttggactacctcataaccaagcacctttatgaagacccgcggcagcactccccgggggtcctgacagacctgcggtctgccctggtcaacaacaccatctttgcatcgctggctgtaaagtacgactaccacaagtacttcaaagctgtctctcctgagctcttccatgtcattgatgactttgtgcagtttcagcttgagaagaatgaaatgcaaggaatggattctgagcttaggagatctgaggaggatgaagagaaagaagaggatattgaagttccaaaggccatgggggatatttttgagtcgcttgctggtgccatttacatggatagtgggatgtcactggagacagtctggcaggtgtactatcccatgatgcggccactaatagaaaagttttctgcaaatgtaccccgttcccctgtgcgagaattgcttgaaatggaaccagaaactgccaaatttagcccggctgagagaacttacgacgggaaggtcagagtcactgtggaagtagtaggaaaggggaaatttaaaggtgttggtcgaagttacaggattgccaaatctgcagcagcaagaagagccctccgaagcctcaaagctaatcaacctcaggttcccaatagctgaaaccgctttttaaaattcaaaacaagaaacaaaacaaaaaaaattaaggggaaaattatttaaatcggaaaggaagacttaaagttgatagtgagtggaatgaattgaaggcagaatttaaagtttggttgataacaggatagataacagaataaaacatttaacatatgtataaaattttggaactaattgtagttttagttttttgcgcaaacacaatcttatcttctttcctcacttctgctttgtttaaatcacaagagtgctttaatgatgacatttagcaagtgctcaaaataattgacaggttttgtttttttttttttgagtttatgtcagctttgcttagtgttagaaggccatggagcttaaacctccagcagtccctaggatgatgtagattcttctccatctctccgtgtgtgcagtagtgccagtcctgcagtagttgataagctgaatagaaagataaggttttcgagaggagaagtgcgccaatgttgtcttttctttccacgttatactgtgtaaggtgatgttcccggtcgctgttgcacctgatagtaagggacagatttttaatgaacattggctggcatgttggtgaatcacattttagttttctgatgccacatagtcttgcataaaaaagggttcttgccttaaaagtgaaaccttcatggatagtctttaatctctgatctttttggaacaaactgttttacattcctttcattttattatgcattagacgttgagacagcgtgatacttacaactcactagtatagttgtaacttattacaggatcatactaaaatttctgtcatatgtatactgaagacattttaaaaaccagaatatgtagtctacggatattttttatcataaaaatgatctttggctaaacaccccattttactaaagtcctcctgccaggtagttcccactgatggaaatgtttatggcaaataattttgccttctaggctgttgctctaacaaaataaaccttagacatatcacacctaaaatatgctgcagattttataattgattggttacttatttaagaagcaaaacacagcacctttacccttagtctcctcacataaatttcttactatacttttcataatgttgcatgcatatttcacctaccaaagctgtgctgttaatgccgtgaaagtttaacgtttgcgataaactgccgtaattttgatacatctgtgatttaggtcattaatttagataaactagctcattatttccatctttggaaaaggaaaaaaaaaaaaacttctttaggcatttgcctaagtttctttaattagacttgtaggcactcttcacttaaatacctcagttcttcttttcttttgcatgcatttttcccctgtttggtgctatgtttatgtattatgcttgaaattttaattttttttttttttgcactgtaactataatacctcttaatttacctttttaaaagctgtgggtcagtcttgcactcccatcaacataccagtagaggtttgctgcaatttgccccgttaattatgcttgaagtttaagaaagctgagcagaggtgtctcatatttcccagcacatgattctgaacttgatgcttcatggaatgctgcatttatatgtaagtgacatttgaatactgtccttcctgctttatctgcatcatccacccacagagaaatgcctctgtgcgagtgcaccgacagaaaactgtcagctctgctttctaaggaaccctgagtgaggggggtattaagcttctccagtgttttttgttgtctccaatcttaaacttaaattgagatctaaattattaaacgagtttttgagcaaattaggtgacttgttttaaaaatatttaattccgatttggaaccttagatgtctatttgattttttaaaaaaccttaatgtaagatatgaccagttaaaacaaagcaattcttgaattatataactgtaaaagtgtgcagttaacaaggctggatgtgaattttattctgagggtgatttgtgatcaagtttaatcacaaatctcttaatatttataaactacctgatgccaggagcttagggctttgcattgtgtctaatacattgatcccagtgttacgggattctcttgattcctggcaccaaaatcagattgttttcacagttatgattcccagtgggagaaaaatgcctcaatatatttgtaaccttaagaagagtatttttttgttaatactaagatgttcaaacttagacatgattaggtcatacattctcaggggttcaaatttccttctaccattcaaatgttttatcaacagcaaacttcagccgtttcactttttgttggagaaaaatagtagattttaatttgactcacagtttgaagcattctgtgatcccctggttactgagttaaaaaataaaaaagtacgagttagacatatgaaatggttatgaacgcttttgtgctgctgatttttaatgctgtaaagttttcctgtgtttagcttgttgaaatgttttgcatctgtcaattaaggaaaaaaaaaatcactctatgttgccccactttagagccctgtgtgccaccctgtgttcctgtgattgcaatgtgagaccgaatgtaatatggaaaacctaccagtggggtgtggttgtgccctgagcacgtgtgtaaaggactggggaggcgtgtcttgaaaaagcaactgcagaaattccttatgatgattgtgtgcaagttagttaacatgaaccttcatttgtaaattttttaaaatttcttttataatatgctttccgcagtcctaactatgctgcgttttataatagctttttcccttctgttctgttcatgtagcacagataagcattgcacttggtaccatgctttacctcatttcaagaaaatatgcttaacagagaggaaaaaaatgtggtttggccttgctgctgttttgatttatggaatttgaaaaagataattataatgcctgcaatgtgtcatatactcgcacaacttaaataggtcatttttgtctgtggcatttttactgtttgtgaaagtatgaaacagatttgttaactgaactcttaattatgtttttaaaatgtttgttatatttcttttcttttttcttttatattacgtgaagtgatgaaatttagaatgacctctaacactcctgtaattgtcttttaaaatactgatatttttatttgttaataatactttgccctcagaaagattctgataccctgccttgacaacatgaaacttgaggctgctttggttcatgaatccaggtgttcccccggcagtcggcttcttcagtcgctccctggaggcaggtgggcactgcagaggatcactggaatccagatcgagcgcagttcatgcacaaggccccgttgatttaaaatattggatcttgctctgttagggtgtctaatccctttacacaagattgaagccaccaaactgagaccttgatacctttttttaactgcatctgaaattatgttaagagtctttaacccatttgcattatctgcagaagagaaactcatgtcatgtttattacctatatggttgttttaattacatttgaataattatatttttccaaccactgattacttttcaggaatttaattatttccagataaatttctttattttatattgtacatgaaaagttttaaagatatgtttaagaccaagactattaaaatgatttttaaagttgttggagacgccaatagcaatatctaggaaatttgcattgagaccattgtattttccactagcagtgaaaatgatttttcacaactaacttgtaaatatattttaatcattacttctttttttctagtccatttttatttggacatcaaccacagacaatttaaattttatagatgcactaagaattcactgcagcagcaggttacatagcaaaaatgcaaaggtgaacaggaagtaaatttctggcttttctgctgtaaatagtgaaggaaaattactaaaatcaagtaaaactaatgcatattatttgattgacaataaaatatttaccatcacatgctgcagctgttttttaaggaacatgatgtcattcattcatacagtaatcatgctgcagaaatttgcagtctgcaccttatggatcacaattacctttagttgttttttttgtaataattgtagccaagtaaatctccaataaagttatcgtctgttca

SEQ ID NO: 437107 - DNA, 10223 bp, Homo sapiens
  misc_feature (10194)..(10194): n is a, c, g, or t
ggaaactctgaaagaacttagaatcagcattttgagagcagaagcttgggcatgctgtgattttccaataaactgctatcacaatgtcaaaatgcagttcagacaagagcaacacagagatctcaaacattaaaacgtaagctgtgctagaacaaaaatgcaatgaaagaaacactggatgaatgaaaagccctgctttgcaacccctcagcatggcaggcctgcagctcatgacccctgcttcctcaccaatgggtcctttctttggactgccatggcaacaagaagcaattcatgataacatttatacgccaagaaaatatcaggttgaactgcttgaagcagctctggatcataataccatcgtctgtttaaacactggctcagggaagacatttattgctagtactactctactaaagagctgtctctatctagatctaggggagacttcagctagaaatggaaaaaggacggtgttcttggtcaactctgcaaaccaggttgctcaacaagtgtcagctgtcagaactcattcagatctcaaggttggggaatactcaaacctagaagtaaatgcatcttggacaaaagagagatggaaccaagagtttactaagcaccaggttctcattatgacttgctatgtcgccttgaatgttttgaaaaatggttacttatcactgtcagacattaaccttttggtgtttgatgagtgtcatcttgcaatcctagaccacccctatcgagaatttatgaagctctgtgaaatttgtccatcatgtcctcgcattttgggactaactgcttccattttaaatgggaaatgggatccagaggatttggaagaaaagtttcagaaactagagaaaattcttaagagtaatgctgaaactgcaactgacctggtggtcttagacaggtatacttctcagccatgtgagattgtggtggattgtggaccatttactgacagaagtgggctttatgaaagactgctgatggaattagaagaagcacttaattttatcaatgattgtaatatatctgtacattcaaaagaaagagattctactttaatttcgaaacagatactatcagactgtcgtgccgtattggtagttctgggaccctggtgtgcagataaagtagctggaatgatggtaagagaactacagaaatacatcaaacatgagcaagaggagctgcacaggaaatttttattgtttacagacactttcctaaggaaaatacatgcactatgtgaagagcacttctcacctgcctcacttgacctgaaatttgtaactcctaaagtaatcaaactgctcgaaatcttacgcaaatataaaccatatgagcgacacagttttgaaagcgttgagtggtataataatagaaatcaggataattatgtgtcatggagtgattctgaggatgatgatgaggatgaagaaattgaagaaaaagagaagccagagacaaattttccttctccttttaccaacattttgtgcggaattatttttgtggaaagaagatacacagcagttgtcttaaacagattgataaaggaagctggcaaacaagatccagagctggcttatatcagtagcaatttcataactggacatggcattgggaagaatcagcctcgcaacaaacacgatggaagcagaattcagaaaacaggaagaggtacttaggaaatttcgagcacatgagaccaacctgcttattgcaacaagtattgtagaagagggtgttgatataccaaaatgcaacttggtggttcgttttgatttgcccacagaatatcgatcctatgttcaatctaaaggaagagcaagggcacccatctctaattatataatgttagcggatacagacaaaataaaaagttttgaagaagaccttaaaacctacaaagctattgaaaagatcttgagaaacaagtgttccaagtcggttgatactggtgagactgacattgatcctgtcatggatgatgatgacgttttcccaccatatgtgttgaggcctgacgatggtggtccacgagtcacaatcaacacggccattggacacatcaatagatactgtgctagattaccaagtgatccgtttactcatctagctcctaaatgcagaacccgagagttgcctgatggtacattttattcaactctttatctgccaattaactcacctcttcgagcctccattgttggtccaccaatgagctgtgtacgattggctgaaagagttgtagctctcatttgctgtgagaaactgcacaaaattggcgaactggatgaccatttgatgccagttgggaaagagactgttaaatatgaagaggagcttgatttgcatgatgaagaagagaccagtgttccaggaagaccaggttccacgaaacgaaggcagtgctacccaaaagcaattccagagtgtttgagggatagttatcccagacctgatcagccctgttacctgtatgtgataggaatggttttaactacacctttacctgatgaactcaactttagaaggcggaagctctatcctcctgaagataccacaagatgctttggaatactgacggccaaacccatacctcagattccacactttcctgtgtacacacgctctggagaggttaccatatccattgagttgaagaagtctggtttcatgttgtctctacaaatgcttgagttgattacaagacttcaccagtatatattctcacatattcttcggcttgaaaaacctgcactagaatttaaacctacagacgctgattcagcatactgtgttctacctcttaatgttgttaatgactccagcactttggatattgactttaaattcatggaagatattgagaagtctgaagctcgcataggcattcccagtacaaagtatacaaaagaaacaccctttgtttttaaattagaagattaccaagatgccgttatcattccaagatatcgcaattttgatcagcctcatcgattttatgtagctgatgtgtacactgatcttaccccactcagtaaatttccttcccctgagtatgaaacttttgcagaatattataaaacaaagtacaaccttgacctaaccaatctcaaccagccactgctggatgtggaccacacatcttcaagacttaatcttttgacacctcgacatttgaatcagaaggggaaagcgcttcctttaagcagtgctgagaagaggaaagccaaatgggaaagtctgcagaataaacagatactggttccagaactctgtgctatacatccaattccagcatcactgtggagaaaagctgtttgtctccccagcatactttatcgccttcactgccttttgactgcagaggagctaagagcccagactgccagcgatgctggcgtgggagtcagatcacttcctgcggattttagataccctaacttagacttcgggtggaaaaaatctattgacagcaaatctttcatctcaatttctaactcctcttcagctgaaaatgataattactgtaagcacagcacaattgtccctgaaaatgctgcacatcaaggtgctaatagaacctcctctctagaaaatcatgaccaaatgtctgtgaactgcagaacgttgctcagcgagtcccctggtaagctccacgttgaagtttcagcagatcttacagcaattaatggtctttcttacaatcaaaatctcgccaatggcagttatgatttagctaacagagacttttgccaaggaaatcagctaaattactacaagcaggaaatacccgtgcaaccaactacctcatattccattcagaatttatacagttacgagaaccagccccagcccagcgatgaatgtactctcctgagtaataaataccttgatggaaatgctaacaaatctacctcagatggaagtcctgtgatggccgtaatgcctggtacgacagacactattcaagtgctcaagggcaggatggattctgagcagagcccttctattgggtactcctcaaggactcttggccccaatcctggacttattcttcaggctttgactctgtcaaacgctagtgatggatttaacctggagcggcttgaaatgcttggcgactcctttttaaagcatgccatcaccacatatctattttgcacttaccctgatgcgcatgagggccgcctttcatatatgagaagcaaaaaggtcagcaactgtaatctgtatcgccttggaaaaaagaagggactacccagccgcatggtggtgtcaatatttgatccccctgtgaattggcttcctcctggttatgtagtaaatcaagacaaaagcaacacagataaatgggaaaaagatgaaatgacaaaagactgcatgctggcgaatggcaaactggatgaggattacgaggaggaggatgaggaggaggagagcctgatgtggagggctccgaaggaagaggctgactatgaagatgatttcctggagtatgatcaggaacatatcagatttatagataatatgttaatggggtcaggagcttttgtaaagaaaatctctctttctcctttttcaaccactgattctgcatatgaatggaaaatgcccaaaaaatcctccttaggtagtatgccattttcatcagattttgaggattttgactacagctcttgggatgcaatgtgctatctggatcctagcaaagctgttgaagaagatgactttgtggtggggttctggaatccatcagaagaaaactgtggtgttgacacgggaaagcagtccatttcttacgacttgcacactgagcagtgtattgctgacaaaagcatagcggactgtgtggaagccctgctgggctgctatttaaccagctgtggggagagggctgctcagcttttcctctgttcactggggctgaaggtgctcccggtaattaaaaggactgatcgggaaaaggccctgtgccctactcgggagaatttcaacagccaacaaaagaacctttcagtgagctgtgctgctgcttctgtggccagttcacgctcttctgtattgaaagactcggaatatggttgtttgaagattccaccaagatgtatgtttgatcatccagatgcagataaaacactgaatcaccttatatcggggtttgaaaattttgaaaagaaaatcaactacagattcaagaataaggcttaccttctccaggcttttacacatgcctcctaccactacaatactatcactgattgttaccagcgcttagaattcctgggagatgcgattttggactacctcataaccaagcacctttatgaagacccgcggcagcactccccgggggtcctgacagacctgcggtctgccctggtcaacaacaccatctttgcatcgctggctgtaaagtacgactaccacaagtacttcaaagctgtctctcctgagctcttccatgtcattgatgactttgtgcagtttcagcttgagaagaatgaaatgcaaggaatggattctgagcttaggagatctgaggaggatgaagagaaagaagaggatattgaagttccaaaggccatgggggatatttttgagtcgcttgctggtgccatttacatggatagtgggatgtcactggagacagtctggcaggtgtactatcccatgatgcggccactaatagaaaagttttctgcaaatgtaccccgttcccctgtgcgagaattgcttgaaatggaaccagaaactgccaaatttagcccggctgagagaacttacgacgggaaggtcagagtcactgtggaagtagtaggaaaggggaaatttaaaggtgttggtcgaagttacaggattgccaaatctgcagcagcaagaagagccctccgaagcctcaaagctaatcaacctcaggttcccaatagctgaaaccgctttttaaaattcaaaacaagaaacaaaacaaaaaaaattaaggggaaaattatttaaatcggaaaggaagacttaaagttgatagtgagtggaatgaattgaaggcagaatttaaagtttggttgataacaggatagataacagaataaaacatttaacatatgtataaaattttggaactaattgtagttttagttttttgcgcaaacacaatcttatcttctttcctcacttctgctttgtttaaatcacaagagtgctttaatgatgacatttagcaagtgctcaaaataattgacaggttttgtttttttttttttgagtttatgtcagctttgcttagtgttagaaggccatggagcttaaacctccagcagtccctaggatgatgtagattcttctccatctctccgtgtgtgcagtagtgccagtcctgcagtagttgataagctgaatagaaagataaggttttcgagaggagaagtgcgccaatgttgtcttttctttccacgttatactgtgtaaggtgatgttcccggtcgctgttgcacctgatagtaagggacagatttttaatgaacattggctggcatgttggtgaatcacattttagttttctgatgccacatagtcttgcataaaaaagggttcttgccttaaaagtgaaaccttcatggatagtctttaatctctgatctttttggaacaaactgttttacattcctttcattttattatgcattagacgttgagacagcgtgatacttacaactcactagtatagttgtaacttattacaggatcatactaaaatttctgtcatatgtatactgaagacattttaaaaaccagaatatgtagtctacggatattttttatcataaaaatgatctttggctaaacaccccattttactaaagtcctcctgccaggtagttcccactgatggaaatgtttatggcaaataattttgccttctaggctgttgctctaacaaaataaaccttagacatatcacacctaaaatatgctgcagattttataattgattggttacttatttaagaagcaaaacacagcacctttacccttagtctcctcacataaatttcttactatacttttcataatgttgcatgcatatttcacctaccaaagctgtgctgttaatgccgtgaaagtttaacgtttgcgataaactgccgtaattttgatacatctgtgatttaggtcattaatttagataaactagctcattatttccatctttggaaaaggaaaaaaaaaaaaacttctttaggcatttgcctaagtttctttaattagacttgtaggcactcttcacttaaatacctcagttcttcttttcttttgcatgcatttttcccctgtttggtgctatgtttatgtattatgcttgaaattttaattttttttttttttgcactgtaactataatacctcttaatttacctttttaaaagctgtgggtcagtcttgcactcccatcaacataccagtagaggtttgctgcaatttgccccgttaattatgcttgaagtttaagaaagctgagcagaggtgtctcatatttcccagcacatgattctgaacttgatgcttcatggaatgctgcatttatatgtaagtgacatttgaatactgtccttcctgctttatctgcatcatccacccacagagaaatgcctctgtgcgagtgcaccgacagaaaactgtcagctctgctttctaaggaaccctgagtgaggggggtattaagcttctccagtgttttttgttgtctccaatcttaaacttaaattgagatctaaattattaaacgagtttttgagcaaattaggtgacttgttttaaaaatatttaattccgatttggaaccttagatgtctatttgattttttaaaaaaccttaatgtaagatatgaccagttaaaacaaagcaattcttgaattatataactgtaaaagtgtgcagttaacaaggctggatgtgaattttattctgagggtgatttgtgatcaagtttaatcacaaatctcttaatatttataaactacctgatgccaggagcttagggctttgcattgtgtctaatacattgatcccagtgttacgggattctcttgattcctggcaccaaaatcagattgttttcacagttatgattcccagtgggagaaaaatgcctcaatatatttgtaaccttaagaagagtatttttttgttaatactaagatgttcaaacttagacatgattaggtcatacattctcaggggttcaaatttccttctaccattcaaatgttttatcaacagcaaacttcagccgtttcactttttgttggagaaaaatagtagattttaatttgactcacagtttgaagcattctgtgatcccctggttactgagttaaaaaataaaaaagtacgagttagacatatgaaatggttatgaacgcttttgtgctgctgatttttaatgctgtaaagttttcctgtgtttagcttgttgaaatgttttgcatctgtcaattaaggaaaaaaaaaatcactctatgttgccccactttagagccctgtgtgccaccctgtgttcctgtgattgcaatgtgagaccgaatgtaatatggaaaacctaccagtggggtgtggttgtgccctgagcacgtgtgtaaaggactggggaggcgtgtcttgaaaaagcaactgcagaaattccttatgatgattgtgtgcaagttagttaacatgaaccttcatttgtaaattttttaaaatttcttttataatatgctttccgcagtcctaactatgctgcgttttataatagctttttcccttctgttctgttcatgtagcacagataagcattgcacttggtaccatgctttacctcatttcaagaaaatatgcttaacagagaggaaaaaaatgtggtttggccttgctgctgttttgatttatggaatttgaaaaagataattataatgcctgcaatgtgtcatatactcgcacaacttaaataggtcatttttgtctgtggcatttttactgtttgtgaaagtatgaaacagatttgttaactgaactcttaattatgtttttaaaatgtttgttatatttcttttcttttttcttttatattacgtgaagtgatgaaatttagaatgacctctaacactcctgtaattgtcttttaaaatactgatatttttatttgttaataatactttgccctcagaaagattctgataccctgccttgacaacatgaaacttgaggctgctttggttcatgaatccaggtgttcccccggcagtcggcttcttcagtcgctccctggaggcaggtgggcactgcagaggatcactggaatccagatcgagcgcagttcatgcacaaggccccgttgatttaaaatattggatcttgctctgttagggtgtctaatccctttacacaagattgaagccaccaaactgagaccttgatacctttttttaactgcatctgaaattatgttaagagtctttaacccatttgcattatctgcagaagagaaactcatgtcatgtttattacctatatggttgttttaattacatttgaataattatatttttccaaccactgattacttttcaggaatttaattatttccagataaatttctttattttatattgtacatgaaaagttttaaagatatgtttaagaccaagactattaaaatgatttttaaagttgttggagacgccaatagcaatatctaggaaatttgcattgagaccattgtattttccactagcagtgaaaatgatttttcacaactaacttgtaaatatattttaatcattacttctttttttctagtccatttttatttggacatcaaccacagacaatttaaattttatagatgcactaagaattcactgcagcagcaggttacatagcaaaaatgcaaaggtgaacaggaagtaaatttctggcttttctgctgtaaatagtgaaggaaaattactaaaatcaagtaaaactaatgcatattatttgattgacaataaaatatttaccatcacatgctgcagctgttttttaaggaacatgatgtcattcattcatacagtaatcatgctgcagaaatttgcagtctgcaccttagaacacatggcttagtgattttcgaaaaacacccgcaggggggnaaataagtcgtccaacaaagcacaacatt

SEQ ID NO: 437108 - DNA, 10175 bp, Homo sapiens
ggaaactctgaaagaacttagaatcagcattttgagagcagaagcttgggcatgctgtgattttccaataaactgctatcacaatgtcaaaatgcagttcagacaagagcaacacagagatctcaaacattaaaacgtaagctgtgctagaacaaaaatgcaatgaaagaaacactggatgaatgaaaagccctgctttgcaacccctcagcatggcaggcctgcagctcatgacccctgcttcctcaccaatgggtcctttctttggactgccatggcaacaagaagcaattcatgataacatttatacgccaagaaaatatcaggttgaactgcttgaagcagctctggatcataataccatcgtctgtttaaacactggctcagggaagacatttattgctagtactactctactaaagagctgtctctatctagatctaggggagacttcagctagaaatggaaaaaggacggtgttcttggtcaactctgcaaaccaggttgctcaacaagtgtcagctgtcagaactcattcagatctcaaggttggggaatactcaaacctagaagtaaatgcatcttggacaaaagagagatggaaccaagagtttactaagcaccaggttctcattatgacttgctatgtcgccttgaatgttttgaaaaatggttacttatcactgtcagacattaaccttttggtgtttgatgagtgtcatcttgcaatcctagaccacccctatcgagaatttatgaagctctgtgaaatttgtccatcatgtcctcgcattttgggactaactgcttccattttaaatgggaaatgggatccagaggatttggaagaaaagtttcagaaactagagaaaattcttaagagtaatgctgaaactgcaactgacctggtggtcttagacaggtatacttctcagccatgtgagattgtggtggattgtggaccatttactgacagaagtgggctttatgaaagactgctgatggaattagaagaagcacttaattttatcaatgattgtaatatatctgtacattcaaaagaaagagattctactttaatttcgaaacagatactatcagactgtcgtgccgtattggtagttctgggaccctggtgtgcagataaagtagctggaatgatggtaagagaactacagaaatacatcaaacatgagcaagaggagctgcacaggaaatttttattgtttacagacactttcctaaggaaaatacatgcactatgtgaagagcacttctcacctgcctcacttgacctgaaatttgtaactcctaaagtaatcaaactgctcgaaatcttacgcaaatataaaccatatgagcgacacagttttgaaagcgttgagtggtataataatagaaatcaggataattatgtgtcatggagtgattctgaggatgatgatgaggatgaagaaattgaagaaaaagagaagccagagacaaattttccttctccttttaccaacattttgtgcggaattatttttgtggaaagaagatacacagcagttgtcttaaacagattgataaaggaagctggcaaacaagatccagagctggcttatatcagtagcaatttcataactggacatggcattgggaagaatcagcctcgcaacaaacacgatggaagcagaattcagaaaacaggaagaggtacttaggaaatttcgagcacatgagaccaacctgcttattgcaacaagtattgtagaagagggtgttgatataccaaaatgcaacttggtggttcgttttgatttgcccacagaatatcgatcctatgttcaatctaaaggaagagcaagggcacccatctctaattatataatgttagcggatacagacaaaataaaaagttttgaagaagaccttaaaacctacaaagctattgaaaagatcttgagaaacaagtgttccaagtcggttgatactggtgagactgacattgatcctgtcatggatgatgatgacgttttcccaccatatgtgttgaggcctgacgatggtggtccacgagtcacaatcaacacggccattggacacatcaatagatactgtgctagattaccaagtgatccgtttactcatctagctcctaaatgcagaacccgagagttgcctgatggtacattttattcaactctttatctgccaattaactcacctcttcgagcctccattgttggtccaccaatgagctgtgtacgattggctgaaagagttgtagctctcatttgctgtgagaaactgcacaaaattggcgaactggatgaccatttgatgccagttgggaaagagactgttaaatatgaagaggagcttgatttgcatgatgaagaagagaccagtgttccaggaagaccaggttccacgaaacgaaggcagtgctacccaaaagcaattccagagtgtttgagggatagttatcccagacctgatcagccctgttacctgtatgtgataggaatggttttaactacacctttacctgatgaactcaactttagaaggcggaagctctatcctcctgaagataccacaagatgctttggaatactgacggccaaacccatacctcagattccacactttcctgtgtacacacgctctggagaggttaccatatccattgagttgaagaagtctggtttcatgttgtctctacaaatgcttgagttgattacaagacttcaccagtatatattctcacatattcttcggcttgaaaaacctgcactagaatttaaacctacagacgctgattcagcatactgtgttctacctcttaatgttgttaatgactccagcactttggatattgactttaaattcatggaagatattgagaagtctgaagctcgcataggcattcccagtacaaagtatacaaaagaaacaccctttgtttttaaattagaagattaccaagatgccgttatcattccaagatatcgcaattttgatcagcctcatcgattttatgtagctgatgtgtacactgatcttaccccactcagtaaatttccttcccctgagtatgaaacttttgcagaatattataaaacaaagtacaaccttgacctaaccaatctcaaccagccactgctggatgtggaccacacatcttcaagacttaatcttttgacacctcgacatttgaatcagaaggggaaagcgcttcctttaagcagtgctgagaagaggaaagccaaatgggaaagtctgcagaataaacagatactggttccagaactctgtgctatacatccaattccagcatcactgtggagaaaagctgtttgtctccccagcatactttatcgccttcactgccttttgactgcagaggagctaagagcccagactgccagcgatgctggcgtgggagtcagatcacttcctgcggattttagataccctaacttagacttcgggtggaaaaaatctattgacagcaaatctttcatctcaatttctaactcctcttcagctgaaaatgataattactgtaagcacagcacaattgtccctgaaaatgctgcacatcaaggtgctaatagaacctcctctctagaaaatcatgaccaaatgtctgtgaactgcagaacgttgctcagcgagtcccctggtaagctccacgttgaagtttcagcagatcttacagcaattaatggtctttcttacaatcaaaatctcgccaatggcagttatgatttagctaacagagacttttgccaaggaaatcagctaaattactacaagcaggaaatacccgtgcaaccaactacctcatattccattcagaatttatacagttacgagaaccagccccagcccagcgatgaatgtactctcctgagtaataaataccttgatggaaatgctaacaaatctacctcagatggaagtcctgtgatggccgtaatgcctggtacgacagacactattcaagtgctcaagggcaggatggattctgagcagagcccttctattgggtactcctcaaggactcttggccccaatcctggacttattcttcaggctttgactctgtcaaacgctagtgatggatttaacctggagcggcttgaaatgcttggcgactcctttttaaagcatgccatcaccacatatctattttgcacttaccctgatgcgcatgagggccgcctttcatatatgagaagcaaaaaggtcagcaactgtaatctgtatcgccttggaaaaaagaagggactacccagccgcatggtggtgtcaatatttgatccccctgtgaattggcttcctcctggttatgtagtaaatcaagacaaaagcaacacagataaatgggaaaaagatgaaatgacaaaagactgcatgctggcgaatggcaaactggatgaggattacgaggaggaggatgaggaggaggagagcctgatgtggagggctccgaaggaagaggctgactatgaagatgatttcctggagtatgatcaggaacatatcagatttatagataatatgttaatggggtcaggagcttttgtaaagaaaatctctctttctcctttttcaaccactgattctgcatatgaatggaaaatgcccaaaaaatcctccttaggtagtatgccattttcatcagattttgaggattttgactacagctcttgggatgcaatgtgctatctggatcctagcaaagctgttgaagaagatgactttgtggtggggttctggaatccatcagaagaaaactgtggtgttgacacgggaaagcagtccatttcttacgacttgcacactgagcagtgtattgctgacaaaagcatagcggactgtgtggaagccctgctgggctgctatttaaccagctgtggggagagggctgctcagcttttcctctgttcactggggctgaaggtgctcccggtaattaaaaggactgatcgggaaaaggccctgtgccctactcgggagaatttcaacagccaacaaaagaacctttcagtgagctgtgctgctgcttctgtggccagttcacgctcttctgtattgaaagactcggaatatggttgtttgaagattccaccaagatgtatgtttgatcatccagatgcagataaaacactgaatcaccttatatcggggtttgaaaattttgaaaagaaaatcaactacagattcaagaataaggcttaccttctccaggcttttacacatgcctcctaccactacaatactatcactgattgttaccagcgcttagaattcctgggagatgcgattttggactacctcataaccaagcacctttatgaagacccgcggcagcactccccgggggtcctgacagacctgcggtctgccctggtcaacaacaccatctttgcatcgctggctgtaaagtacgactaccacaagtacttcaaagctgtctctcctgagctcttccatgtcattgatgactttgtgcagtttcagcttgagaagaatgaaatgcaaggaatggattctgagcttaggagatctgaggaggatgaagagaaagaagaggatattgaagttccaaaggccatgggggatatttttgagtcgcttgctggtgccatttacatggatagtgggatgtcactggagacagtctggcaggtgtactatcccatgatgcggccactaatagaaaagttttctgcaaatgtaccccgttcccctgtgcgagaattgcttgaaatggaaccagaaactgccaaatttagcccggctgagagaacttacgacgggaaggtcagagtcactgtggaagtagtaggaaaggggaaatttaaaggtgttggtcgaagttacaggattgccaaatctgcagcagcaagaagagccctccgaagcctcaaagctaatcaacctcaggttcccaatagctgaaaccgctttttaaaattcaaaacaagaaacaaaacaaaaaaaattaaggggaaaattatttaaatcggaaaggaagacttaaagttgatagtgagtggaatgaattgaaggcagaatttaaagtttggttgataacaggatagataacagaataaaacatttaacatatgtataaaattttggaactaattgtagttttagttttttgcgcaaacacaatcttatcttctttcctcacttctgctttgtttaaatcacaagagtgctttaatgatgacatttagcaagtgctcaaaataattgacaggttttgtttttttttttttgagtttatgtcagctttgcttagtgttagaaggccatggagcttaaacctccagcagtccctaggatgatgtagattcttctccatctctccgtgtgtgcagtagtgccagtcctgcagtagttgataagctgaatagaaagataaggttttcgagaggagaagtgcgccaatgttgtcttttctttccacgttatactgtgtaaggtgatgttcccggtcgctgttgcacctgatagtaagggacagatttttaatgaacattggctggcatgttggtgaatcacattttagttttctgatgccacatagtcttgcataaaaaagggttcttgccttaaaagtgaaaccttcatggatagtctttaatctctgatctttttggaacaaactgttttacattcctttcattttattatgcattagacgttgagacagcgtgatacttacaactcactagtatagttgtaacttattacaggatcatactaaaatttctgtcatatgtatactgaagacattttaaaaaccagaatatgtagtctacggatattttttatcataaaaatgatctttggctaaacaccccattttactaaagtcctcctgccaggtagttcccactgatggaaatgtttatggcaaataattttgccttctaggctgttgctctaacaaaataaaccttagacatatcacacctaaaatatgctgcagattttataattgattggttacttatttaagaagcaaaacacagcacctttacccttagtctcctcacataaatttcttactatacttttcataatgttgcatgcatatttcacctaccaaagctgtgctgttaatgccgtgaaagtttaacgtttgcgataaactgccgtaattttgatacatctgtgatttaggtcattaatttagataaactagctcattatttccatctttggaaaaggaaaaaaaaaaaaacttctttaggcatttgcctaagtttctttaattagacttgtaggcactcttcacttaaatacctcagttcttcttttcttttgcatgcatttttcccctgtttggtgctatgtttatgtattatgcttgaaattttaattttttttttttttgcactgtaactataatacctcttaatttacctttttaaaagctgtgggtcagtcttgcactcccatcaacataccagtagaggtttgctgcaatttgccccgttaattatgcttgaagtttaagaaagctgagcagaggtgtctcatatttcccagcacatgattctgaacttgatgcttcatggaatgctgcatttatatgtaagtgacatttgaatactgtccttcctgctttatctgcatcatccacccacagagaaatgcctctgtgcgagtgcaccgacagaaaactgtcagctctgctttctaaggaaccctgagtgaggggggtattaagcttctccagtgttttttgttgtctccaatcttaaacttaaattgagatctaaattattaaacgagtttttgagcaaattaggtgacttgttttaaaaatatttaattccgatttggaaccttagatgtctatttgattttttaaaaaaccttaatgtaagatatgaccagttaaaacaaagcaattcttgaattatataactgtaaaagtgtgcagttaacaaggctggatgtgaattttattctgagggtgatttgtgatcaagtttaatcacaaatctcttaatatttataaactacctgatgccaggagcttagggctttgcattgtgtctaatacattgatcccagtgttacgggattctcttgattcctggcaccaaaatcagattgttttcacagttatgattcccagtgggagaaaaatgcctcaatatatttgtaaccttaagaagagtatttttttgttaatactaagatgttcaaacttagacatgattaggtcatacattctcaggggttcaaatttccttctaccattcaaatgttttatcaacagcaaacttcagccgtttcactttttgttggagaaaaatagtagattttaatttgactcacagtttgaagcattctgtgatcccctggttactgagttaaaaaataaaaaagtacgagttagacatatgaaatggttatgaacgcttttgtgctgctgatttttaatgctgtaaagttttcctgtgtttagcttgttgaaatgttttgcatctgtcaattaaggaaaaaaaaaatcactctatgttgccccactttagagccctgtgtgccaccctgtgttcctgtgattgcaatgtgagaccgaatgtaatatggaaaacctaccagtggggtgtggttgtgccctgagcacgtgtgtaaaggactggggaggcgtgtcttgaaaaagcaactgcagaaattccttatgatgattgtgtgcaagttagttaacatgaaccttcatttgtaaattttttaaaatttcttttataatatgctttccgcagtcctaactatgctgcgttttataatagctttttcccttctgttctgttcatgtagcacagataagcattgcacttggtaccatgctttacctcatttcaagaaaatatgcttaacagagaggaaaaaaatgtggtttggccttgctgctgttttgatttatggaatttgaaaaagataattataatgcctgcaatgtgtcatatactcgcacaacttaaataggtcatttttgtctgtggcatttttactgtttgtgaaagtatgaaacagatttgttaactgaactcttaattatgtttttaaaatgtttgttatatttcttttcttttttcttttatattacgtgaagtgatgaaatttagaatgacctctaacactcctgtaattgtcttttaaaatactgatatttttatttgttaataatactttgccctcagaaagattctgataccctgccttgacaacatgaaacttgaggctgctttggttcatgaatccaggtgttcccccggcagtcggcttcttcagtcgctccctggaggcaggtgggcactgcagaggatcactggaatccagatcgagcgcagttcatgcacaaggccccgttgatttaaaatattggatcttgctctgttagggtgtctaatccctttacacaagattgaagccaccaaactgagaccttgatacctttttttaactgcatctgaaattatgttaagagtctttaacccatttgcattatctgcagaagagaaactcatgtcatgtttattacctatatggttgttttaattacatttgaataattatatttttccaaccactgattacttttcaggaatttaattatttccagataaatttctttattttatattgtacatgaaaagttttaaagatatgtttaagaccaagactattattgagaccattgtattttccactagcagtgaaaatgatttttcacaactaacttgtaaatatattttaatcattacttctttttttctagtccatttttatttggacatcaaccacagacaatttaaattttatagatgcactaagaattcactgcagcagcaggttacatagcaaaaatgcaaaggtgaacaggaagtaaatttctggcttttctgctgtaaatagtgaaggaaaattactaaaatcaagtaaaactaatgcatattatttgattgacaataaaatatttaccatcacatgctgcagctgttttttaaggaacatgatgtcattcattcatacagtaatcatgctgcagaaatttgcagtctgcaccttatggatcacaattacctttagttgttttttttgtaataattgtagccaagtaaatctccaataaagttatcgtctgttca

SEQ ID NO: 437109 - DNA, 10023 bp, Homo sapiens
ggaaactctgaaagaacttagaatcagcattttgagagcagaagcttgggcatgctgtgattttccaataaactgctatcacaatgtcaaaatgcagttcagacaagagcaacacagagatctcaaacattaaaacgtaagctgtgctagaacaaaaatgcaatgaaagaaacactggatgaatgaaaagccctgctttgcaacccctcagcatggcaggcctgcagctcatgacccctgcttcctcaccaatgggtcctttctttggactgccatggcaacaagaagcaattcatgataacatttatacgccaagaaaatatcaggttgaactgcttgaagcagctctggatcataataccatcgtctgtttaaacactggctcagggaagacatttattgctagtactactctactaaagagctgtctctatctagatctaggggagacttcagctagaaatggaaaaaggacggtgttcttggtcaactctgcaaaccaggttgctcaacaagtgtcagctgtcagaactcattcagatctcaaggttggggaatactcaaacctagaagtaaatgcatcttggacaaaagagagatggaaccaagagtttactaagcaccaggttctcattatgacttgctatgtcgccttgaatgttttgaaaaatggttacttatcactgtcagacattaaccttttggtgtttgatgagtgtcatcttgcaatcctagaccacccctatcgagaatttatgaagctctgtgaaatttgtccatcatgtcctcgcattttgggactaactgcttccattttaaatgggaaatgggatccagaggatttggaagaaaagtttcagaaactagagaaaattcttaagagtaatgctgaaactgcaactgacctggtggtcttagacaggtatacttctcagccatgtgagattgtggtggattgtggaccatttactgacagaagtgggctttatgaaagactgctgatggaattagaagaagcacttaattttatcaatgattgtaatatatctgtacattcaaaagaaagagattctactttaatttcgaaacagatactatcagactgtcgtgccgtattggtagttctgggaccctggtgtgcagataaagtagctggaatgatggtaagagaactacagaaatacatcaaacatgagcaagaggagctgcacaggaaatttttattgtttacagacactttcctaaggaaaatacatgcactatgtgaagagcacttctcacctgcctcacttgacctgaaatttgtaactcctaaagtaatcaaactgctcgaaatcttacgcaaatataaaccatatgagcgacacagttttgaaagcgttgagtggtataataatagaaatcaggataattatgtgtcatggagtgattctgaggatgatgatgaggatgaagaaattgaagaaaaagagaagccagagacaaattttccttctccttttaccaacattttgtgcggaattatttttgtggaaagaagatacacagcagttgtcttaaacagattgataaaggaagctggcaaacaagatccagagctggcttatatcagtagcaatttcataactggacatggcattgggaagaatcagcctcgcaacaaacacgatggaagcagaattcagaaaacaggaagaggtacttaggaaatttcgagcacatgagaccaacctgcttattgcaacaagtattgtagaagagggtgttgatataccaaaatgcaacttggtggttcgttttgatttgcccacagaatatcgatcctatgttcaatctaaaggaagagcaagggcacccatctctaattatataatgttagcggatacagacaaaataaaaagttttgaagaagaccttaaaacctacaaagctattgaaaagatcttgagaaacaagtgttccaagtcggttgatactggtgagactgacattgatcctgtcatggatgatgatgacgttttcccaccatatgtgttgaggcctgacgatggtggtccacgagtcacaatcaacacggccattggacacatcaatagatactgtgctagattaccaagtgatccgtttactcatctagctcctaaatgcagaacccgagagttgcctgatggtacattttattcaactctttatctgccaattaactcacctcttcgagcctccattgttggtccaccaatgagctgtgtacgattggctgaaagagttgtagctctcatttgctgtgagaaactgcacaaaattggcgaactggatgaccatttgatgccagttgggaaagagactgttaaatatgaagaggagcttgatttgcatgatgaagaagagaccagtgttccaggaagaccaggttccacgaaacgaaggcagtgctacccaaaagcaattccagagtgtttgagggatagttatcccagacctgatcagccctgttacctgtatgtgataggaatggttttaactacacctttacctgatgaactcaactttagaaggcggaagctctatcctcctgaagataccacaagatgctttggaatactgacggccaaacccatacctcagattccacactttcctgtgtacacacgctctggagaggttaccatatccattgagttgaagaagtctggtttcatgttgtctctacaaatgcttgagttgattacaagacttcaccagtatatattctcacatattcttcggcttgaaaaacctgcactagaatttaaacctacagacgctgattcagcatactgtgttctacctcttaatgttgttaatgactccagcactttggatattgactttaaattcatggaagatattgagaagtctgaagctcgcataggcattcccagtacaaagtatacaaaagaaacaccctttgtttttaaattagaagattaccaagatgccgttatcattccaagatatcgcaattttgatcagcctcatcgattttatgtagctgatgtgtacactgatcttaccccactcagtaaatttccttcccctgagtatgaaacttttgcagaatattataaaacaaagtacaaccttgacctaaccaatctcaaccagccactgctggatgtggaccacacatcttcaagacttaatcttttgacacctcgacatttgaatcagaaggggaaagcgcttcctttaagcagtgctgagaagaggaaagccaaatgggaaagtctgcagaataaacagatactggttccagaactctgtgctatacatccaattccagcatcactgtggagaaaagctgtttgtctccccagcatactttatcgccttcactgccttttgactgcagaggagctaagagcccagactgccagcgatgctggcgtgggagtcagatcacttcctgcggattttagataccctaacttagacttcgggtggaaaaaatctattgacagcaaatctttcatctcaatttctaactcctcttcagctgaaaatgataattactgtaagcacagcacaattgtccctgaaaatgctgcacatcaaggtgctaatagaacctcctctctagaaaatcatgaccaaatgtctgtgaactgcagaacgttgctcagcgagtcccctggtaagctccacgttgaagtttcagcagatcttacagcaattaatggtctttcttacaatcaaaatctcgccaatggcagttatgatttagctaacagagacttttgccaaggaaatcagctaaattactacaagcaggaaatacccgtgcaaccaactacctcatattccattcagaatttatacagttacgagaaccagccccagcccagcgatgaatgtactctcctgagtaataaataccttgatggaaatgctaacaaatctacctcagatggaagtcctgtgatggccgtaatgcctggtacgacagacactattcaagtgctcaagggcaggatggattctgagcagagcccttctattgggtactcctcaaggactcttggccccaatcctggacttattcttcaggctttgactctgtcaaacgctagtgatggatttaacctggagcggcttgaaatgcttggcgactcctttttaaagcatgccatcaccacatatctattttgcacttaccctgatgcgcatgagggccgcctttcatatatgagaagcaaaaaggtcagcaactgtaatctgtatcgccttggaaaaaagaagggactacccagccgcatggtggtgtcaatatttgatccccctgtgaattggcttcctcctggttatgtagtaaatcaagacaaaagcaacacagataaatgggaaaaagatgaaatgacaaaagactgcatgctggcgaatggcaaactggatgaggattacgaggaggaggatgaggaggaggagagcctgatgtggagggctccgaaggaagaggctgactatgaagatgatttcctggagtatgatcaggaacatatcagatttatagataatatgttaatggggtcaggagcttttgtaaagaaaatctctctttctcctttttcaaccactgattctgcatatgaatggaaaatgcccaaaaaatcctccttaggtagtatgccattttcatcagattttgaggattttgactacagctcttgggatgcaatgtgctatctggatcctagcaaagctgttgaagaagatgactttgtggtggggttctggaatccatcagaagaaaactgtggtgttgacacgggaaagcagtccatttcttacgacttgcacactgagcagtgtattgctgacaaaagcatagcggactgtgtggaagccctgctgggctgctatttaaccagctgtggggagagggctgctcagcttttcctctgttcactggggctgaaggtgctcccggtaattaaaaggactgatcgggaaaaggccctgtgccctactcgggagaatttcaacagccaacaaaagaacctttcagtgagctgtgctgctgcttctgtggccagttcacgctcttctgtattgaaagactcggaatatggttgtttgaagattccaccaagatgtatgtttgatcatccagatgcagataaaacactgaatcaccttatatcggggtttgaaaattttgaaaagaaaatcaactacagattcaagaataaggcttaccttctccaggcttttacacatgcctcctaccactacaatactatcactgattgttaccagcgcttagaattcctgggagatgcgattttggactacctcataaccaagcacctttatgaagacccgcggcagcactccccgggggtcctgacagacctgcggtctgccctggtcaacaacaccatctttgcatcgctggctgtaaagtacgactaccacaagtacttcaaagctgtctctcctgagctcttccatgtcattgatgactttgtgcagtttcagcttgagaagaatgaaatgcaaggaatggattctgagcttaggagatctgaggaggatgaagagaaagaagaggatattgaagttccaaaggccatgggggatatttttgagtcgcttgctggtgccatttacatggatagtgggatgtcactggagacagtctggcaggtgtactatcccatgatgcggccactaatagaaaagttttctgcaaatgtaccccgttcccctgtgcgagaattgcttgaaatggaaccagaaactgccaaatttagcccggctgagagaacttacgacgggaaggtcagagtcactgtggaagtagtaggaaaggggaaatttaaaggtgttggtcgaagttacaggattgccaaatctgcagcagcaagaagagccctccgaagcctcaaagctaatcaacctcaggttcccaatagctgaaaccgctttttaaaattcaaaacaagaaacaaaacaaaaaaaattaaggggaaaattatttaaatcggaaaggaagacttaaagttgatagtgagtggaatgaattgaaggcagaatttaaagtttggttgataacaggatagataacagaataaaacatttaacatatgtataaaattttggaactaattgtagttttagttttttgcgcaaacacaatcttatcttctttcctcacttctgctttgtttaaatcacaagagtgctttaatgatgacatttagcaagtgctcaaaataattgacaggttttgtttttttttttttgagtttatgtcagctttgcttagtgttagaaggccatggagcttaaacctccagcagtccctaggatgatgtagattcttctccatctctccgtgtgtgcagtagtgccagtcctgcagtagttgataagctgaatagaaagataaggttttcgagaggagaagtgcgccaatgttgtcttttctttccacgttatactgtgtaaggtgatgttcccggtcgctgttgcacctgatagtaagggacagatttttaatgaacattggctggcatgttggtgaatcacattttagttttctgatgccacatagtcttgcataaaaaagggttcttgccttaaaagtgaaaccttcatggatagtctttaatctctgatctttttggaacaaactgttttacattcctttcattttattatgcattagacgttgagacagcgtgatacttacaactcactagtatagttgtaacttattacaggatcatactaaaatttctgtcatatgtatactgaagacattttaaaaaccagaatatgtagtctacggatattttttatcataaaaatgatctttggctaaacaccccattttactaaagtcctcctgccaggtagttcccactgatggaaatgtttatggcaaataattttgccttctaggctgttgctctaacaaaataaaccttagacatatcacacctaaaatatgctgcagattttataattgattggttacttatttaagaagcaaaacacagcacctttacccttagtctcctcacataaatttcttactatacttttcataatgttgcatgcatatttcacctaccaaagctgtgctgttaatgccgtgaaagtttaacgtttgcgataaactgccgtaattttgatacatctgtgatttaggtcattaatttagataaactagctcattatttccatctttggaaaaggaaaaaaaaaaaaacttctttaggcatttgcctaagtttctttaattagacttgtaggcactcttcacttaaatacctcagttcttcttttcttttgcatgcatttttcccctgtttggtgctatgtttatgtattatgcttgaaattttaattttttttttttttgcactgtaactataatacctcttaatttacctttttaaaagctgtgggtcagtcttgcactcccatcaacataccagtagaggtttgctgcaatttgccccgttaattatgcttgaagtttaagaaagctgagcagaggtgtctcatatttcccagcacatgattctgaacttgatgcttcatggaatgctgcatttatatgtaagtgacatttgaatactgtccttcctgctttatctgcatcatccacccacagagaaatgcctctgtgcgagtgcaccgacagaaaactgtcagctctgctttctaaggaaccctgagtgaggggggtattaagcttctccagtgttttttgttgtctccaatcttaaacttaaattgagatctaaattattaaacgagtttttgagcaaattaggtgacttgttttaaaaatatttaattccgatttggaaccttagatgtctatttgattttttaaaaaaccttaatgtaagatatgaccagttaaaacaaagcaattcttgaattatataactgtaaaagtgtgcagttaacaaggctggatgtgaattttattctgagggtgatttgtgatcaagtttaatcacaaatctcttaatatttataaactacctgatgccaggagcttagggctttgcattgtgtctaatacattgatcccagtgttacgggattctcttgattcctggcaccaaaatcagattgttttcacagttatgattcccagtgggagaaaaatgcctcaatatatttgtaaccttaagaagagtatttttttgttaatactaagatgttcaaacttagacatgattaggtcatacattctcaggggttcaaatttccttctaccattcaaatgttttatcaacagcaaacttcagccgtttcactttttgttggagaaaaatagtagattttaatttgactcacagtttgaagcattctgtgatcccctggttactgagttaaaaaataaaaaagtacgagttagacatatgaaatggttatgaacgcttttgtgctgctgatttttaatgctgtaaagttttcctgtgtttagcttgttgaaatgttttgcatctgtcaattaaggaaaaaaaaaatcactctatgttgccccactttagagccctgtgtgccaccctgtgttcctgtgattgcaatgtgagaccgaatgtaatatggaaaacctaccagtggggtgtggttgtgccctgagcacgtgtgtaaaggactggggaggcgtgtcttgaaaaagcaactgcagaaattccttatgatgattgtgtgcaagttagttaacatgaaccttcatttgtaaattttttaaaatttcttttataatatgctttccgcagtcctaactatgctgcgttttataatagctttttcccttctgttctgttcatgtagcacagataagcattgcacttggtaccatgctttacctcatttcaagaaaatatgcttaacagagaggaaaaaaatgtggtttggccttgctgctgttttgatttatggaatttgaaaaagataattataatgcctgcaatgtgtcatatactcgcacaacttaaataggtcatttttgtctgtggcatttttactgtttgtgaaagtatgaaacagatttgttaactgaactcttaattatgtttttaaaatgtttgttatatttcttttcttttttcttttatattacgtgaagtgatgaaatttagaatgacctctaacactcctgtaattgtcttttaaaatactgatatttttatttgttaataatactttgccctcagaaagattctgataccctgccttgacaacatgaaacttgaggctgctttggttcatgaatccaggtgttcccccggcagtcggcttcttcagtcgctccctggaggcaggtgggcactgcagaggatcactggaatccagatcgagcgcagttcatgcacaaggccccgttgatttaaaatattggatcttgctctgttagggtgtctaatccctttacacaagattgaagccaccaaactgagaccttgatacctttttttaactgcatctgaaattatgttaagagtctttaacccatttgcattatctgcagaagagaaactcatgtcatgtttattacctatatggttgttttaattacatttgaataattatatttttccaaccactgattacttttcaggaatttaattatttccagataaatttctttattttatattgtacatgaaaagttttaaagatatgtttaagaccaagactattaaaatgatttttaaagttgttggagacgccaatagcaatatctaggaaatttgcattgagaccattgtattttccactagcagtgaaaatgatttttcacaactaacttgtaaatatattttaatcattacttctttttttctagtccatttttatttggacatcaaccacagacaaggtagagccgagctcggctctaccttgtctcggctctaccttgtctctcggctctaccttgctctagtcatatcccaccaccagtaccaagtgaattcaatgatgtttccctgtacacacatctgaaacaag

SEQ ID NO: 437110 - DNA, 8196 bp, Homo sapiens
ctcaatcctgctcctgtataagtggacccattttctatggccattttatttagcattgatatgtggtgatgtcatgtttagatgtttttgtttctgaaccttagaacagaatttgcagtccagctcatattggaatatatggatgccaaaatagactttgcctgaagtgtgaatctgattacttttaaattgtaaaaggcaaaggtgctttagtttccattacttttccaggtccttctaacatagttctgttctaaattctttactaattaatcaggcaaaatctggattgtgttaattctctctttaaatttgttaggcgaactggatgaccatttgatgccagttgggaaagagactgttaaatatgaagaggagcttgatttgcatgatgaagaagagaccagtgttccaggaagaccaggttccacgaaacgaaggcagtgctacccaaaagcattacctgtatgtgataggaatggttttaactacacctttacctgatgaactcaactttagaaggcggaagctctatcctcctgaagataccacaagatgctttggaatactgacggccaaacccatacctcagattccacactttcctgtgtacacacgctctggagaggttaccatatccattgagttgaagaagtctggtttcatgttgtctctacaaatgcttgagttgattacaagacttcaccagtatatattctcacatattcttcggcttgaaaaacctgcactagaatttaaacctacagacgctgattcagcatactgtgttctacctcttaatgttgttaatgactccagcactttggatattgactttaaattcatggaagatattgagaagtctgaagctcgcataggcattcccagtacaaagtatacaaaagaaacaccctttgtttttaaattagaagattaccaagatgccgttatcattccaagatatcgcaattttgatcagcctcatcgattttatgtagctgatgtgtacactgatcttaccccactcagtaaatttccttcccctgagtatgaaacttttgcagaatattataaaacaaagtacaaccttgacctaaccaatctcaaccagccactgctggatgtggaccacacatcttcaagacttaatcttttgacacctcgacatttgaatcagaaggggaaagcgcttcctttaagcagtgctgagaagaggaaagccaaatgggaaagtctgcagaataaacagatactggttccagaactctgtgctatacatccaattccagcatcactgtggagaaaagctgtttgtctccccagcatactttatcgccttcactgccttttgactgcagaggagctaagagcccagactgccagcgatgctggcgtgggagtcagatcacttcctgcggattttagataccctaacttagacttcgggtggaaaaaatctattgacagcaaatctttcatctcaatttctaactcctcttcagctgaaaatgataattactgtaagcacagcacaattgtccctgaaaatgctgcacatcaaggtgctaatagaacctcctctctagaaaatcatgaccaaatgtctgtgaactgcagaacgttgctcagcgagtcccctggtaagctccacgttgaagtttcagcagatcttacagcaattaatggtctttcttacaatcaaaatctcgccaatggcagttatgatttagctaacagagacttttgccaaggaaatcagctaaattactacaagcaggaaatacccgtgcaaccaactacctcatattccattcagaatttatacagttacgagaaccagccccagcccagcgatgaatgtactctcctgagtaataaataccttgatggaaatgctaacaaatctacctcagatggaagtcctgtgatggccgtaatgcctggtacgacagacactattcaagtgctcaagggcaggatggattctgagcagagcccttctattgggtactcctcaaggactcttggccccaatcctggacttattcttcaggctttgactctgtcaaacgctagtgatggatttaacctggagcggcttgaaatgcttggcgactcctttttaaagcatgccatcaccacatatctattttgcacttaccctgatgcgcatgagggccgcctttcatatatgagaagcaaaaaggtcagcaactgtaatctgtatcgccttggaaaaaagaagggactacccagccgcatggtggtgtcaatatttgatccccctgtgaattggcttcctcctggttatgtagtaaatcaagacaaaagcaacacagataaatgggaaaaagatgaaatgacaaaagactgcatgctggcgaatggcaaactggatgaggattacgaggaggaggatgaggaggaggagagcctgatgtggagggctccgaaggaagaggctgactatgaagatgatttcctggagtatgatcaggaacatatcagatttatagataatatgttaatggggtcaggagcttttgtaaagaaaatctctctttctcctttttcaaccactgattctgcatatgaatggaaaatgcccaaaaaatcctccttaggtagtatgccattttcatcagattttgaggattttgactacagctcttgggatgcaatgtgctatctggatcctagcaaagctgttgaagaagatgactttgtggtggggttctggaatccatcagaagaaaactgtggtgttgacacgggaaagcagtccatttcttacgacttgcacactgagcagtgtattgctgacaaaagcatagcggactgtgtggaagccctgctgggctgctatttaaccagctgtggggagagggctgctcagcttttcctctgttcactggggctgaaggtgctcccggtaattaaaaggactgatcgggaaaaggccctgtgccctactcgggagaatttcaacagccaacaaaagaacctttcagtgagctgtgctgctgcttctgtggccagttcacgctcttctgtattgaaagactcggaatatggttgtttgaagattccaccaagatgtatgtttgatcatccagatgcagataaaacactgaatcaccttatatcggggtttgaaaattttgaaaagaaaatcaactacagattcaagaataaggcttaccttctccaggcttttacacatgcctcctaccactacaatactatcactgattgttaccagcgcttagaattcctgggagatgcgattttggactacctcataaccaagcacctttatgaagacccgcggcagcactccccgggggtcctgacagacctgcggtctgccctggtcaacaacaccatctttgcatcgctggctgtaaagtacgactaccacaagtacttcaaagctgtctctcctgagctcttccatgtcattgatgactttgtgcagtttcagcttgagaagaatgaaatgcaaggaatggattctgagcttaggagatctgaggaggatgaagagaaagaagaggatattgaagttccaaaggccatgggggatatttttgagtcgcttgctggtgccatttacatggatagtgggatgtcactggagacagtctggcaggtgtactatcccatgatgcggccactaatagaaaagttttctgcaaatgtaccccgttcccctgtgcgagaattgcttgaaatggaaccagaaactgccaaatttagcccggctgagagaacttacgacgggaaggtcagagtcactgtggaagtagtaggaaaggggaaatttaaaggtgttggtcgaagttacaggattgccaaatctgcagcagcaagaagagccctccgaagcctcaaagctaatcaacctcaggttcccaatagctgaaaccgctttttaaaattcaaaacaagaaacaaaacaaaaaaaattaaggggaaaattatttaaatcggaaaggaagacttaaagttgatagtgagtggaatgaattgaaggcagaatttaaagtttggttgataacaggatagataacagaataaaacatttaacatatgtataaaattttggaactaattgtagttttagttttttgcgcaaacacaatcttatcttctttcctcacttctgctttgtttaaatcacaagagtgctttaatgatgacatttagcaagtgctcaaaataattgacaggttttgtttttttttttttgagtttatgtcagctttgcttagtgttagaaggccatggagcttaaacctccagcagtccctaggatgatgtagattcttctccatctctccgtgtgtgcagtagtgccagtcctgcagtagttgataagctgaatagaaagataaggttttcgagaggagaagtgcgccaatgttgtcttttctttccacgttatactgtgtaaggtgatgttcccggtcgctgttgcacctgatagtaagggacagatttttaatgaacattggctggcatgttggtgaatcacattttagttttctgatgccacatagtcttgcataaaaaagggttcttgccttaaaagtgaaaccttcatggatagtctttaatctctgatctttttggaacaaactgttttacattcctttcattttattatgcattagacgttgagacagcgtgatacttacaactcactagtatagttgtaacttattacaggatcatactaaaatttctgtcatatgtatactgaagacattttaaaaaccagaatatgtagtctacggatattttttatcataaaaatgatctttggctaaacaccccattttactaaagtcctcctgccaggtagttcccactgatggaaatgtttatggcaaataattttgccttctaggctgttgctctaacaaaataaaccttagacatatcacacctaaaatatgctgcagattttataattgattggttacttatttaagaagcaaaacacagcacctttacccttagtctcctcacataaatttcttactatacttttcataatgttgcatgcatatttcacctaccaaagctgtgctgttaatgccgtgaaagtttaacgtttgcgataaactgccgtaattttgatacatctgtgatttaggtcattaatttagataaactagctcattatttccatctttggaaaaggaaaaaaaaaaaaacttctttaggcatttgcctaagtttctttaattagacttgtaggcactcttcacttaaatacctcagttcttcttttcttttgcatgcatttttcccctgtttggtgctatgtttatgtattatgcttgaaattttaattttttttttttttgcactgtaactataatacctcttaatttacctttttaaaagctgtgggtcagtcttgcactcccatcaacataccagtagaggtttgctgcaatttgccccgttaattatgcttgaagtttaagaaagctgagcagaggtgtctcatatttcccagcacatgattctgaacttgatgcttcatggaatgctgcatttatatgtaagtgacatttgaatactgtccttcctgctttatctgcatcatccacccacagagaaatgcctctgtgcgagtgcaccgacagaaaactgtcagctctgctttctaaggaaccctgagtgaggggggtattaagcttctccagtgttttttgttgtctccaatcttaaacttaaattgagatctaaattattaaacgagtttttgagcaaattaggtgacttgttttaaaaatatttaattccgatttggaaccttagatgtctatttgattttttaaaaaaccttaatgtaagatatgaccagttaaaacaaagcaattcttgaattatataactgtaaaagtgtgcagttaacaaggctggatgtgaattttattctgagggtgatttgtgatcaagtttaatcacaaatctcttaatatttataaactacctgatgccaggagcttagggctttgcattgtgtctaatacattgatcccagtgttacgggattctcttgattcctggcaccaaaatcagattgttttcacagttatgattcccagtgggagaaaaatgcctcaatatatttgtaaccttaagaagagtatttttttgttaatactaagatgttcaaacttagacatgattaggtcatacattctcaggggttcaaatttccttctaccattcaaatgttttatcaacagcaaacttcagccgtttcactttttgttggagaaaaatagtagattttaatttgactcacagtttgaagcattctgtgatcccctggttactgagttaaaaaataaaaaagtacgagttagacatatgaaatggttatgaacgcttttgtgctgctgatttttaatgctgtaaagttttcctgtgtttagcttgttgaaatgttttgcatctgtcaattaaggaaaaaaaaaatcactctatgttgccccactttagagccctgtgtgccaccctgtgttcctgtgattgcaatgtgagaccgaatgtaatatggaaaacctaccagtggggtgtggttgtgccctgagcacgtgtgtaaaggactggggaggcgtgtcttgaaaaagcaactgcagaaattccttatgatgattgtgtgcaagttagttaacatgaaccttcatttgtaaattttttaaaatttcttttataatatgctttccgcagtcctaactatgctgcgttttataatagctttttcccttctgttctgttcatgtagcacagataagcattgcacttggtaccatgctttacctcatttcaagaaaatatgcttaacagagaggaaaaaaatgtggtttggccttgctgctgttttgatttatggaatttgaaaaagataattataatgcctgcaatgtgtcatatactcgcacaacttaaataggtcatttttgtctgtggcatttttactgtttgtgaaagtatgaaacagatttgttaactgaactcttaattatgtttttaaaatgtttgttatatttcttttcttttttcttttatattacgtgaagtgatgaaatttagaatgacctctaacactcctgtaattgtcttttaaaatactgatatttttatttgttaataatactttgccctcagaaagattctgataccctgccttgacaacatgaaacttgaggctgctttggttcatgaatccaggtgttcccccggcagtcggcttcttcagtcgctccctggaggcaggtgggcactgcagaggatcactggaatccagatcgagcgcagttcatgcacaaggccccgttgatttaaaatattggatcttgctctgttagggtgtctaatccctttacacaagattgaagccaccaaactgagaccttgatacctttttttaactgcatctgaaattatgttaagagtctttaacccatttgcattatctgcagaagagaaactcatgtcatgtttattacctatatggttgttttaattacatttgaataattatatttttccaaccactgattacttttcaggaatttaattatttccagataaatttctttattttatattgtacatgaaaagttttaaagatatgtttaagaccaagactattaaaatgatttttaaagttgttggagacgccaatagcaatatctaggaaatttgcattgagaccattgtattttccactagcagtgaaaatgatttttcacaactaacttgtaaatatattttaatcattacttctttttttctagtccatttttatttggacatcaaccacagacaatttaaattttatagatgcactaagaattcactgcagcagcaggttacatagcaaaaatgcaaaggtgaacaggaagtaaatttctggcttttctgctgtaaatagtgaaggaaaattactaaaatcaagtaaaactaatgcatattatttgattgacaataaaatatttaccatcacatgctgcagctgttttttaaggaacatgatgtcattcattcatacagtaatcatgctgcagaaatttgcagtctgcaccttatggatcacaattacctttagttgttttttttgtaataattgtagccaagtaaatctccaataaagttatcgtctgttca

SEQ ID NO: 437111 - DNA, 10599 bp, Homo sapiens
ggaaactctgaaagaacttagaatcagcattttgagagcagaagcttgggcatgctgtgattttccaataaactgctatcacaatgtcaaaatgcagttcagacaagagcaacacagagatctcaaacattaaaacgtaagctgtgctagaacaaaaatgcaatgaaagaaacactggatgaatgaaaagccctgctttgcaacccctcagcatggcaggcctgcagctcatgacccctgcttcctcaccaatgggtcctttctttggactgccatggcaacaagaagcaattcatgataacatttatacgccaagaaaatatcaggttgaactgcttgaagcagctctggatcataataccatcgtctgtttaaacactggctcagggaagacatttattgctagtactactctactaaagagctgtctctatctagatctaggggagacttcagctagaaatggaaaaaggacggtgttcttggtcaactctgcaaaccaggttgctcaacaagtgtcagctgtcagaactcattcagatctcaaggttggggaatactcaaacctagaagtaaatgcatcttggacaaaagagagatggaaccaagagtttactaagcaccaggttctcattatgacttgctatgtcgccttgaatgttttgaaaaatggttacttatcactgtcagacattaaccttttggtgtttgatgagtgtcatcttgcaatcctagaccacccctatcgagaatttatgaagctctgtgaaatttgtccatcatgtcctcgcattttgggactaactgcttccattttaaatgggaaatgggatccagaggatttggaagaaaagtttcagaaactagagaaaattcttaagagtaatgctgaaactgcaactgacctggtggtcttagacaggtatacttctcagccatgtgagattgtggtggattgtggaccatttactgacagaagtgggctttatgaaagactgctgatggaattagaagaagcacttaattttatcaatgattgtaatatatctgtacattcaaaagaaagagattctactttaatttcgaaacagatactatcagactgtcgtgccgtattggtagttctgggaccctggtgtgcagataaagtagctggaatgatggtaagagaactacagaaatacatcaaacatgagcaagaggagctgcacaggaaatttttattgtttacagacactttcctaaggaaaatacatgcactatgtgaagagcacttctcacctgcctcacttgacctgaaatttgtaactcctaaagtaatcaaactgctcgaaatcttacgcaaatataaaccatatgagcgacacagttttgaaagcgttgagtggtataataatagaaatcaggataattatgtgtcatggagtgattctgaggatgatgatgaggatgaagaaattgaagaaaaagagaagccagagacaaattttccttctccttttaccaacattttgtgcggaattatttttgtggaaagaagatacacagcagttgtcttaaacagattgataaaggaagctggcaaacaagatccagagctggcttatatcagtagcaatttcataactggacatggcattgggaagaatcagcctcgcaacaaacacgatggaagcagaattcagaaaacaggaagaggtacttaggaaatttcgagcacatgagaccaacctgcttattgcaacaagtattgtagaagagggtgttgatataccaaaatgcaacttggtggttcgttttgatttgcccacagaatatcgatcctatgttcaatctaaaggaagagcaagggcacccatctctaattatataatgttagcggatacagacaaaataaaaagttttgaagaagaccttaaaacctacaaagctattgaaaagatcttgagaaacaagtgttccaagtcggttgatactggtgagactgacattgatcctgtcatggatgatgatgacgttttcccaccatatgtgttgaggcctgacgatggtggtccacgagtcacaatcaacacggccattggacacatcaatagatactgtgctagattaccaagtgatccgtttactcatctagctcctaaatgcagaacccgagagttgcctgatggtacattttattcaactctttatctgccaattaactcacctcttcgagcctccattgttggtccaccaatgagctgtgtacgattggctgaaagagttgtagctctcatttgctgtgagaaactgcacaaaattggcgaactggatgaccatttgatgccagttgggaaagagactgttaaatatgaagaggagcttgatttgcatgatgaagaagagaccagtgttccaggaagaccaggttccacgaaacgaaggcagtgctacccaaaagcaattccagagtgtttgagggatagttatcccagacctgatcagccctgttacctgtatgtgataggaatggttttaactacacctttacctgatgaactcaactttagaaggcggaagctctatcctcctgaagataccacaagatgctttggaatactgacggccaaacccatacctcagattccacactttcctgtgtacacacgctctggagaggttaccatatccattgagttgaagaagtctggtttcatgttgtctctacaaatgcttgagttgattacaagacttcaccagtatatattctcacatattcttcggcttgaaaaacctgcactagaatttaaacctacagacgctgattcagcatactgtgttctacctcttaatgttgttaatgactccagcactttggatattgactttaaattcatggaagatattgagaagtctgaagctcgcataggcattcccagtacaaagtatacaaaagaaacaccctttgtttttaaattagaagattaccaagatgccgttatcattccaagatatcgcaattttgatcagcctcatcgattttatgtagctgatgtgtacactgatcttaccccactcagtaaatttccttcccctgagtatgaaacttttgcagaatattataaaacaaagtacaaccttgacctaaccaatctcaaccagccactgctggatgtggaccacacatcttcaagacttaatcttttgacacctcgacatttgaatcagaaggggaaagcgcttcctttaagcagtgctgagaagaggaaagccaaatgggaaagtctgcagaataaacagatactggttccagaactctgtgctatacatccaattccagcatcactgtggagaaaagctgtttgtctccccagcatactttatcgccttcactgccttttgactgcagaggagctaagagcccagactgccagcgatgctggcgtgggagtcagatcacttcctgcggattttagataccctaacttagacttcgggtggaaaaaatctattgacagcaaatctttcatctcaatttctaactcctcttcagctgaaaatgataattactgtaagcacagcacaattgtccctgaaaatgctgcacatcaaggtgctaatagaacctcctctctagaaaatcatgaccaaatgtctgtgaactgcagaacgttgctcagcgagtcccctggtaagctccacgttgaagtttcagcagatcttacagcaattaatggtctttcttacaatcaaaatctcgccaatggcagttatgatttagctaacagagacttttgccaaggaaatcagctaaattactacaagcaggaaatacccgtgcaaccaactacctcatattccattcagaatttatacagttacgagaaccagccccagcccagcgatgaatgtactctcctgagtaataaataccttgatggaaatgctaacaaatctacctcagatggaagtcctgtgatggccgtaatgcctggtacgacagacactattcaagtgctcaagggcaggatggattctgagcagagcccttctattgggtactcctcaaggactcttggccccaatcctggacttattcttcaggctttgactctgtcaaacgctagtgatggatttaacctggagcggcttgaaatgcttggcgactcctttttaaagcatgccatcaccacatatctattttgcacttaccctgatgcgcatgagggccgcctttcatatatgagaagcaaaaaggtcagcaactgtaatctgtatcgccttggaaaaaagaagggactacccagccgcatggtggtgtcaatatttgatccccctgtgaattggcttcctcctggttatgtagtaaatcaagacaaaagcaacacagataaatgggaaaaagatgaaatgacaaaagactgcatgctggcgaatggcaaactggatgaggattacgaggaggaggatgaggaggaggagagcctgatgtggagggctccgaaggaagaggctgactatgaagatgatttcctggagtatgatcaggaacatatcagatttatagataatatgttaatggggtcaggagcttttgtaaagaaaatctctctttctcctttttcaaccactgattctgcatatgaatggaaaatgcccaaaaaatcctccttaggtagtatgccattttcatcagattttgaggattttgactacagctcttgggatgcaatgtgctatctggatcctagcaaagctgttgaagaagatgactttgtggtggggttctggaatccatcagaagaaaactgtggtgttgacacgggaaagcagtccatttcttacgacttgcacactgagcagtgtattgctgacaaaagcatagcggactgtgtggaagccctgctgggctgctatttaaccagctgtggggagagggctgctcagcttttcctctgttcactggggctgaaggtgctcccggtaattaaaaggactgatcgggaaaaggccctgtgccctactcgggagaatttcaacagccaacaaaagaacctttcagtgagctgtgctgctgcttctgtggccagttcacgctcttctgtattgaaagactcggaatatggttgtttgaagattccaccaagatgtatgtttgatcatccagatgcagataaaacactgaatcaccttatatcggggtttgaaaattttgaaaagaaaatcaactacagattcaagaataaggcttaccttctccaggcttttacacatgcctcctaccactacaatactatcactgattgttaccagcgcttagaattcctgggagatgcgattttggactacctcataaccaagcacctttatgaagacccgcggcagcactccccgggggtcctgacagacctgcggtctgccctggtcaacaacaccatctttgcatcgctggctgtaaagtacgactaccacaagtacttcaaagctgtctctcctgagctcttccatgtcattgatgactttgtgcagtttcagcttgagaagaatgaaatgcaaggaatggattctgagcttaggagatctgaggaggatgaagagaaagaagaggatattgaagttccaaaggccatgggggatatttttgagtcgcttgctggtgccatttacatggatagtgggatgtcactggagacagtctggcaggtgtactatcccatgatgcggccactaatagaaaagttttctgcaaatgtaccccgttcccctgtgcgagaattgcttgaaatggaaccagaaactgccaaatttaggtaagcaaaaaatgtacatggaaaaaacattaacttaaaaacatcaaaggggaaaagttcacaaagatattgtaaactaatgattctgaaaaatatttacactgtggtgtgctgttgtcagatttctgtttgtaatctgattgacttctcttttttccttctgtttttatgaaataatgctgtaataaagactagacggcagccctgtctgtcgggggtatgcaattgcagtaagtcgtaacgcgtgtttcctttgtgtggtgtcagcttatacatgggactcctggcctgagagtgcacactaaatgctgattgacaatgataataaatacttctgacttctaattcaagctgtttggattttttacagcccggctgagagaacttacgacgggaaggtcagagtcactgtggaagtagtaggaaaggggaaatttaaaggtgttggtcgaagttacaggattgccaaatctgcagcagcaagaagagccctccgaagcctcaaagctaatcaacctcaggttcccaatagctgaaaccgctttttaaaattcaaaacaagaaacaaaacaaaaaaaattaaggggaaaattatttaaatcggaaaggaagacttaaagttgatagtgagtggaatgaattgaaggcagaatttaaagtttggttgataacaggatagataacagaataaaacatttaacatatgtataaaattttggaactaattgtagttttagttttttgcgcaaacacaatcttatcttctttcctcacttctgctttgtttaaatcacaagagtgctttaatgatgacatttagcaagtgctcaaaataattgacaggttttgtttttttttttttgagtttatgtcagctttgcttagtgttagaaggccatggagcttaaacctccagcagtccctaggatgatgtagattcttctccatctctccgtgtgtgcagtagtgccagtcctgcagtagttgataagctgaatagaaagataaggttttcgagaggagaagtgcgccaatgttgtcttttctttccacgttatactgtgtaaggtgatgttcccggtcgctgttgcacctgatagtaagggacagatttttaatgaacattggctggcatgttggtgaatcacattttagttttctgatgccacatagtcttgcataaaaaagggttcttgccttaaaagtgaaaccttcatggatagtctttaatctctgatctttttggaacaaactgttttacattcctttcattttattatgcattagacgttgagacagcgtgatacttacaactcactagtatagttgtaacttattacaggatcatactaaaatttctgtcatatgtatactgaagacattttaaaaaccagaatatgtagtctacggatattttttatcataaaaatgatctttggctaaacaccccattttactaaagtcctcctgccaggtagttcccactgatggaaatgtttatggcaaataattttgccttctaggctgttgctctaacaaaataaaccttagacatatcacacctaaaatatgctgcagattttataattgattggttacttatttaagaagcaaaacacagcacctttacccttagtctcctcacataaatttcttactatacttttcataatgttgcatgcatatttcacctaccaaagctgtgctgttaatgccgtgaaagtttaacgtttgcgataaactgccgtaattttgatacatctgtgatttaggtcattaatttagataaactagctcattatttccatctttggaaaaggaaaaaaaaaaaaacttctttaggcatttgcctaagtttctttaattagacttgtaggcactcttcacttaaatacctcagttcttcttttcttttgcatgcatttttcccctgtttggtgctatgtttatgtattatgcttgaaattttaattttttttttttttgcactgtaactataatacctcttaatttacctttttaaaagctgtgggtcagtcttgcactcccatcaacataccagtagaggtttgctgcaatttgccccgttaattatgcttgaagtttaagaaagctgagcagaggtgtctcatatttcccagcacatgattctgaacttgatgcttcatggaatgctgcatttatatgtaagtgacatttgaatactgtccttcctgctttatctgcatcatccacccacagagaaatgcctctgtgcgagtgcaccgacagaaaactgtcagctctgctttctaaggaaccctgagtgaggggggtattaagcttctccagtgttttttgttgtctccaatcttaaacttaaattgagatctaaattattaaacgagtttttgagcaaattaggtgacttgttttaaaaatatttaattccgatttggaaccttagatgtctatttgattttttaaaaaaccttaatgtaagatatgaccagttaaaacaaagcaattcttgaattatataactgtaaaagtgtgcagttaacaaggctggatgtgaattttattctgagggtgatttgtgatcaagtttaatcacaaatctcttaatatttataaactacctgatgccaggagcttagggctttgcattgtgtctaatacattgatcccagtgttacgggattctcttgattcctggcaccaaaatcagattgttttcacagttatgattcccagtgggagaaaaatgcctcaatatatttgtaaccttaagaagagtatttttttgttaatactaagatgttcaaacttagacatgattaggtcatacattctcaggggttcaaatttccttctaccattcaaatgttttatcaacagcaaacttcagccgtttcactttttgttggagaaaaatagtagattttaatttgactcacagtttgaagcattctgtgatcccctggttactgagttaaaaaataaaaaagtacgagttagacatatgaaatggttatgaacgcttttgtgctgctgatttttaatgctgtaaagttttcctgtgtttagcttgttgaaatgttttgcatctgtcaattaaggaaaaaaaaaatcactctatgttgccccactttagagccctgtgtgccaccctgtgttcctgtgattgcaatgtgagaccgaatgtaatatggaaaacctaccagtggggtgtggttgtgccctgagcacgtgtgtaaaggactggggaggcgtgtcttgaaaaagcaactgcagaaattccttatgatgattgtgtgcaagttagttaacatgaaccttcatttgtaaattttttaaaatttcttttataatatgctttccgcagtcctaactatgctgcgttttataatagctttttcccttctgttctgttcatgtagcacagataagcattgcacttggtaccatgctttacctcatttcaagaaaatatgcttaacagagaggaaaaaaatgtggtttggccttgctgctgttttgatttatggaatttgaaaaagataattataatgcctgcaatgtgtcatatactcgcacaacttaaataggtcatttttgtctgtggcatttttactgtttgtgaaagtatgaaacagatttgttaactgaactcttaattatgtttttaaaatgtttgttatatttcttttcttttttcttttatattacgtgaagtgatgaaatttagaatgacctctaacactcctgtaattgtcttttaaaatactgatatttttatttgttaataatactttgccctcagaaagattctgataccctgccttgacaacatgaaacttgaggctgctttggttcatgaatccaggtgttcccccggcagtcggcttcttcagtcgctccctggaggcaggtgggcactgcagaggatcactggaatccagatcgagcgcagttcatgcacaaggccccgttgatttaaaatattggatcttgctctgttagggtgtctaatccctttacacaagattgaagccaccaaactgagaccttgatacctttttttaactgcatctgaaattatgttaagagtctttaacccatttgcattatctgcagaagagaaactcatgtcatgtttattacctatatggttgttttaattacatttgaataattatatttttccaaccactgattacttttcaggaatttaattatttccagataaatttctttattttatattgtacatgaaaagttttaaagatatgtttaagaccaagactattaaaatgatttttaaagttgttggagacgccaatagcaatatctaggaaatttgcattgagaccattgtattttccactagcagtgaaaatgatttttcacaactaacttgtaaatatattttaatcattacttctttttttctagtccatttttatttggacatcaaccacagacaatttaaattttatagatgcactaagaattcactgcagcagcaggttacatagcaaaaatgcaaaggtgaacaggaagtaaatttctggcttttctgctgtaaatagtgaaggaaaattactaaaatcaagtaaaactaatgcatattatttgattgacaataaaatatttaccatcacatgctgcagctgttttttaaggaacatgatgtcattcattcatacagtaatcatgctgcagaaatttgcagtctgcaccttatggatcacaattacctttagttgttttttttgtaataattgtagccaagtaaatctccaataaagttatcgtctgttca

SEQ ID NO: 437112 - DNA, 9111 bp, Homo sapiens
ggaaactctgaaagaacttagaatcagcattttgagagcagaagcttgggcatgctgtgattttccaataaactgctatcacaatgtcaaaatgcagttcagacaagagcaacacagagatctcaaacattaaaacgtaagctgtgctagaacaaaaatgcaatgaaagaaacactggatgaatgaaaagccctgctttgcaacccctcagcatggcaggcctgcagctcatgacccctgcttcctcaccaatgggtcctttctttggactgccatggcaacaagaagcaattcatgataacatttatacgccaagaaaatatcaggttgaactgcttgaagcagctctggatcataataccatcgtctgtttaaacactggctcagggaagacatttattgctagtactactctactaaagagctgtctctatctagatctaggggagacttcagctagaaatggaaaaaggacggtgttcttggtcaactctgcaaaccaggttgctcaacaagtgtcagctgtcagaactcattcagatctcaaggttggggaatactcaaacctagaagtaaatgcatcttggacaaaagagagatggaaccaagagtttactaagcaccaggttctcattatgacttgctatgtcgccttgaatgttttgaaaaatggttacttatcactgtcagacattaaccttttggtgtttgatgagtgtcatcttgcaatcctagaccacccctatcgagaatttatgaagctctgtgaaatttgtccatcatgtcctcgcattttgggactaactgcttccattttaaatgggaaatgggatccagaggatttggaagaaaagtttcagaaactagagaaaattcttaagagtaatgctgaaactgcaactgacctggtggtcttagacaggtatacttctcagccatgtgagattgtggtggattgtggaccatttactgacagaagtgggctttatgaaagactgctgatggaattagaagaagcacttaattttatcaatgattgtaatatatctgtacattcaaaagaaagagattctactttaatttcgaaacagatactatcagactgtcgtgccgtattggtagttctgggaccctggtgtgcagataaagtagctggaatgatggtaagagaactacagaaatacatcaaacatgagcaagaggagctgcacaggaaatttttattgtttacagacactttcctaaggaaaatacatgcactatgtgaagagcacttctcacctgcctcacttgacctgaaatttgtaactcctaaagtaatcaaactgctcgaaatcttacgcaaatataaaccatatgagcgacacagttttgaaagcgttgagtggtataataatagaaatcaggataattatgtgtcatggagtgattctgaggatgatgatgaggatgaagaaattgaagaaaaagagaagccagagacaaattttccttctccttttaccaacattttgtgcggaattatttttgtggaaagaagatacacagcagttgtcttaaacagattgataaaggaagctggcaaacaagatccagagctggcttatatcagtagcaatttcataactggacatggcattgggaagaatcagcctcgcaacaaacacgatggaagcagaattcagaaaacaggaagaggtacttaggaaatttcgagcacatgagaccaacctgcttattgcaacaagtattgtagaagagggtgttgatataccaaaatgcaacttggtggttcgttttgatttgcccacagaatatcgatcctatgttcaatctaaaggaagagcaagggcacccatctctaattatataatgttagcggatacagacaaaataaaaagttttgaagaagaccttaaaacctacaaagctattgaaaagatcttgagaaacaagtgttccaagtcggttgatactggtgagactgacattgatcctgtcatggatgatgatgacgttttcccaccatatgtgttgaggcctgacgatggtggtccacgagtcacaatcaacacggccattggacacatcaatagatactgtgctagattaccaagtgatccgtttactcatctagctcctaaatgcagaacccgagagttgcctgatggtacattttattcaactctttatctgccaattaactcacctcttcgagcctccattgttggtccaccaatgagctgtgtacgattggctgaaagagttgtagctctcatttgctgtgagaaactgcacaaaattggcgaactggatgaccatttgatgccagttgggaaagagactgttaaatatgaagaggagcttgatttgcatgatgaagaagagaccagtgttccaggaagaccaggttccacgaaacgaaggcagtgctacccaaaagcaattccagagtgtttgagggatagttatcccagacctgatcagccctgttacctgtatgtgataggaatggttttaactacacctttacctgatgaactcaactttagaaggcggaagctctatcctcctgaagataccacaagatgctttggaatactgacggccaaacccatacctcagattccacactttcctgtgtacacacgctctggagaggttaccatatccattgagttgaagaagtctggtttcatgttgtctctacaaatgcttgagttgattacaagacttcaccagtatatattctcacatattcttcggcttgaaaaacctgcactagaatttaaacctacagacgctgattcagcatactgtgttctacctcttaatgttgttaatgactccagcactttggatattgactttaaattcatggaagatattgagaagtctgaagctcgcataggcattcccagtacaaagtatacaaaagaaacaccctttgtttttaaattagaagattaccaagatgccgttatcattccaagatatcgcaattttgatcagcctcatcgattttatgtagctgatgtgtacactgatcttaccccactcagtaaatttccttcccctgagtatgaaacttttgcagaatattataaaacaaagtacaaccttgacctaaccaatctcaaccagccactgctggatgtggaccacacatcttcaagacttaatcttttgacacctcgacatttgaatcagaaggggaaagcgcttcctttaagcagtgctgagaagaggaaagccaaatgggaaagtctgcagaataaacagatactggttccagaactctgtgctatacatccaattccagcatcactgtggagaaaagctgtttgtctccccagcatactttatcgccttcactgccttttgactgcagaggagctaagagcccagactgccagcgatgctggcgtgggagtcagatcacttcctgcggattttagataccctaacttagacttcgggtggaaaaaatctattgacagcaaatctttcatctcaatttctaactcctcttcagctgaaaatgataattactgtaagcacagcacaattgtccctgaaaatgctgcacatcaaggtgctaatagaacctcctctctagaaaatcatgaccaaatgtctgtgaactgcagaacgttgctcagcgagtcccctggtaagctccacgttgaagtttcagcagatcttacagcaattaatggtctttcttacaatcaaaatctcgccaatggcagttatgatttagctaacagagacttttgccaaggaaatcagctaaattactacaagcaggaaatacccgtgcaaccaactacctcatattccattcagaatttatacagttacgagaaccagccccagcccagcgatgaatgtactctcctgagtaataaataccttgatggaaatgctaacaaatctacctcagatggaagtcctgtgatggccgtaatgcctggtacgacagacactattcaagtgctcaagggcaggatggattctgagcagagcccttctattgggtactcctcaaggactcttggccccaatcctggacttattcttcaggctttgactctgtcaaacgctagtgatggatttaacctggagcggcttgaaatgcttggcgactcctttttaaagcatgccatcaccacatatctattttgcacttaccctgatgcgcatgagggccgcctttcatatatgagaagcaaaaaggtcagcaactgtaatctgtatcgccttggaaaaaagaagggactacccagccgcatggtggtgtcaatatttgatccccctgtgaattggcttcctcctggttatgtagtaaatcaagacaaaagcaacacagataaatgggaaaaagatgaaatgacaaaagactgcatgctggcgaatggcaaactggatgaggattacgaggaggaggatgaggaggaggagagcctgatgtggagggctccgaaggaagaggctgactatgaagatgatttcctggagtatgatcaggaacatatcagatttatagataatatgttaatggggtcaggagcttttgtaaagaaaatctctctttctcctttttcaaccactgattctgcatatgaatggaaaatgcccaaaaaatcctccttaggtagtatgccattttcatcagattttgaggattttgactacagctcttgggatgcaatgtgctatctggatcctagcaaagctgttgaagaagatgactttgtggtggggttctggaatccatcagaagaaaactgtggtgttgacacgggaaagcagtccatttcttacgacttgcacactgagcagtgtattgctgacaaaagcatagcggactgtgtggaagccctgctgggctgctatttaaccagctgtggggagagggctgctcagcttttcctctgttcactggggctgaaggtgctcccggtaattaaaaggactgatcgggaaaaggccctgtgccctactcgggagaatttcaacagccaacaaaagaacctttcagtgagctgtgctgctgcttctgtggccagttcacgctcttctgtattgaaagactcggaatatggttgtttgaagattccaccaagatgtatgtttgatcatccagatgcagataaaacactgaatcaccttatatcggggtttgaaaattttgaaaagaaaatcaactacagattcaagaataaggcttaccttctccaggcttttacacatgcctcctaccactacaatactatcactgattgttaccagcgcttagaattcctgggagatgcgattttggactacctcataaccaagcacctttatgaagacccgcggcagcactccccgggggtcctgacagacctgcggtctgccctggtcaacaacaccatctttgcatcgctggctgtaaagtacgactaccacaagtacttcaaagctgtctctcctgagctcttccatgtcattgatgactttgtgcagtttcagcttgagaagaatgaaatgcaaggaatggattctgagcttaggagatctgaggaggatgaagagaaagaagaggatattgaagttccaaaggccatgggggatatttttgagtcgcttgctggtgccatttacatggatagtgggatgtcactggagacagtctggcaggtgtactatcccatgatgcggccactaatagaaaagttttctgcaaatgtaccccgttcccctgtgcgagaattgcttgaaatggaaccagaaactgccaaatttagcccggctgagagaacttacgacgggaaggtcagagtcactgtggaagtagtaggaaaggggaaatttaaaggtgttggtcgaagttacagattttataattgattggttacttatttaagaagcaaaacacagcacctttacccttagtctcctcacataaatttcttactatacttttcataatgttgcatgcatatttcacctaccaaagctgtgctgttaatgccgtgaaagtttaacgtttgcgataaactgccgtaattttgatacatctgtgatttaggtcattaatttagataaactagctcattatttccatctttggaaaaggaaaaaaaaaaaaacttctttaggcatttgcctaagtttctttaattagacttgtaggcactcttcacttaaatacctcagttcttcttttcttttgcatgcatttttcccctgtttggtgctatgtttatgtattatgcttgaaattttaattttttttttttttgcactgtaactataatacctcttaatttacctttttaaaagctgtgggtcagtcttgcactcccatcaacataccagtagaggtttgctgcaatttgccccgttaattatgcttgaagtttaagaaagctgagcagaggtgtctcatatttcccagcacatgattctgaacttgatgcttcatggaatgctgcatttatatgtaagtgacatttgaatactgtccttcctgctttatctgcatcatccacccacagagaaatgcctctgtgcgagtgcaccgacagaaaactgtcagctctgctttctaaggaaccctgagtgaggggggtattaagcttctccagtgttttttgttgtctccaatcttaaacttaaattgagatctaaattattaaacgagtttttgagcaaattaggtgacttgttttaaaaatatttaattccgatttggaaccttagatgtctatttgattttttaaaaaaccttaatgtaagatatgaccagttaaaacaaagcaattcttgaattatataactgtaaaagtgtgcagttaacaaggctggatgtgaattttattctgagggtgatttgtgatcaagtttaatcacaaatctcttaatatttataaactacctgatgccaggagcttagggctttgcattgtgtctaatacattgatcccagtgttacgggattctcttgattcctggcaccaaaatcagattgttttcacagttatgattcccagtgggagaaaaatgcctcaatatatttgtaaccttaagaagagtatttttttgttaatactaagatgttcaaacttagacatgattaggtcatacattctcaggggttcaaatttccttctaccattcaaatgttttatcaacagcaaacttcagccgtttcactttttgttggagaaaaatagtagattttaatttgactcacagtttgaagcattctgtgatcccctggttactgagttaaaaaataaaaaagtacgagttagacatatgaaatggttatgaacgcttttgtgctgctgatttttaatgctgtaaagttttcctgtgtttagcttgttgaaatgttttgcatctgtcaattaaggaaaaaaaaaatcactctatgttgccccactttagagccctgtgtgccaccctgtgttcctgtgattgcaatgtgagaccgaatgtaatatggaaaacctaccagtggggtgtggttgtgccctgagcacgtgtgtaaaggactggggaggcgtgtcttgaaaaagcaactgcagaaattccttatgatgattgtgtgcaagttagttaacatgaaccttcatttgtaaattttttaaaatttcttttataatatgctttccgcagtcctaactatgctgcgttttataatagctttttcccttctgttctgttcatgtagcacagataagcattgcacttggtaccatgctttacctcatttcaagaaaatatgcttaacagagaggaaaaaaatgtggtttggccttgctgctgttttgatttatggaatttgaaaaagataattataatgcctgcaatgtgtcatatactcgcacaacttaaataggtcatttttgtctgtggcatttttactgtttgtgaaagtatgaaacagatttgttaactgaactcttaattatgtttttaaaatgtttgttatatttcttttcttttttcttttatattacgtgaagtgatgaaatttagaatgacctctaacactcctgtaattgtcttttaaaatactgatatttttatttgttaataatactttgccctcagaaagattctgataccctgccttgacaacatgaaacttgaggctgctttggttcatgaatccaggtgttcccccggcagtcggcttcttcagtcgctccctggaggcaggtgggcactgcagaggatcactggaatccagatcgagcgcagttcatgcacaaggccccgttgatttaaaatattggatcttgctctgttagggtgtctaatccctttacacaagattgaagccaccaaactgagaccttgatacctttttttaactgcatctgaaattatgttaagagtctttaacccatttgcattatctgcagaagagaaactcatgtcatgtttattacctatatggttgttttaattacatttgaataattatatttttccaaccactgattacttttcaggaatttaattatttccagataaatttctttattttatattgtacatgaaaagttttaaagatatgtttaagaccaagactattaaaatgatttttaaagttgttggagacgccaatagcaatatctaggaaatttgcattgagaccattgtattttccactagcagtgaaaatgatttttcacaactaacttgtaaatatattttaatcattacttctttttttctagtccatttttatttggacatcaaccacagacaatttaaattttatagatgcactaagaattcactgcagcagcaggttacatagcaaaaatgcaaaggtgaacaggaagtaaatttctggcttttctgctgtaaatagtgaaggaaaattactaaaatcaagtaaaactaatgcatattatttgattgacaataaaatatttaccatcacatgctgcagctgttttttaaggaacatgatgtcattcattcatacagtaatcatgctgcagaaatttgcagtctgcaccttatggatcacaattacctttagttgttttttttgtaataattgtagccaagtaaatctccaataaagttatcgtctgttca

SEQ ID NO: 437113 - DNA, 4040 bp, Homo sapiens
ttaaatgctttacactctggcgtggaccctaaagaaataaggttccaaagagccaatctctcttgataaccctgattatggttacaaggataccaaaccttccaattccagatctggacaaagtgtatagccaatataagacaattatgagaactgccagtgattccaaatgcagtttcccactaagtcttttgtatgagatcatctcctgcagtagttgataagctgaatagaaagataaggttttcgagaggagaagtgcgccaatgttgtcttttctttccacgttatactgtgtaaggtgatgttcccggtcgctgttgcacctgatagtaagggacagatttttaatgaacattggctggcatgttggtgaatcacattttagttttctgatgccacatagtcttgcataaaaaagggttcttgccttaaaagtgaaaccttcatggatagtctttaatctctgatctttttggaacaaactgttttacattcctttcattttattatgcattagacgttgagacagcgtgatacttacaactcactagtatagttgtaacttattacaggatcatactaaaatttctgtcatatgtatactgaagacattttaaaaaccagaatatgtagtctacggatattttttatcataaaaatgatctttggctaaacaccccattttactaaagtcctcctgccaggtagttcccactgatggaaatgtttatggcaaataattttgccttctaggctgttgctctaacaaaataaaccttagacatatcacacctaaaatatgctgcagattttataattgattggttacttatttaagaagcaaaacacagcacctttacccttagtctcctcacataaatttcttactatacttttcataatgttgcatgcatatttcacctaccaaagctgtgctgttaatgccgtgaaagtttaacgtttgcgataaactgccgtaattttgatacatctgtgatttaggtcattaatttagataaactagctcattatttccatctttggaaaaggaaaaaaaaaaaaacttctttaggcatttgcctaagtttctttaattagacttgtaggcactcttcacttaaatacctcagttcttcttttcttttgcatgcatttttcccctgtttggtgctatgtttatgtattatgcttgaaattttaattttttttttttttgcactgtaactataatacctcttaatttacctttttaaaagctgtgggtcagtcttgcactcccatcaacataccagtagaggtttgctgcaatttgccccgttaattatgcttgaagtttaagaaagctgagcagaggtgtctcatatttcccagcacatgattctgaacttgatgcttcatggaatgctgcatttatatgtaagtgacatttgaatactgtccttcctgctttatctgcatcatccacccacagagaaatgcctctgtgcgagtgcaccgacagaaaactgtcagctctgctttctaaggaaccctgagtgaggggggtattaagcttctccagtgttttttgttgtctccaatcttaaacttaaattgagatctaaattattaaacgagtttttgagcaaattaggtgacttgttttaaaaatatttaattccgatttggaaccttagatgtctatttgattttttaaaaaaccttaatgtaagatatgaccagttaaaacaaagcaattcttgaattatataactgtaaaagtgtgcagttaacaaggctggatgtgaattttattctgagggtgatttgtgatcaagtttaatcacaaatctcttaatatttataaactacctgatgccaggagcttagggctttgcattgtgtctaatacattgatcccagtgttacgggattctcttgattcctggcaccaaaatcagattgttttcacagttatgattcccagtgggagaaaaatgcctcaatatatttgtaaccttaagaagagtatttttttgttaatactaagatgttcaaacttagacatgattaggtcatacattctcaggggttcaaatttccttctaccattcaaatgttttatcaacagcaaacttcagccgtttcactttttgttggagaaaaatagtagattttaatttgactcacagtttgaagcattctgtgatcccctggttactgagttaaaaaataaaaaagtacgagttagacatatgaaatggttatgaacgcttttgtgctgctgatttttaatgctgtaaagttttcctgtgtttagcttgttgaaatgttttgcatctgtcaattaaggaaaaaaaaaatcactctatgttgccccactttagagccctgtgtgccaccctgtgttcctgtgattgcaatgtgagaccgaatgtaatatggaaaacctaccagtggggtgtggttgtgccctgagcacgtgtgtaaaggactggggaggcgtgtcttgaaaaagcaactgcagaaattccttatgatgattgtgtgcaagttagttaacatgaaccttcatttgtaaattttttaaaatttcttttataatatgctttccgcagtcctaactatgctgcgttttataatagctttttcccttctgttctgttcatgtagcacagataagcattgcacttggtaccatgctttacctcatttcaagaaaatatgcttaacagagaggaaaaaaatgtggtttggccttgctgctgttttgatttatggaatttgaaaaagataattataatgcctgcaatgtgtcatatactcgcacaacttaaataggtcatttttgtctgtggcatttttactgtttgtgaaagtatgaaacagatttgttaactgaactcttaattatgtttttaaaatgtttgttatatttcttttcttttttcttttatattacgtgaagtgatgaaatttagaatgacctctaacactcctgtaattgtcttttaaaatactgatatttttatttgttaataatactttgccctcagaaagattctgataccctgccttgacaacatgaaacttgaggctgctttggttcatgaatccaggtgttcccccggcagtcggcttcttcagtcgctccctggaggcaggtgggcactgcagaggatcactggaatccagatcgagcgcagttcatgcacaaggccccgttgatttaaaatattggatcttgctctgttagggtgtctaatccctttacacaagattgaagccaccaaactgagaccttgatacctttttttaactgcatctgaaattatgttaagagtctttaacccatttgcattatctgcagaagagaaactcatgtcatgtttattacctatatggttgttttaattacatttgaataattatatttttccaaccactgattacttttcaggaatttaattatttccagataaatttctttattttatattgtacatgaaaagttttaaagatatgtttaagaccaagactattaaaatgatttttaaagttgttggagacgccaatagcaatatctaggaaatttgcattgagaccattgtattttccactagcagtgaaaatgatttttcacaactaacttgtaaatatattttaatcattacttctttttttctagtccatttttatttggacatcaaccacagacaatttaaattttatagatgcactaagaattcactgcagcagcaggttacatagcaaaaatgcaaaggtgaacaggaagtaaatttctggcttttctgctgtaaatagtgaaggaaaattactaaaatcaagtaaaactaatgcatattatttgattgacaataaaatatttaccatcacatgctgcagctgttttttaaggaacatgatgtcattcattcatacagtaatcatgctgcagaaatttgcagtctgcaccttatggatcacaattacctttagttgttttttttgtaataattgtagccaagtaaatctccaataaagttatcgtctgttca

SEQ ID NO: 437114 - DNA, 3505 bp, Homo sapiens
taatgagctagtttatctaaattaatgacctaaattacaggatcatactaaaatttctgtcatatgtatactgaagacattttaaaaaccagaatatgtagtctacggatattttttatcataaaaatgatctttggctaaacaccccattttactaaagtcctcctgccaggtagttcccactgatggaaatgtttatggcaaataattttgccttctaggctgttgctctaacaaaataaaccttagacatatcacacctaaaatatgctgcagattttataattgattggttacttatttaagaagcaaaacacagcacctttacccttagtctcctcacataaatttcttactatacttttcataatgttgcatgcatatttcacctaccaaagctgtgctgttaatgccgtgaaagtttaacgtttgcgataaactgccgtaattttgatacatctgtgatttaggtcattaatttagataaactagctcattatttccatctttggaaaaggaaaaaaaaaaaaacttctttaggcatttgcctaagtttctttaattagacttgtaggcactcttcacttaaatacctcagttcttcttttcttttgcatgcatttttcccctgtttggtgctatgtttatgtattatgcttgaaattttaattttttttttttttgcactgtaactataatacctcttaatttacctttttaaaagctgtgggtcagtcttgcactcccatcaacataccagtagaggtttgctgcaatttgccccgttaattatgcttgaagtttaagaaagctgagcagaggtgtctcatatttcccagcacatgattctgaacttgatgcttcatggaatgctgcatttatatgtaagtgacatttgaatactgtccttcctgctttatctgcatcatccacccacagagaaatgcctctgtgcgagtgcaccgacagaaaactgtcagctctgctttctaaggaaccctgagtgaggggggtattaagcttctccagtgttttttgttgtctccaatcttaaacttaaattgagatctaaattattaaacgagtttttgagcaaattaggtgacttgttttaaaaatatttaattccgatttggaaccttagatgtctatttgattttttaaaaaaccttaatgtaagatatgaccagttaaaacaaagcaattcttgaattatataactgtaaaagtgtgcagttaacaaggctggatgtgaattttattctgagggtgatttgtgatcaagtttaatcacaaatctcttaatatttataaactacctgatgccaggagcttagggctttgcattgtgtctaatacattgatcccagtgttacgggattctcttgattcctggcaccaaaatcagattgttttcacagttatgattcccagtgggagaaaaatgcctcaatatatttgtaaccttaagaagagtatttttttgttaatactaagatgttcaaacttagacatgattaggtcatacattctcaggggttcaaatttccttctaccattcaaatgttttatcaacagcaaacttcagccgtttcactttttgttggagaaaaatagtagattttaatttgactcacagtttgaagcattctgtgatcccctggttactgagttaaaaaataaaaaagtacgagttagacatatgaaatggttatgaacgcttttgtgctgctgatttttaatgctgtaaagttttcctgtgtttagcttgttgaaatgttttgcatctgtcaattaaggaaaaaaaaaatcactctatgttgccccactttagagccctgtgtgccaccctgtgttcctgtgattgcaatgtgagaccgaatgtaatatggaaaacctaccagtggggtgtggttgtgccctgagcacgtgtgtaaaggactggggaggcgtgtcttgaaaaagcaactgcagaaattccttatgatgattgtgtgcaagttagttaacatgaaccttcatttgtaaattttttaaaatttcttttataatatgctttccgcagtcctaactatgctgcgttttataatagctttttcccttctgttctgttcatgtagcacagataagcattgcacttggtaccatgctttacctcatttcaagaaaatatgcttaacagagaggaaaaaaatgtggtttggccttgctgctgttttgatttatggaatttgaaaaagataattataatgcctgcaatgtgtcatatactcgcacaacttaaataggtcatttttgtctgtggcatttttactgtttgtgaaagtatgaaacagatttgttaactgaactcttaattatgtttttaaaatgtttgttatatttcttttcttttttcttttatattacgtgaagtgatgaaatttagaatgacctctaacactcctgtaattgtcttttaaaatactgatatttttatttgttaataatactttgccctcagaaagattctgataccctgccttgacaacatgaaacttgaggctgctttggttcatgaatccaggtgttcccccggcagtcggcttcttcagtcgctccctggaggcaggtgggcactgcagaggatcactggaatccagatcgagcgcagttcatgcacaaggccccgttgatttaaaatattggatcttgctctgttagggtgtctaatccctttacacaagattgaagccaccaaactgagaccttgatacctttttttaactgcatctgaaattatgttaagagtctttaacccatttgcattatctgcagaagagaaactcatgtcatgtttattacctatatggttgttttaattacatttgaataattatatttttccaaccactgattacttttcaggaatttaattatttccagataaatttctttattttatattgtacatgaaaagttttaaagatatgtttaagaccaagactattaaaatgatttttaaagttgttggagacgccaatagcaatatctaggaaatttgcattgagaccattgtattttccactagcagtgaaaatgatttttcacaactaacttgtaaatatattttaatcattacttctttttttctagtccatttttatttggacatcaaccacagacaatttaaattttatagatgcactaagaattcactgcagcagcaggttacatagcaaaaatgcaaaggtgaacaggaagtaaatttctggcttttctgctgtaaatagtgaaggaaaattactaaaatcaagtaaaactaatgcatattatttgattgacaataaaatatttaccatcacatgctgcagctgttttttaaggaacatgatgtcattcattcatacagtaatcatgctgcagaaatttgcagtctgcaccttatggatcacaattacctttagttgttttttttgtaataattgtagccaagtaaatctccaataaagttatcgtctgttca

SEQ ID NO: 437115 - DNA, 1902 bp, Homo sapiens
gaaaaaggtggttctcttcccaaagtggaagccaaattcatcaattatgtgaagaattgcttccggatgactgaccaagaggctattcaagatctctggcagtggaggaagtctctttaagaaaatagtttaaacaattttttaacaaattttcctgtgtttagcttgttgaaatgttttgcatctgtcaattaaggaaaaaaaaaatcactctatgttgccccactttagagccctgtgtgccaccctgtgttcctgtgattgcaatgtgagaccgaatgtaatatggaaaacctaccagtggggtgtggttgtgccctgagcacgtgtgtaaaggactggggaggcgtgtcttgaaaaagcaactgcagaaattccttatgatgattgtgtgcaagttagttaacatgaaccttcatttgtaaattttttaaaatttcttttataatatgctttccgcagtcctaactatgctgcgttttataatagctttttcccttctgttctgttcatgtagcacagataagcattgcacttggtaccatgctttacctcatttcaagaaaatatgcttaacagagaggaaaaaaatgtggtttggccttgctgctgttttgatttatggaatttgaaaaagataattataatgcctgcaatgtgtcatatactcgcacaacttaaataggtcatttttgtctgtggcatttttactgtttgtgaaagtatgaaacagatttgttaactgaactcttaattatgtttttaaaatgtttgttatatttcttttcttttttcttttatattacgtgaagtgatgaaatttagaatgacctctaacactcctgtaattgtcttttaaaatactgatatttttatttgttaataatactttgccctcagaaagattctgataccctgccttgacaacatgaaacttgaggctgctttggttcatgaatccaggtgttcccccggcagtcggcttcttcagtcgctccctggaggcaggtgggcactgcagaggatcactggaatccagatcgagcgcagttcatgcacaaggccccgttgatttaaaatattggatcttgctctgttagggtgtctaatccctttacacaagattgaagccaccaaactgagaccttgatacctttttttaactgcatctgaaattatgttaagagtctttaacccatttgcattatctgcagaagagaaactcatgtcatgtttattacctatatggttgttttaattacatttgaataattatatttttccaaccactgattacttttcaggaatttaattatttccagataaatttctttattttatattgtacatgaaaagttttaaagatatgtttaagaccaagactattaaaatgatttttaaagttgttggagacgccaatagcaatatctaggaaatttgcattgagaccattgtattttccactagcagtgaaaatgatttttcacaactaacttgtaaatatattttaatcattacttctttttttctagtccatttttatttggacatcaaccacagacaatttaaattttatagatgcactaagaattcactgcagcagcaggttacatagcaaaaatgcaaaggtgaacaggaagtaaatttctggcttttctgctgtaaatagtgaaggaaaattactaaaatcaagtaaaactaatgcatattatttgattgacaataaaatatttaccatcacatgctgcagctgttttttaaggaacatgatgtcattcattcatacagtaatcatgctgcagaaatttgcagtctgcaccttatggatcacaattacctttagttgttttttttgtaataattgtagccaagtaaatctccaataaagttatcgtctgttca

SEQ ID NO: 437116 - DNA, 5768 bp, Homo sapiens
ggaaactctgaaagaacttagaatcagcattttgagagcagaagcttgggcatgctgtgattttccaataaactgctatcacaatgtcaaaatgcagttcagacaagagcaacacagagatctcaaacattaaaacgtaagctgtgctagaacaaaaatgcaatgaaagaaacactggatgaatgaaaagccctgctttgcaacccctcagcatggcaggcctgcagctcatgacccctgcttcctcaccaatgggtcctttctttggactgccatggcaacaagaagcaattcatgataacatttatacgccaagaaaatatcaggttgaactgcttgaagcagctctggatcataataccatcgtctgtttaaacactggctcagggaagacatttattgctagtactactctactaaagagctgtctctatctagatctaggggagacttcagctagaaatggaaaaaggacggtgttcttggtcaactctgcaaaccaggttgctcaacaagtgtcagctgtcagaactcattcagatctcaaggttggggaatactcaaacctagaagtaaatgcatcttggacaaaagagagatggaaccaagagtttactaagcaccaggttctcattatgacttgctatgtcgccttgaatgttttgaaaaatggttacttatcactgtcagacattaaccttttggtgtttgatgagtgtcatcttgcaatcctagaccacccctatcgagaatttatgaagctctgtgaaatttgtccatcatgtcctcgcattttgggactaactgcttccattttaaatgggaaatgggatccagaggatttggaagaaaagtttcagaaactagagaaaattcttaagagtaatgctgaaactgcaactgacctggtggtcttagacaggtatacttctcagccatgtgagattgtggtggattgtggaccatttactgacagaagtgggctttatgaaagactgctgatggaattagaagaagcacttaattttatcaatgattgtaatatatctgtacattcaaaagaaagagattctactttaatttcgaaacagatactatcagactgtcgtgccgtattggtagttctgggaccctggtgtgcagataaagtagctggaatgatggtaagagaactacagaaatacatcaaacatgagcaagaggagctgcacaggaaatttttattgtttacagacactttcctaaggaaaatacatgcactatgtgaagagcacttctcacctgcctcacttgacctgaaatttgtaactcctaaagtaatcaaactgctcgaaatcttacgcaaatataaaccatatgagcgacacagttttgaaagcgttgagtggtataataatagaaatcaggataattatgtgtcatggagtgattctgaggatgatgatgaggatgaagaaattgaagaaaaagagaagccagagacaaattttccttctccttttaccaacattttgtgcggaattatttttgtggaaagaagatacacagcagttgtcttaaacagattgataaaggaagctggcaaacaagatccagagctggcttatatcagtagcaatttcataactggacatggcattgggaagaatcagcctcgcaacaaacacgatggaagcagaattcagaaaacaggaagaggtacttaggaaatttcgagcacatgagaccaacctgcttattgcaacaagtattgtagaagagggtgttgatataccaaaatgcaacttggtggttcgttttgatttgcccacagaatatcgatcctatgttcaatctaaaggaagagcaagggcacccatctctaattatataatgttagcggatacagacaaaataaaaagttttgaagaagaccttaaaacctacaaagctattgaaaagatcttgagaaacaagtgttccaagtcggttgatactggtgagactgacattgatcctgtcatggatgatgatgacgttttcccaccatatgtgttgaggcctgacgatggtggtccacgagtcacaatcaacacggccattggacacatcaatagatactgtgctagattaccaagtgatccgtttactcatctagctcctaaatgcagaacccgagagttgcctgatggtacattttattcaactctttatctgccaattaactcacctcttcgagcctccattgttggtccaccaatgagctgtgtacgattggctgaaagagttgtagctctcatttgctgtgagaaactgcacaaaattggcgaactggatgaccatttgatgccagttgggaaagagactgttaaatatgaagaggagcttgatttgcatgatgaagaagagaccagtgttccaggaagaccaggttccacgaaacgaaggcagtgctacccaaaagcaattccagagtgtttgagggatagttatcccagacctgatcagccctgttacctgtatgtgataggaatggttttaactacacctttacctgatgaactcaactttagaaggcggaagctctatcctcctgaagataccacaagatgctttggaatactgacggccaaacccatacctcagattccacactttcctgtgtacacacgctctggagaggttaccatatccattgagttgaagaagtctggtttcatgttgtctctacaaatgcttgagttgattacaagacttcaccagtatatattctcacatattcttcggcttgaaaaacctgcactagaatttaaacctacagacgctgattcagcatactgtgttctacctcttaatgttgttaatgactccagcactttggatattgactttaaattcatggaagatattgagaagtctgaagctcgcataggcattcccagtacaaagtatacaaaagaaacaccctttgtttttaaattagaagattaccaagatgccgttatcattccaagatatcgcaattttgatcagcctcatcgattttatgtagctgatgtgtacactgatcttaccccactcagtaaatttccttcccctgagtatgaaacttttgcagaatattataaaacaaagtacaaccttgacctaaccaatctcaaccagccactgctggatgtggaccacacatcttcaagacttaatcttttgacacctcgacatttgaatcagaaggggaaagcgcttcctttaagcagtgctgagaagaggaaagccaaatgggaaagtctgcagaataaacagatactggttccagaactctgtgctatacatccaattccagcatcactgtggagaaaagctgtttgtctccccagcatactttatcgccttcactgccttttgactgcagaggagctaagagcccagactgccagcgatgctggcgtgggagtcagatcacttcctgcggattttagataccctaacttagacttcgggtggaaaaaatctattgacagcaaatctttcatctcaatttctaactcctcttcagctgaaaatgataattactgtaagcacagcacaattgtccctgaaaatgctgcacatcaaggtgctaatagaacctcctctctagaaaatcatgaccaaatgtctgtgaactgcagaacgttgctcagcgagtcccctggtaagctccacgttgaagtttcagcagatcttacagcaattaatggtctttcttacaatcaaaatctcgccaatggcagttatgatttagctaacagagacttttgccaaggaaatcagctaaattactacaagcaggaaatacccgtgcaaccaactacctcatattccattcagaatttatacagttacgagaaccagccccagcccagcgatgaatgtactctcctgagtaataaataccttgatggaaatgctaacaaatctacctcagatggaagtcctgtgatggccgtaatgcctggtacgacagacactattcaagtgctcaagggcaggatggattctgagcagagcccttctattgggtactcctcaaggactcttggccccaatcctggacttattcttcaggctttgactctgtcaaacgctagtgatggatttaacctggagcggcttgaaatgcttggcgactcctttttaaagcatgccatcaccacatatctattttgcacttaccctgatgcgcatgagggccgcctttcatatatgagaagcaaaaaggtcagcaactgtaatctgtatcgccttggaaaaaagaagggactacccagccgcatggtggtgtcaatatttgatccccctgtgaattggcttcctcctggttatgtagtaaatcaagacaaaagcaacacagataaatgggaaaaagatgaaatgacaaaagactgcatgctggcgaatggcaaactggatgaggattacgaggaggaggatgaggaggaggagagcctgatgtggagggctccgaaggaagaggctgactatgaagatgatttcctggagtatgatcaggaacatatcagatttatagataatatgttaatggggtcaggagcttttgtaaagaaaatctctctttctcctttttcaaccactgattctgcatatgaatggaaaatgcccaaaaaatcctccttaggtagtatgccattttcatcagattttgaggattttgactacagctcttgggatgcaatgtgctatctggatcctagcaaagctgttgaagaagatgactttgtggtggggttctggaatccatcagaagaaaactgtggtgttgacacgggaaagcagtccatttcttacgacttgcacactgagcagtgtattgctgacaaaagcatagcggactgtgtggaagccctgctgggctgctatttaaccagctgtggggagagggctgctcagcttttcctctgttcactggggctgaaggtgctcccggtaattaaaaggactgatcgggaaaaggccctgtgccctactcgggagaatttcaacagccaacaaaagaacctttcagtgagctgtgctgctgcttctgtggccagttcacgctcttctgtattgaaagactcggaatatggttgtttgaagattccaccaagatgtatgtttgatcatccagatgcagataaaacactgaatcaccttatatcggggtttgaaaattttgaaaagaaaatcaactacagattcaagaataaggcttaccttctccaggcttttacacatgcctcctaccactacaatactatcactggtaaggagcccacgaccagacttcatttctgggaaaatgagactttgtgttgatctcatcgtgttggccttgtaaaagtgatctatgcatgtacagtgttcatgcttaatattcaagggatggggcggggaacaaaaggaatagaaagaattcttttccttgttatttggggagcacgtattgctttataactttggttgttgggagtatggctatcatataccctcatcagtgtcattttatatctgcctaattagagaaattttaaccttagtattttgatgtgttttccccattttatcctccgcaaatatctttctcttgcccattcagtgctgcttttggtttttgatttagttgtatattctggatgtatttccacagccttttattgttcttcctggacaaaaagacccctcctttagggtctttttaaagatggatagattaaaagattaaaagcaatgatttcacaagaaaaaaa

SEQ ID NO: 437117 - DNA, 1622 bp, Homo sapiens
ggaaactctgaaagaacttagaatcagcattttgagagcagaagcttgggcatgctgtgattttccaataaactgctatcacaatgtcaaaatgcagttcagacaagagcaacacagagatctcaaacattaaaacgtaagctgtgctagaacaaaaatgcaatgaaagaaacactggatgaatgaaaagccctgctttgcaacccctcagcatggcaggcctgcagctcatgacccctgcttcctcaccaatgggtcctttctttggactgccatggcaacaagaagcaattcatgataacatttatacgccaagaaaatatcaggttgaactgcttgaagcagctctggatcataataccatcgtctgtttaaacactggctcagggaagacatttattgctagtactactctactaaagagctgtctctatctagatctaggggagacttcagctagaaatggaaaaaggacggtgttcttggtcaactctgcaaaccaggttgctcaacaagtgtcagctgtcagaactcattcagatctcaaggttggggaatactcaaacctagaagtaaatgcatcttggacaaaagagagatggaaccaagagtttactaagcaccaggttctcattatgacttgctatgtcgccttgaatgttttgaaaaatggttacttatcactgtcagacattaaccttttggtgtttgatgagtgtcatcttgcaatcctagaccacccctatcgagaatttatgaagctctgtgaaatttgtccatcatgtcctcgcattttgggactaactgcttccattttaaatgggaaatgggatccagaggatttggaagaaaagtttcagaaactagagaaaattcttaagagtaatgctgaaactgcaactgacctggtggtcttagacaggtatacttctcagccatgtgagattgtggtggattgtggaccatttactgacagaagtgggctttatgaaagactgctgatggaattagaagaagcacttaattttatcaatgattgtaatatatctgtacattcaaaagaaagagattctactttaatttcgaaacagatactatcagactgtcgtgccgtattggtagttctgggaccctggtgtgcagataaagtagctggaatgatggtaagagaactacagaaatacatcaaacatgagcaagaggagctgcacaggaaatttttattgtttacagacactttcctaaggaaaatacatgcactatgtgaagagcacttctcacctgcctcacttgacctgaaatttgtaactcctaaagtaatcaaactgctcgaaatcttacgcaaatataaaccatatgagcgacacagttttgaaagcgttgagtggtataataatagaaatcaggataattatgtgtcatggagtgattctgaggatgatgatgaggatgaagaaattgaagaaaaagagaagccagagacaaattttccttctccttttaccaacattttgtgcggaattatttttgtggaaagaagatacacagcagttgtcttaaacagattgataaaggtagctggcaaacaagatcctggaagacagataacagttacgatcact

SEQ ID NO: 437118 - DNA, 586 bp, Homo sapiens
tagtactattgaatgcttgccaagcagctagggagtagaactgttttaaagtatagttctttgattacgagtgaatttgaatttttttcatacttttattgactatttctaattctttgttaaggttgtttaaagttagaagtaatcttttttctttgctgggtatatagaataataaatggggtggggatattttttctttttttcttgagaagtttgaaaaacttttttaaaaatataacatttgttttactattacaatatagtaggcataccataaatggtatttccccccttactaaagaagtaacaaaagtcatatatccaagaaaagaaactacatctgtggactgcctgtaaaagtggcctttttgcttacaagtcacttttccctctgtaatagcttaggagatctgaggaggatgaagagaaagaagaggatattgaagttccaaaggccatgggggatatttttgagtcgcttgctggtgccatttacatggatagtgggatgtcactggagacagtctggcaggtgtactatcccatgatgcggccactaataggtattgttggctccctttag

SEQ ID NO: 437119 - DNA, 349 bp, Homo sapiens
tattctcatcagcttttagtaaagccagaattaatttgttttcttgctgacatctggaaaagaggctaatatgcttgagcatgacgcttaattttcctttccaactctagattccagagtgtttgagggatagttatcccagacctgatcagccctgttacctgtatgtgataggaatggttttaactacacctttacctgatgaactcaactttagaaggcggaagctctatcctcctgaagataccacaagatgctttggaatactgacggccaaacccatacctcaggtaggtatttcataatgagtacttatgtcaaaaacgtcttgcttaggaaaaggaaaaaa

SEQ ID NO: 437120 - DNA, 494 bp, Homo sapiens
aacttccaaatgtgtataattttcttagattgataaaggaagctggcaaacaagatccagagctggcttatatcagtagcaatttcataactggacatggcattgggaagaatcagcctcgcaacaaacacgatggaagcagaattcagaaaacaggaagaggtaacttaaatcaaaataagtgtacaataacagttttcgggacatatacagacaaagtgcccatagggtctcccttttttcatagtttcccagaattactattattttttgtattatagaatacttcttcatatattagaccagctgtccccatgaggtagctgtagagtgatttgtatgctcagaattagaatagctatctggcaaaccaattttgtgtcttaattgccatcaaccaacttattttctgtgattggattgatgttacacaactgcatttcatggaaagacaaagcatgtatgaccttaactcttgtacattccatatgact

SEQ ID NO: 437121 - DNA, 10409 bp, Homo sapiens
ggaaactctgaaagaacttagaatcagcattttgagagcagaagcttgggcatgctgtgattttccaataaactgctatcacaatgtcaaaatgcagttcagacaagagcaacacagagatctcaaacattaaaacgtaagctgtgctagaacaaaaatgcaatgaaagaaacactggatgaatgaaaagccctgctttgcaacccctcagcatggcaggcctgcagctcatgacccctgcttcctcaccaatgggtcctttctttggactgccatggcaacaagaagcaattcatgataacatttatacgccaagaaaatatcaggttgaactgcttgaagcagctctggatcataataccatcgtctgtttaaacactggctcagggaagacatttattgctagtactactctactaaagagctgtctctatctagatctaggggagacttcagctagaaatggaaaaaggacggtgttcttggtcaactctgcaaaccaggttgctcaacaagtgtcagctgtcagaactcattcagatctcaaggttggggaatactcaaacctagaagtaaatgcatcttggacaaaagagagatggaaccaagagtttactaagcaccaggttctcattatgacttgctatgtcgccttgaatgttttgaaaaatggttacttatcactgtcagacattaaccttttggtgtttgatgagtgtcatcttgcaatcctagaccacccctatcgagaatttatgaagctctgtgaaatttgtccatcatgtcctcgcattttgggactaactgcttccattttaaatgggaaatgggatccagaggatttggaagaaaagtttcagaaactagagaaaattcttaagagtaatgctgaaactgcaactgacctggtggtcttagacaggtatacttctcagccatgtgagattgtggtggattgtggaccatttactgacagaagtgggctttatgaaagactgctgatggaattagaagaagcacttaattttatcaatgattgtaatatatctgtacattcaaaagaaagagattctactttaatttcgaaacagatactatcagactgtcgtgccgtattggtagttctgggaccctggtgtgcagataaagtagctggaatgatggtaagagaactacagaaatacatcaaacatgagcaagaggagctgcacaggaaatttttattgtttacagacactttcctaaggaaaatacatgcactatgtgaagagcacttctcacctgcctcacttgacctgaaatttgtaactcctaaagtaatcaaactgctcgaaatcttacgcaaatataaaccatatgagcgacacagttttgaaagcgttgagtggtataataatagaaatcaggataattatgtgtcatggagtgattctgaggatgatgatgaggatgaagaaattgaagaaaaagagaagccagagacaaattttccttctccttttaccaacattttgtgcggaattatttttgtggaaagaagatacacagcagttgtcttaaacagattgataaaggaagctggcaaacaagatccagagctggcttatatcagtagcaatttcataactggacatggcattgggaagaatcagcctcgcaacaaacacgatggaagcagaattcagaaaacaggaagaggtacttaggaaatttcgagcacatgagaccaacctgcttattgcaacaagtattgtagaagagggtgttgatataccaaaatgcaacttggtggttcgttttgatttgcccacagaatatcgatcctatgttcaatctaaaggaagagcaagggcacccatctctaattatataatgttagcggatacagacaaaataaaaagttttgaagaagaccttaaaacctacaaagctattgaaaagatcttgagaaacaagtgttccaagtcggttgatactggtgagactgacattgatcctgtcatggatgatgatgacgttttcccaccatatgtgttgaggcctgacgatggtggtccacgagtcacaatcaacacggccattggacacatcaatagatactgtgctagattaccaagtgatccgtttactcatctagctcctaaatgcagaacccgagagttgcctgatggtacattttattcaactctttatctgccaattaactcacctcttcgagcctccattgttggtccaccaatgagctgtgtacgattggctgaaagagttgtagctctcatttgctgtgagaaactgcacaaaattggcgaactggatgaccatttgatgccagttgggaaagagactgttaaatatgaagaggagcttgatttgcatgatgaagaagagaccagtgttccaggaagaccaggttccacgaaacgaaggcagtgctacccaaaagcaattccagagtgtttgagggatagttatcccagacctgatcagccctgttacctgtatgtgataggaatggttttaactacacctttacctgatgaactcaactttagaaggcggaagctctatcctcctgaagataccacaagatgctttggaatactgacggccaaacccatacctcagattccacactttcctgtgtacacacgctctggagaggttaccatatccattgagttgaagaagtctggtttcatgttgtctctacaaatgcttgagttgattacaagacttcaccagtatatattctcacatattcttcggcttgaaaaacctgcactagaatttaaacctacagacgctgattcagcatactgtgttctacctcttaatgttgttaatgactccagcactttggatattgactttaaattcatggaagatattgagaagtctgaagctcgcataggcattcccagtacaaagtatacaaaagaaacaccctttgtttttaaattagaagattaccaagatgccgttatcattccaagatatcgcaattttgatcagcctcatcgattttatgtagctgatgtgtacactgatcttaccccactcagtaaatttccttcccctgagtatgaaacttttgcagaatattataaaacaaagtacaaccttgacctaaccaatctcaaccagccactgctggatgtggaccacacatcttcaagacttaatcttttgacacctcgacatttgaatcagaaggggaaagcgcttcctttaagcagtgctgagaagaggaaagccaaatgggaaagtctgcagaataaacagatactggttccagaactctgtgctatacatccaattccagcatcactgtggagaaaagctgtttgtctccccagcatactttatcgccttcactgccttttgactgcagaggagctaagagcccagactgccagcgatgctggcgtgggagtcagatcacttcctgcggattttagataccctaacttagacttcgggtggaaaaaatctattgacagcaaatctttcatctcaatttctaactcctcttcagctgaaaatgataattactgtaagcacagcacaattgtccctgaaaatgctgcacatcaaggtgctaatagaacctcctctctagaaaatcatgaccaaatgtctgtgaactgcagaacgttgctcagcgagtcccctggtaagctccacgttgaagtttcagcagatcttacagcaattaatggtctttcttacaatcaaaatctcgccaatggcagttatgatttagctaacagagacttttgccaaggaaatcagctaaattactacaagcaggaaatacccgtgcaaccaactacctcatattccattcagaatttatacagttacgagaaccagccccagcccagcgatgaatgtactctcctgagtaataaataccttgatggaaatgctaacaaatctacctcagatggaagtcctgtgatggccgtaatgcctggtacgacagacactattcaagtgctcaagggcaggatggattctgagcagagcccttctattgggtactcctcaaggactcttggccccaatcctggacttattcttcaggctttgactctgtcaaacgctagtgatggatttaacctggagcggcttgaaatgcttggcgactcctttttaaagcatgccatcaccacatatctattttgcacttaccctgatgcgcatgagggccgcctttcatatatgagaagcaaaaaggtcagcaactgtaatctgtatcgccttggaaaaaagaagggactacccagccgcatggtggtgtcaatatttgatccccctgtgaattggcttcctcctggttatgtagtaaatcaagacaaaagcaacacagataaatgggaaaaagatgaaatgacaaaagactgcatgctggcgaatggcaaactggatgaggattacgaggaggaggatgaggaggaggagagcctgatgtggagggctccgaaggaagaggctgactatgaagatgatttcctggagtatgatcaggaacatatcagatttatagataatatgttaatggggtcaggagcttttgtaaagaaaatctctctttctcctttttcaaccactgattctgcatatgaatggaaaatgcccaaaaaatcctccttaggtagtatgccattttcatcagattttgaggattttgactacagctcttgggatgcaatgtgctatctggatcctagcaaagctgttgaagaagatgactttgtggtggggttctggaatccatcagaagaaaactgtggtgttgacacgggaaagcagtccatttcttacgacttgcacactgagcagtgtattgctgacaaaagcatagcggactgtgtggaagccctgctgggctgctatttaaccagctgtggggagagggctgctcagcttttcctctgttcactggggctgaaggtgctcccggtaattaaaaggactgatcgggaaaaggccctgtgccctactcgggagaatttcaacagccaacaaaagaacctttcagtgagctgtgctgctgcttctgtggccagttcacgctcttctgtattgaaagactcggaatatggttgtttgaagattccaccaagatgtatgtttgatcatccagatgcagataaaacactgaatcaccttatatcggggtttgaaaattttgaaaagaaaatcaactacagattcaagaataaggcttaccttctccaggcttttacacatgcctcctaccactacaatactatcactgattgttaccagcgcttagaattcctgggagatgcgattttggactacctcataaccaagcacctttatgaagacccgcggcagcactccccgggggtcctgacagacctgcggtctgccctggtcaacaacaccatctttgcatcgctggctgtaaagtacgactaccacaagtacttcaaagctgtctctcctgagctcttccatgtcattgatgactttgtgcagtttcagcttgagaagaatgaaatgcaaggaatggattctgagcttaggagatctgaggaggatgaagagaaagaagaggatattgaagttccaaaggccatgggggatatttttgagtcgcttgctggtgccatttacatggatagtgggatgtcactggagacagtctggcaggtgtactatcccatgatgcggccactaatagaaaagttttctgcaaatgtaccccgttcccctgtgcgagaattgcttgaaatggaaccagaaactgccaaatttagcccggctgagagaacttacgacgggaaggtcagagtcactgtggaagtagtaggaaaggggaaatttaaaggtgttggtcgaagttacaggattgccaaatctgcagcagcaagaagagccctccgaagcctcaaagctaatcaacctcaggttcccaatagctgaaaccgctttttaaaattcaaaacaagaaacaaaacaaaaaaaattaaggggaaaattatttaaatcggaaaggaagacttaaagttgatagtgagtggaatgaattgaaggcagaatttaaagtttggttgataacaggatagataacagaataaaacatttaacatatgtataaaattttggaactaattgtagttttagttttttgcgcaaacacaatcttatcttctttcctcacttctgctttgtttaaatcacaagagtgctttaatgatgacatttagcaagtgctcaaaataattgacaggttttgtttttttttttttgagtttatgtcagctttgcttagtgttagaaggccatggagcttaaacctccagcagtccctaggatgatgtagattcttctccatctctccgtgtgtgcagtagtgccagtcctgcagtagttgataagctgaatagaaagataaggttttcgagaggagaagtgcgccaatgttgtcttttctttccacgttatactgtgtaaggtgatgttcccggtcgctgttgcacctgatagtaagggacagatttttaatgaacattggctggcatgttggtgaatcacattttagttttctgatgccacatagtcttgcataaaaaagggttcttgccttaaaagtgaaaccttcatggatagtctttaatctctgatctttttggaacaaactgttttacattcctttcattttattatgcattagacgttgagacagcgtgatacttacaactcactagtatagttgtaacttattacaggatcatactaaaatttctgtcatatgtatactgaagacattttaaaaaccagaatatgtagtctacggatattttttatcataaaaatgatctttggctaaacaccccattttactaaagtcctcctgccaggtagttcccactgatggaaatgtttatggcaaataattttgccttctaggctgttgctctaacaaaataaaccttagacatatcacacctaaaatatgctgcagattttataattgattggttacttatttaagaagcaaaacacagcacctttacccttagtctcctcacataaatttcttactatacttttcataatgttgcatgcatatttcacctaccaaagctgtgctgttaatgccgtgaaagtttaacgtttgcgataaactgccgtaattttgatacatctgtgatttaggtcattaatttagataaactagctcattatttccatctttggaaaaggaaaaaaaaaaaaacttctttaggcatttgcctaagtttctttaattagacttgtaggcactcttcacttaaatacctcagttcttcttttcttttgcatgcatttttcccctgtttggtgctatgtttatgtattatgcttgaaattttaattttttttttttttgcactgtaactataatacctcttaatttacctttttaaaagctgtgggtcagtcttgcactcccatcaacataccagtagaggtttgctgcaatttgccccgttaattatgcttgaagtttaagaaagctgagcagaggtgtctcatatttcccagcacatgattctgaacttgatgcttcatggaatgctgcatttatatgtaagtgacatttgaatactgtccttcctgctttatctgcatcatccacccacagagaaatgcctctgtgcgagtgcaccgacagaaaactgtcagctctgctttctaaggaaccctgagtgaggggggtattaagcttctccagtgttttttgttgtctccaatcttaaacttaaattgagatctaaattattaaacgagtttttgagcaaattaggtgacttgttttaaaaatatttaattccgatttggaaccttagatgtctatttgattttttaaaaaaccttaatgtaagatatgaccagttaaaacaaagcaattcttgaattatataactgtaaaagtgtgcagttaacaaggctggatgtgaattttattctgagggtgatttgtgatcaagtttaatcacaaatctcttaatatttataaactacctgatgccaggagcttagggctttgcattgtgtctaatacattgatcccagtgttacgggattctcttgattcctggcaccaaaatcagattgttttcacagttatgattcccagtgggagaaaaatgcctcaatatatttgtaaccttaagaagagtatttttttgttaatactaagatgttcaaacttagacatgattaggtcatacattctcaggggttcaaatttccttctaccattcaaatgttttatcaacagcaaacttcagccgtttcactttttgttggagaaaaatagtagattttaatttgactcacagtttgaagcattctgtgatcccctggttactgagttaaaaaataaaaaagtacgagttagacatatgaaatggttatgaacgcttttgtgctgctgatttttaatgctgtaaagttttcctgtgtttagcttgttgaaatgttttgcatctgtcaattaaggaaaaaaaaaatcactctatgttgccccactttagagccctgtgtgccaccctgtgttcctgtgattgcaatgtgagaccgaatgtaatatggaaaacctaccagtggggtgtggttgtgccctgagcacgtgtgtaaaggactggggaggcgtgtcttgaaaaagcaactgcagaaattccttatgatgattgtgtgcaagttagttaacatgaaccttcatttgtaaattttttaaaatttcttttataatatgctttccgcagtcctaactatgctgcgttttataatagctttttcccttctgttctgttcatgtagcacagataagcattgcacttggtaccatgctttacctcatttcaagaaaatatgcttaacagagaggaaaaaaatgtggtttggccttgctgctgttttgatttatggaatttgaaaaagataattataatgcctgcaatgtgtcatatactcgcacaacttaaataggtcatttttgtctgtggcatttttactgtttgtgaaagtatgaaacagatttgttaactgaactcttaattatgtttttaaaatgtttgttatatttcttttcttttttcttttatattacgtgaagtgatgaaatttagaatgacctctaacactcctgtaattgtcttttaaaatactgatatttttatttgttaataatactttgccctcagaaagattctgataccctgccttgacaacatgaaacttgaggctgctttggttcatgaatccaggtgttcccccggcagtcggcttcttcagtcgctccctggaggcaggtgggcactgcagaggatcactggaatccagatcgagcgcagttcatgcacaaggccccgttgatttaaaatattggatcttgctctgttagggtgtctaatccctttacacaagattgaagccaccaaactgagaccttgatacctttttttaactgcatctgaaattatgttaagagtctttaacccatttgcattatctgcagaagagaaactcatgtcatgtttattacctatatggttgttttaattacatttgaataattatatttttccaaccactgattacttttcaggaatttaattatttccagataaatttctttattttatattgtacatgaaaagttttaaagatatgtttaagaccaagactattaaaatgatttttaaagttgttggagacgccaatagcaatatctaggaaatttgcattgagaccattgtattttccactagcagtgaaaatgatttttcacaactaacttgtaaatatattttaatcattacttctttttttctagtccatttttatttggacatcaaccacagacaatttaaattttatagatgcactaagaattcactgcagcagcaggttacatagcaaaaatgcaaaggtgaacaggaagtaaatttctggcttttctgctgtaaatagtgaaggaaaattactaaaatcaagtaaaactaatgcatattatttgattgacaataaaatatttaccatcacatgctgcagctgttttttaaggaacatgatgtcattcattcatacagtaatcatgctgcagaaatttgcagtctgcaccttatggatcacaattacctttagttgttttttttgtaataattgtagccaagtaaatctccaataaagttatcgtctgttcaaaaaaaaacgacaccatctcaatacagacgaaaacgcgcagacataaaataaggggggggcgataaatatcaacacagaggggcactcacggcacctgtttgaacggaggccgcaacagaggttaacaaggcggcgcctaatatttggagaaaactaccgttggagaacacatgcgcgcg

SEQ ID NO: 437122 - DNA, 10125 bp, Homo sapiens
ggaaactctgaaagaacttagaatcagcattttgagagcagaagcttgggcatgctgtgattttccaataaactgctatcacaatgtcaaaatgcagttcagacaagagcaacacagagatctcaaacattaaaacgtaagctgtgctagaacaaaaatgcaatgaaagaaacactggatgaatgaaaagccctgctttgcaacccctcagcatggcaggcctgcagctcatgacccctgcttcctcaccaatgggtcctttctttggactgccatggcaacaagaagcaattcatgataacatttatacgccaagaaaatatcaggttgaactgcttgaagcagctctggatcataataccatcgtctgtttaaacactggctcagggaagacatttattgctagtactactctactaaagagctgtctctatctagatctaggggagacttcagctagaaatggaaaaaggacggtgttcttggtcaactctgcaaaccaggttgctcaacaagtgtcagctgtcagaactcattcagatctcaaggttggggaatactcaaacctagaagtaaatgcatcttggacaaaagagagatggaaccaagagtttactaagcaccaggttctcattatgacttgctatgtcgccttgaatgttttgaaaaatggttacttatcactgtcagacattaaccttttggtgtttgatgagtgtcatcttgcaatcctagaccacccctatcgagaatttatgaagctctgtgaaatttgtccatcatgtcctcgcattttgggactaactgcttccattttaaatgggaaatgggatccagaggatttggaagaaaagtttcagaaactagagaaaattcttaagagtaatgctgaaactgcaactgacctggtggtcttagacaggtatacttctcagccatgtgagattgtggtggattgtggaccatttactgacagaagtgggctttatgaaagactgctgatggaattagaagaagcacttaattttatcaatgattgtaatatatctgtacattcaaaagaaagagattctactttaatttcgaaacagatactatcagactgtcgtgccgtattggtagttctgggaccctggtgtgcagataaagtagctggaatgatggtaagagaactacagaaatacatcaaacatgagcaagaggagctgcacaggaaatttttattgtttacagacactttcctaaggaaaatacatgcactatgtgaagagcacttctcacctgcctcacttgacctgaaatttgtaactcctaaagtaatcaaactgctcgaaatcttacgcaaatataaaccatatgagcgacacagttttgaaagcgttgagtggtataataatagaaatcaggataattatgtgtcatggagtgattctgaggatgatgatgaggatgaagaaattgaagaaaaagagaagccagagacaaattttccttctccttttaccaacattttgtgcggaattatttttgtggaaagaagatacacagcagttgtcttaaacagattgataaaggaagctggcaaacaagatccagagctggcttatatcagtagcaatttcataactggacatggcattgggaagaatcagcctcgcaacaaacacgatggaagcagaattcagaaaacaggaagaggtacttaggaaatttcgagcacatgagaccaacctgcttattgcaacaagtattgtagaagagggtgttgatataccaaaatgcaacttggtggttcgttttgatttgcccacagaatatcgatcctatgttcaatctaaaggaagagcaagggcacccatctctaattatataatgttagcggatacagacaaaataaaaagttttgaagaagaccttaaaacctacaaagctattgaaaagatcttgagaaacaagtgttccaagtcggttgatactggtgagactgacattgatcctgtcatggatgatgatgacgttttcccaccatatgtgttgaggcctgacgatggtggtccacgagtcacaatcaacacggccattggacacatcaatagatactgtgctagattaccaagtgatccgtttactcatctagctcctaaatgcagaacccgagagttgcctgatggtacattttattcaactctttatctgccaattaactcacctcttcgagcctccattgttggtccaccaatgagctgtgtacgattggctgaaagagttgtagctctcatttgctgtgagaaactgcacaaaattggcgaactggatgaccatttgatgccagttgggaaagagactgttaaatatgaagaggagcttgatttgcatgatgaagaagagaccagtgttccaggaagaccaggttccacgaaacgaaggcagtgctacccaaaagcaattccagagtgtttgagggatagttatcccagacctgatcagccctgttacctgtatgtgataggaatggttttaactacacctttacctgatgaactcaactttagaaggcggaagctctatcctcctgaagataccacaagatgctttggaatactgacggccaaacccatacctcagattccacactttcctgtgtacacacgctctggagaggttaccatatccattgagttgaagaagtctggtttcatgttgtctctacaaatgcttgagttgattacaagacttcaccagtatatattctcacatattcttcggcttgaaaaacctgcactagaatttaaacctacagacgctgattcagcatactgtgttctacctcttaatgttgttaatgactccagcactttggatattgactttaaattcatggaagatattgagaagtctgaagctcgcataggcattcccagtacaaagtatacaaaagaaacaccctttgtttttaaattagaagattaccaagatgccgttatcattccaagatatcgcaattttgatcagcctcatcgattttatgtagctgatgtgtacactgatcttaccccactcagtaaatttccttcccctgagtatgaaacttttgcagaatattataaaacaaagtacaaccttgacctaaccaatctcaaccagccactgctggatgtggaccacacatcttcaagacttaatcttttgacacctcgacatttgaatcagaaggggaaagcgcttcctttaagcagtgctgagaagaggaaagccaaatgggaaagtctgcagaataaacagatactggttccagaactctgtgctatacatccaattccagcatcactgtggagaaaagctgtttgtctccccagcatactttatcgccttcactgccttttgactgcagaggagctaagagcccagactgccagcgatgctggcgtgggagtcagatcacttcctgcggattttagataccctaacttagacttcgggtggaaaaaatctattgacagcaaatctttcatctcaatttctaactcctcttcagctgaaaatgataattactgtaagcacagcacaattgtccctgaaaatgctgcacatcaaggtgctaatagaacctcctctctagaaaatcatgaccaaatgtctgtgaactgcagaacgttgctcagcgagtcccctggtaagctccacgttgaagtttcagcagatcttacagcaattaatggtctttcttacaatcaaaatctcgccaatggcagttatgatttagctaacagagacttttgccaaggaaatcagctaaattactacaagcaggaaatacccgtgcaaccaactacctcatattccattcagaatttatacagttacgagaaccagccccagcccagcgatgaatgtactctcctgagtaataaataccttgatggaaatgctaacaaatctacctcagatggaagtcctgtgatggccgtaatgcctggtacgacagacactattcaagtgctcaagggcaggatggattctgagcagagcccttctattgggtactcctcaaggactcttggccccaatcctggacttattcttcaggctttgactctgtcaaacgctagtgatggatttaacctggagcggcttgaaatgcttggcgactcctttttaaagcatgccatcaccacatatctattttgcacttaccctgatgcgcatgagggccgcctttcatatatgagaagcaaaaaggtcagcaactgtaatctgtatcgccttggaaaaaagaagggactacccagccgcatggtggtgtcaatatttgatccccctgtgaattggcttcctcctggttatgtagtaaatcaagacaaaagcaacacagataaatgggaaaaagatgaaatgacaaaagactgcatgctggcgaatggcaaactggatgaggattacgaggaggaggatgaggaggaggagagcctgatgtggagggctccgaaggaagaggctgactatgaagatgatttcctggagtatgatcaggaacatatcagatttatagataatatgttaatggggtcaggagcttttgtaaagaaaatctctctttctcctttttcaaccactgattctgcatatgaatggaaaatgcccaaaaaatcctccttaggtagtatgccattttcatcagattttgaggattttgactacagctcttgggatgcaatgtgctatctggatcctagcaaagctgttgaagaagatgactttgtggtggggttctggaatccatcagaagaaaactgtggtgttgacacgggaaagcagtccatttcttacgacttgcacactgagcagtgtattgctgacaaaagcatagcggactgtgtggaagccctgctgggctgctatttaaccagctgtggggagagggctgctcagcttttcctctgttcactggggctgaaggtgctcccggtaattaaaaggactgatcgggaaaaggccctgtgccctactcgggagaatttcaacagccaacaaaagaacctttcagtgagctgtgctgctgcttctgtggccagttcacgctcttctgtattgaaagactcggaatatggttgtttgaagattccaccaagatgtatgtttgatcatccagatgcagataaaacactgaatcaccttatatcggggtttgaaaattttgaaaagaaaatcaactacagattcaagaataaggcttaccttctccaggcttttacacatgcctcctaccactacaatactatcactgattgttaccagcgcttagaattcctgggagatgcgattttggactacctcataaccaagcacctttatgaagacccgcggcagcactccccgggggtcctgacagacctgcggtctgccctggtcaacaacaccatctttgcatcgctggctgtaaagtacgactaccacaagtacttcaaagctgtctctcctgagctcttccatgtcattgatgactttgtgcagtttcagcttgagaagaatgaaatgcaaggaatggattctgagcttaggagatctgaggaggatgaagagaaagaagaggatattgaagttccaaaggccatgggggatatttttgagtcgcttgctggtgccatttacatggatagtgggatgtcactggagacagtctggcaggtgtactatcccatgatgcggccactaatagaaaagttttctgcaaatgtaccccgttcccctgtgcgagaattgcttgaaatggaaccagaaactgccaaatttagcccggctgagagaacttacgacgggaaggtcagagtcactgtggaagtagtaggaaaggggaaatttaaaggtgttggtcgaagttacaggattgccaaatctgcagcagcaagaagagccctccgaagcctcaaagctaatcaacctcaggttcccaatagctgaaaccgctttttaaaattcaaaacaagaaacaaaacaaaaaaaattaaggggaaaattatttaaatcggaaaggaagacttaaagttgatagtgagtggaatgaattgaaggcagaatttaaagtttggttgataacaggatagataacagaataaaacatttaacatatgtataaaattttggaactaattgtagttttagttttttgcgcaaacacaatcttatcttctttcctcacttctgctttgtttaaatcacaagagtgctttaatgatgacatttagcaagtgctcaaaataattgacaggttttgtttttttttttttgagtttatgtcagctttgcttagtgttagaaggccatggagcttaaacctccagcagtccctaggatgatgtagattcttctccatctctccgtgtgtgcagtagtgccagtcctgcagtagttgataagctgaatagaaagataaggttttcgagaggagaagtgcgccaatgttgtcttttctttccacgttatactgtgtaaggtgatgttcccggtcgctgttgcacctgatagtaagggacagatttttaatgaacattggctggcatgttggtgaatcacattttagttttctgatgccacatagtcttgcataaaaaagggttcttgccttaaaagtgaaaccttcatggatagtctttaatctctgatctttttggaacaaactgttttacattcctttcattttattatgcattagacgttgagacagcgtgatacttacaactcactagtatagttgtaacttattacaggatcatactaaaatttctgtcatatgtatactgaagacattttaaaaaccagaatatgtagtctacggatattttttatcataaaaatgatctttggctaaacaccccattttactaaagtcctcctgccaggtagttcccactgatggaaatgtttatggcaaataattttgccttctaggctgttgctctaacaaaataaaccttagacatatcacacctaaaatatgctgcagattttataattgattggttacttatttaagaagcaaaacacagcacctttacccttagtctcctcacataaatttcttactatacttttcataatgttgcatgcatatttcacctaccaaagctgtgctgttaatgccgtgaaagtttaacgtttgcgataaactgccgtaattttgatacatctgtgatttaggtcattaatttagataaactagctcattatttccatctttggaaaaggaaaaaaaaaaaaacttctttaggcatttgcctaagtttctttaattagacttgtaggcactcttcacttaaatacctcagttcttcttttcttttgcatgcatttttcccctgtttggtgctatgtttatgtattatgcttgaaattttaattttttttttttttgcactgtaactataatacctcttaatttacctttttaaaagctgtgggtcagtcttgcactcccatcaacataccagtagaggtttgctgcaatttgccccgttaattatgcttgaagtttaagaaagctgagcagaggtgtctcatatttcccagcacatgattctgaacttgatgcttcatggaatgctgcatttatatgtaagtgacatttgaatactgtccttcctgctttatctgcatcatccacccacagagaaatgcctctgtgcgagtgcaccgacagaaaactgtcagctctgctttctaaggaaccctgagtgaggggggtattaagcttctccagtgttttttgttgtctccaatcttaaacttaaattgagatctaaattattaaacgagtttttgagcaaattaggtgacttgttttaaaaatatttaattccgatttggaaccttagatgtctatttgattttttaaaaaaccttaatgtaagatatgaccagttaaaacaaagcaattcttgaattatataactgtaaaagtgtgcagttaacaaggctggatgtgaattttattctgagggtgatttgtgatcaagtttaatcacaaatctcttaatatttataaactacctgatgccaggagcttagggctttgcattgtgtctaatacattgatcccagtgttacgggattctcttgattcctggcaccaaaatcagattgttttcacagttatgattcccagtgggagaaaaatgcctcaatatatttgtaaccttaagaagagtatttttttgttaatactaagatgttcaaacttagacatgattaggtcatacattctcaggggttcaaatttccttctaccattcaaatgttttatcaacagcaaacttcagccgtttcactttttgttggagaaaaatagtagattttaatttgactcacagtttgaagcattctgtgatcccctggttactgagttaaaaaataaaaaagtacgagttagacatatgaaatggttatgaacgcttttgtgctgctgatttttaatgctgtaaagttttcctgtgtttagcttgttgaaatgttttgcatctgtcaattaaggaaaaaaaaaatcactctatgttgccccactttagagccctgtgtgccaccctgtgttcctgtgattgcaatgtgagaccgaatgtaatatggaaaacctaccagtggggtgtggttgtgccctgagcacgtgtgtaaaggactggggaggcgtgtcttgaaaaagcaactgcagaaattccttatgatgattgtgtgcaagttagttaacatgaaccttcatttgtaaattttttaaaatttcttttataatatgctttccgcagtcctaactatgctgcgttttataatagctttttcccttctgttctgttcatgtagcacagataagcattgcacttggtaccatgctttacctcatttcaagaaaatatgcttaacagagaggaaaaaaatgtggtttggccttgctgctgttttgatttatggaatttgaaaaagataattataatgcctgcaatgtgtcatatactcgcacaacttaaataggtcatttttgtctgtggcatttttactgtttgtgaaagtatgaaacagatttgttaactgaactcttaattatgtttttaaaatgtttgttatatttcttttcttttttcttttatattacgtgaagtgatgaaatttagaatgacctctaacactcctgtaattgtcttttaaaatactgatatttttatttgttaataatactttgccctcagaaagattctgataccctgccttgacaacatgaaacttgaggctgctttggttcatgaatccaggtgttcccccggcagtcggcttcttcagtcgctccctggaggcaggtgggcactgcagaggatcactggaatccagatcgagcgcagttcatgcacaaggccccgttgatttaaaatattggatcttgctctgttagggtgtctaatccctttacacaagattgaagccaccaaactgagaccttgatacctttttttaactgcatctgaaattatgttaagagtctttaacccatttgcattatctgcagaagagaaactcatgtcatgtttattacctatatggttgttttaattacatttgaataattatatttttccaaccactgattacttttcaggaatttaattatttccagataaatttctttattttatattgtacatgaaaagttttaaagatatgtttaagaccaagactattaaaatgatttttaaagttgttggagacgccaatagcaatatctaggaaatttgcattgagaccattgtattttccactagcagtgaaaatgatttttcacaactaacttgtaaatatattttaatcattacttctttttttctagtccatttttatttggacatcaaccacagacaatttaaattttatagatgcactaagaattcactgcagcagcaggttacatagcaaaaatgcaaaggtgaacaggaagtaaatttctggcttttctgctgtaaatagtgaaggaaaattactaaaatcaagtaaaactaatgcatattatttgattgacaataaaatatttaccatcacatgctgcagctgttttttaaggaacatgatgtctcagtatgggagggatactctaga

SEQ ID NO: 437123 - DNA, 10175 bp, Homo sapiens
ggaaactctgaaagaacttagaatcagcattttgagagcagaagcttgggcatgctgtgattttccaataaactgctatcacaatgtcaaaatgcagttcagacaagagcaacacagagatctcaaacattaaaacgtaagctgtgctagaacaaaaatgcaatgaaagaaacactggatgaatgaaaagccctgctttgcaacccctcagcatggcaggcctgcagctcatgacccctgcttcctcaccaatgggtcctttctttggactgccatggcaacaagaagcaattcatgataacatttatacgccaagaaaatatcaggttgaactgcttgaagcagctctggatcataataccatcgtctgtttaaacactggctcagggaagacatttattgctagtactactctactaaagagctgtctctatctagatctaggggagacttcagctagaaatggaaaaaggacggtgttcttggtcaactctgcaaaccaggttgctcaacaagtgtcagctgtcagaactcattcagatctcaaggttggggaatactcaaacctagaagtaaatgcatcttggacaaaagagagatggaaccaagagtttactaagcaccaggttctcattatgacttgctatgtcgccttgaatgttttgaaaaatggttacttatcactgtcagacattaaccttttggtgtttgatgagtgtcatcttgcaatcctagaccacccctatcgagaatttatgaagctctgtgaaatttgtccatcatgtcctcgcattttgggactaactgcttccattttaaatgggaaatgggatccagaggatttggaagaaaagtttcagaaactagagaaaattcttaagagtaatgctgaaactgcaactgacctggtggtcttagacaggtatacttctcagccatgtgagattgtggtggattgtggaccatttactgacagaagtgggctttatgaaagactgctgatggaattagaagaagcacttaattttatcaatgattgtaatatatctgtacattcaaaagaaagagattctactttaatttcgaaacagatactatcagactgtcgtgccgtattggtagttctgggaccctggtgtgcagataaagtagctggaatgatggtaagagaactacagaaatacatcaaacatgagcaagaggagctgcacaggaaatttttattgtttacagacactttcctaaggaaaatacatgcactatgtgaagagcacttctcacctgcctcacttgacctgaaatttgtaactcctaaagtaatcaaactgctcgaaatcttacgcaaatataaaccatatgagcgacacagttttgaaagcgttgagtggtataataatagaaatcaggataattatgtgtcatggagtgattctgaggatgatgatgaggatgaagaaattgaagaaaaagagaagccagagacaaattttccttctccttttaccaacattttgtgcggaattatttttgtggaaagaagatacacagcagttgtcttaaacagattgataaaggaagctggcaaacaagatccagagctggcttatatcagtagcaatttcataactggacatggcattgggaagaatcagcctcgcaacaaacacgatggaagcagaattcagaaaacaggaagaggtacttaggaaatttcgagcacatgagaccaacctgcttattgcaacaagtattgtagaagagggtgttgatataccaaaatgcaacttggtggttcgttttgatttgcccacagaatatcgatcctatgttcaatctaaaggaagagcaagggcacccatctctaattatataatgttagcggatacagacaaaataaaaagttttgaagaagaccttaaaacctacaaagctattgaaaagatcttgagaaacaagtgttccaagtcggttgatactggtgagactgacattgatcctgtcatggatgatgatgacgttttcccaccatatgtgttgaggcctgacgatggtggtccacgagtcacaatcaacacggccattggacacatcaatagatactgtgctagattaccaagtgatccgtttactcatctagctcctaaatgcagaacccgagagttgcctgatggtacattttattcaactctttatctgccaattaactcacctcttcgagcctccattgttggtccaccaatgagctgtgtacgattggctgaaagagttgtagctctcatttgctgtgagaaactgcacaaaattggcgaactggatgaccatttgatgccagttgggaaagagactgttaaatatgaagaggagcttgatttgcatgatgaagaagagaccagtgttccaggaagaccaggttccacgaaacgaaggcagtgctacccaaaagcaattccagagtgtttgagggatagttatcccagacctgatcagccctgttacctgtatgtgataggaatggttttaactacacctttacctgatgaactcaactttagaaggcggaagctctatcctcctgaagataccacaagatgctttggaatactgacggccaaacccatacctcagattccacactttcctgtgtacacacgctctggagaggttaccatatccattgagttgaagaagtctggtttcatgttgtctctacaaatgcttgagttgattacaagacttcaccagtatatattctcacatattcttcggcttgaaaaacctgcactagaatttaaacctacagacgctgattcagcatactgtgttctacctcttaatgttgttaatgactccagcactttggatattgactttaaattcatggaagatattgagaagtctgaagctcgcataggcattcccagtacaaagtatacaaaagaaacaccctttgtttttaaattagaagattaccaagatgccgttatcattccaagatatcgcaattttgatcagcctcatcgattttatgtagctgatgtgtacactgatcttaccccactcagtaaatttccttcccctgagtatgaaacttttgcagaatattataaaacaaagtacaaccttgacctaaccaatctcaaccagccactgctggatgtggaccacacatcttcaagacttaatcttttgacacctcgacatttgaatcagaaggggaaagcgcttcctttaagcagtgctgagaagaggaaagccaaatgggaaagtctgcagaataaacagatactggttccagaactctgtgctatacatccaattccagcatcactgtggagaaaagctgtttgtctccccagcatactttatcgccttcactgccttttgactgcagaggagctaagagcccagactgccagcgatgctggcgtgggagtcagatcacttcctgcggattttagataccctaacttagacttcgggtggaaaaaatctattgacagcaaatctttcatctcaatttctaactcctcttcagctgaaaatgataattactgtaagcacagcacaattgtccctgaaaatgctgcacatcaaggtgctaatagaacctcctctctagaaaatcatgaccaaatgtctgtgaactgcagaacgttgctcagcgagtcccctggtaagctccacgttgaagtttcagcagatcttacagcaattaatggtctttcttacaatcaaaatctcgccaatggcagttatgatttagctaacagagacttttgccaaggaaatcagctaaattactacaagcaggaaatacccgtgcaaccaactacctcatattccattcagaatttatacagttacgagaaccagccccagcccagcgatgaatgtactctcctgagtaataaataccttgatggaaatgctaacaaatctacctcagatggaagtcctgtgatggccgtaatgcctggtacgacagacactattcaagtgctcaagggcaggatggattctgagcagagcccttctattgggtactcctcaaggactcttggccccaatcctggacttattcttcaggctttgactctgtcaaacgctagtgatggatttaacctggagcggcttgaaatgcttggcgactcctttttaaagcatgccatcaccacatatctattttgcacttaccctgatgcgcatgagggccgcctttcatatatgagaagcaaaaaggtcagcaactgtaatctgtatcgccttggaaaaaagaagggactacccagccgcatggtggtgtcaatatttgatccccctgtgaattggcttcctcctggttatgtagtaaatcaagacaaaagcaacacagataaatgggaaaaagatgaaatgacaaaagactgcatgctggcgaatggcaaactggatgaggattacgaggaggaggatgaggaggaggagagcctgatgtggagggctccgaaggaagaggctgactatgaagatgatttcctggagtatgatcaggaacatatcagatttatagataatatgttaatggggtcaggagcttttgtaaagaaaatctctctttctcctttttcaaccactgattctgcatatgaatggaaaatgcccaaaaaatcctccttaggtagtatgccattttcatcagattttgaggattttgactacagctcttgggatgcaatgtgctatctggatcctagcaaagctgttgaagaagatgactttgtggtggggttctggaatccatcagaagaaaactgtggtgttgacacgggaaagcagtccatttcttacgacttgcacactgagcagtgtattgctgacaaaagcatagcggactgtgtggaagccctgctgggctgctatttaaccagctgtggggagagggctgctcagcttttcctctgttcactggggctgaaggtgctcccggtaattaaaaggactgatcgggaaaaggccctgtgccctactcgggagaatttcaacagccaacaaaagaacctttcagtgagctgtgctgctgcttctgtggccagttcacgctcttctgtattgaaagactcggaatatggttgtttgaagattccaccaagatgtatgtttgatcatccagatgcagataaaacactgaatcaccttatatcggggtttgaaaattttgaaaagaaaatcaactacagattcaagaataaggcttaccttctccaggcttttacacatgcctcctaccactacaatactatcactgattgttaccagcgcttagaattcctgggagatgcgattttggactacctcataaccaagcacctttatgaagacccgcggcagcactccccgggggtcctgacagacctgcggtctgccctggtcaacaacaccatctttgcatcgctggctgtaaagtacgactaccacaagtacttcaaagctgtctctcctgagctcttccatgtcattgatgactttgtgcagtttcagcttgagaagaatgaaatgcaaggaatggattctgagcttaggagatctgaggaggatgaagagaaagaagaggatattgaagttccaaaggccatgggggatatttttgagtcgcttgctggtgccatttacatggatagtgggatgtcactggagacagtctggcaggtgtactatcccatgatgcggccactaatagaaaagttttctgcaaatgtaccccgttcccctgtgcgagaattgcttgaaatggaaccagaaactgccaaatttagcccggctgagagaacttacgacgggaaggtcagagtcactgtggaagtagtaggaaaggggaaatttaaaggtgttggtcgaagttacaggattgccaaatctgcagcagcaagaagagccctccgaagcctcaaagctaatcaacctcaggttcccaatagctgaaaccgctttttaaaattcaaaacaagaaacaaaacaaaaaaaattaaggggaaaattatttaaatcggaaaggaagacttaaagttgatagtgagtggaatgaattgaaggcagaatttaaagtttggttgataacaggatagataacagaataaaacatttaacatatgtataaaattttggaactaattgtagttttagttttttgcgcaaacacaatcttatcttctttcctcacttctgctttgtttaaatcacaagagtgctttaatgatgacatttagcaagtgctcaaaataattgacaggttttgtttttttttttttgagtttatgtcagctttgcttagtgttagaaggccatggagcttaaacctccagcagtccctaggatgatgtagattcttctccatctctccgtgtgtgcagtagtgccagtcctgcagtagttgataagctgaatagaaagataaggttttcgagaggagaagtgcgccaatgttgtcttttctttccacgttatactgtgtaaggtgatgttcccggtcgctgttgcacctgatagtaagggacagatttttaatgaacattggctggcatgttggtgaatcacattttagttttctgatgccacatagtcttgcataaaaaagggttcttgccttaaaagtgaaaccttcatggatagtctttaatctctgatctttttggaacaaactgttttacattcctttcattttattatgcattagacgttgagacagcgtgatacttacaactcactagtatagttgtaacttattacaggatcatactaaaatttctgtcatatgtatactgaagacattttaaaaaccagaatatgtagtctacggatattttttatcataaaaatgatctttggctaaacaccccattttactaaagtcctcctgccaggtagttcccactgatggaaatgtttatggcaaataattttgccttctaggctgttgctctaacaaaataaaccttagacatatcacacctaaaatatgctgcagattttataattgattggttacttatttaagaagcaaaacacagcacctttacccttagtctcctcacataaatttcttactatacttttcataatgttgcatgcatatttcacctaccaaagctgtgctgttaatgccgtgaaagtttaacgtttgcgataaactgccgtaattttgatacatctgtgatttaggtcattaatttagataaactagctcattatttccatctttggaaaaggaaaaaaaaaaaaacttctttaggcatttgcctaagtttctttaattagacttgtaggcactcttcacttaaatacctcagttcttcttttcttttgcatgcatttttcccctgtttggtgctatgtttatgtattatgcttgaaattttaattttttttttttttgcactgtaactataatacctcttaatttacctttttaaaagctgtgggtcagtcttgcactcccatcaacataccagtagaggtttgctgcaatttgccccgttaattatgcttgaagtttaagaaagctgagcagaggtgtctcatatttcccagcacatgattctgaacttgatgcttcatggaatgctgcatttatatgtaagtgacatttgaatactgtccttcctgctttatctgcatcatccacccacagagaaatgcctctgtgcgagtgcaccgacagaaaactgtcagctctgctttctaaggaaccctgagtgaggggggtattaagcttctccagtgttttttgttgtctccaatcttaaacttaaattgagatctaaattattaaacgagtttttgagcaaattaggtgacttgttttaaaaatatttaattccgatttggaaccttagatgtctatttgattttttaaaaaaccttaatgtaagatatgaccagttaaaacaaagcaattcttgaattatataactgtaaaagtgtgcagttaacaaggctggatgtgaattttattctgagggtgatttgtgatcaagtttaatcacaaatctcttaatatttataaactacctgatgccaggagcttagggctttgcattgtgtctaatacattgatcccagtgttacgggattctcttgattcctggcaccaaaatcagattgttttcacagttatgattcccagtgggagaaaaatgcctcaatatatttgtaaccttaagaagagtatttttttgttaatactaagatgttcaaacttagacatgattaggtcatacattctcaggggttcaaatttccttctaccattcaaatgttttatcaacagcaaacttcagccgtttcactttttgttggagaaaaatagtagattttaatttgactcacagtttgaagcattctgtgatcccctggttactgagttaaaaaataaaaaagtacgagttagacatatgaaatggttatgaacgcttttgtgctgctgatttttaatgctgtaaagttttcctgtgtttagcttgttgaaatgttttgcatctgtcaattaaggaaaaaaaaaatcactctatgttgccccactttagagccctgtgtgccaccctgtgttcctgtgattgcaatgtgagaccgaatgtaatatggaaaacctaccagtggggtgtggttgtgccctgagcacgtgtgtaaaggactggggaggcgtgtcttgaaaaagcaactgcagaaattccttatgatgattgtgtgcaagttagttaacatgaaccttcatttgtaaattttttaaaatttcttttataatatgctttccgcagtcctaactatgctgcgttttataatagctttttcccttctgttctgttcatgtagcacagataagcattgcacttggtaccatgctttacctcatttcaagaaaatatgcttaacagagaggaaaaaaatgtggtttggccttgctgctgttttgatttatggaatttgaaaaagataattataatgcctgcaatgtgtcatatactcgcacaacttaaataggtcatttttgtctgtggcatttttactgtttgtgaaagtatgaaacagatttgttaactgaactcttaattatgtttttaaaatgtttgttatatttcttttcttttttcttttatattacgtgaagtgatgaaatttagaatgacctctaacactcctgtaattgtcttttaaaatactgatatttttatttgttaataatactttgccctcagaaagattctgataccctgccttgacaacatgaaacttgaggctgctttggttcatgaatccaggtgttcccccggcagtcggcttcttcagtcgctccctggaggcaggtgggcactgcagaggatcactggaatccagatcgagcgcagttcatgcacaaggccccgttgatttaccaccaaactgagaccttgatacctttttttaactgcatctgaaattatgttaagagtctttaacccatttgcattatctgcagaagagaaactcatgtcatgtttattacctatatggttgttttaattacatttgaataattatatttttccaaccactgattacttttcaggaatttaattatttccagataaatttctttattttatattgtacatgaaaagttttaaagatatgtttaagaccaagactattaaaatgatttttaaagttgttggagacgccaatagcaatatctaggaaatttgcattgagaccattgtattttccactagcagtgaaaatgatttttcacaactaacttgtaaatatattttaatcattacttctttttttctagtccatttttatttggacatcaaccacagacaatttaaattttatagatgcactaagaattcactgcagcagcaggttacatagcaaaaatgcaaaggtgaacaggaagtaaatttctggcttttctgctgtaaatagtgaaggaaaattactaaaatcaagtaaaactaatgcatattatttgattgacaataaaatatttaccatcacatgctgcagctgttttttaaggaacatgatgtcattcattcatacagtaatcatgctgcagaaatttgcagtctgcaccttatggatcacaattacctttagttgttttttttgtaataattgtagccaagtaaatctccaataaagttatcgtctgttca

SEQ ID NO: 437124 - DNA, 9263 bp, Homo sapiens
ggaaactctgaaagaacttagaatcagcattttgagagcagaagcttgggcatgctgtgattttccaataaactgctatcacaatgtcaaaatgcagttcagacaagagcaacacagagatctcaaacattaaaacgtaagctgtgctagaacaaaaatgcaatgaaagaaacactggatgaatgaaaagccctgctttgcaacccctcagcatggcaggcctgcagctcatgacccctgcttcctcaccaatgggtcctttctttggactgccatggcaacaagaagcaattcatgataacatttatacgccaagaaaatatcaggttgaactgcttgaagcagctctggatcataataccatcgtctgtttaaacactggctcagggaagacatttattgctagtactactctactaaagagctgtctctatctagatctaggggagacttcagctagaaatggaaaaaggacggtgttcttggtcaactctgcaaaccaggttgctcaacaagtgtcagctgtcagaactcattcagatctcaaggttggggaatactcaaacctagaagtaaatgcatcttggacaaaagagagatggaaccaagagtttactaagcaccaggttctcattatgacttgctatgtcgccttgaatgttttgaaaaatggttacttatcactgtcagacattaaccttttggtgtttgatgagtgtcatcttgcaatcctagaccacccctatcgagaatttatgaagctctgtgaaatttgtccatcatgtcctcgcattttgggactaactgcttccattttaaatgggaaatgggatccagaggatttggaagaaaagtttcagaaactagagaaaattcttaagagtaatgctgaaactgcaactgacctggtggtcttagacaggtatacttctcagccatgtgagattgtggtggattgtggaccatttactgacagaagtgggctttatgaaagactgctgatggaattagaagaagcacttaattttatcaatgattgtaatatatctgtacattcaaaagaaagagattctactttaatttcgaaacagatactatcagactgtcgtgccgtattggtagttctgggaccctggtgtgcagataaagtagctggaatgatggtaagagaactacagaaatacatcaaacatgagcaagaggagctgcacaggaaatttttattgtttacagacactttcctaaggaaaatacatgcactatgtgaagagcacttctcacctgcctcacttgacctgaaatttgtaactcctaaagtaatcaaactgctcgaaatcttacgcaaatataaaccatatgagcgacacagttttgaaagcgttgagtggtataataatagaaatcaggataattatgtgtcatggagtgattctgaggatgatgatgaggatgaagaaattgaagaaaaagagaagccagagacaaattttccttctccttttaccaacattttgtgcggaattatttttgtggaaagaagatacacagcagttgtcttaaacagattgataaaggaagctggcaaacaagatccagagctggcttatatcagtagcaatttcataactggacatggcattgggaagaatcagcctcgcaacaaacacgatggaagcagaattcagaaaacaggaagaggtacttaggaaatttcgagcacatgagaccaacctgcttattgcaacaagtattgtagaagagggtgttgatataccaaaatgcaacttggtggttcgttttgatttgcccacagaatatcgatcctatgttcaatctaaaggaagagcaagggcacccatctctaattatataatgttagcggatacagacaaaataaaaagttttgaagaagaccttaaaacctacaaagctattgaaaagatcttgagaaacaagtgttccaagtcggttgatactggtgagactgacattgatcctgtcatggatgatgatgacgttttcccaccatatgtgttgaggcctgacgatggtggtccacgagtcacaatcaacacggccattggacacatcaatagatactgtgctagattaccaagtgatccgtttactcatctagctcctaaatgcagaacccgagagttgcctgatggtacattttattcaactctttatctgccaattaactcacctcttcgagcctccattgttggtccaccaatgagctgtgtacgattggctgaaagagttgtagctctcatttgctgtgagaaactgcacaaaattggcgaactggatgaccatttgatgccagttgggaaagagactgttaaatatgaagaggagcttgatttgcatgatgaagaagagaccagtgttccaggaagaccaggttccacgaaacgaaggcagtgctacccaaaagcaattccagagtgtttgagggatagttatcccagacctgatcagccctgttacctgtatgtgataggaatggttttaactacacctttacctgatgaactcaactttagaaggcggaagctctatcctcctgaagataccacaagatgctttggaatactgacggccaaacccatacctcagattccacactttcctgtgtacacacgctctggagaggttaccatatccattgagttgaagaagtctggtttcatgttgtctctacaaatgcttgagttgattacaagacttcaccagtatatattctcacatattcttcggcttgaaaaacctgcactagaatttaaacctacagacgctgattcagcatactgtgttctacctcttaatgttgttaatgactccagcactttggatattgactttaaattcatggaagatattgagaagtctgaagctcgcataggcattcccagtacaaagtatacaaaagaaacaccctttgtttttaaattagaagattaccaagatgccgttatcattccaagatatcgcaattttgatcagcctcatcgattttatgtagctgatgtgtacactgatcttaccccactcagtaaatttccttcccctgagtatgaaacttttgcagaatattataaaacaaagtacaaccttgacctaaccaatctcaaccagccactgctggatgtggaccacacatcttcaagacttaatcttttgacacctcgacatttgaatcagaaggggaaagcgcttcctttaagcagtgctgagaagaggaaagccaaatgggaaagtctgcagaataaacagatactggttccagaactctgtgctatacatccaattccagcatcactgtggagaaaagctgtttgtctccccagcatactttatcgccttcactgccttttgactgcagaggagctaagagcccagactgccagcgatgctggcgtgggagtcagatcacttcctgcggattttagataccctaacttagacttcgggtggaaaaaatctattgacagcaaatctttcatctcaatttctaactcctcttcagctgaaaatgataattactgtaagcacagcacaattgtccctgaaaatgctgcacatcaaggtgctaatagaacctcctctctagaaaatcatgaccaaatgtctgtgaactgcagaacgttgctcagcgagtcccctggtaagctccacgttgaagtttcagcagatcttacagcaattaatggtctttcttacaatcaaaatctcgccaatggcagttatgatttagctaacagagacttttgccaaggaaatcagctaaattactacaagcaggaaatacccgtgcaaccaactacctcatattccattcagaatttatacagttacgagaaccagccccagcccagcgatgaatgtactctcctgagtaataaataccttgatggaaatgctaacaaatctacctcagatggaagtcctgtgatggccgtaatgcctggtacgacagacactattcaagtgctcaagggcaggatggattctgagcagagcccttctattgggtactcctcaaggactcttggccccaatcctggacttattcttcaggctttgactctgtcaaacgctagtgatggatttaacctggagcggcttgaaatgcttggcgactcctttttaaagcatgccatcaccacatatctattttgcacttaccctgatgcgcatgagggccgcctttcatatatgagaagcaaaaaggtcagcaactgtaatctgtatcgccttggaaaaaagaagggactacccagccgcatggtggtgtcaatatttgatccccctgtgaattggcttcctcctggttatgtagtaaatcaagacaaaagcaacacagataaatgggaaaaagatgaaatgacaaaagactgcatgctggcgaatggcaaactggatgaggattacgaggaggaggatgaggaggaggagagcctgatgtggagggctccgaaggaagaggctgactatgaagatgatttcctggagtatgatcaggaacatatcagatttatagataatatgttaatggggtcaggagcttttgtaaagaaaatctctctttctcctttttcaaccactgattctgcatatgaatggaaaatgcccaaaaaatcctccttaggtagtatgccattttcatcagattttgaggattttgactacagctcttgggatgcaatgtgctatctggatcctagcaaagctgttgaagaagatgactttgtggtggggttctggaatccatcagaagaaaactgtggtgttgacacgggaaagcagtccatttcttacgacttgcacactgagcagtgtattgctgacaaaagcatagcggactgtgtggaagccctgctgggctgctatttaaccagctgtggggagagggctgctcagcttttcctctgttcactggggctgaaggtgctcccggtaattaaaaggactgatcgggaaaaggccctgtgccctactcgggagaatttcaacagccaacaaaagaacctttcagtgagctgtgctgctgcttctgtggccagttcacgctcttctgtattgaaagactcggaatatggttgtttgaagattccaccaagatgtatgtttgatcatccagatgcagataaaacactgaatcaccttatatcggggtttgaaaattttgaaaagaaaatcaactacagattcaagaataaggcttaccttctccaggcttttacacatgcctcctaccactacaatactatcactgattgttaccagcgcttagaattcctgggagatgcgattttggactacctcataaccaagcacctttatgaagacccgcggcagcactccccgggggtcctgacagacctgcggtctgccctggtcaacaacaccatctttgcatcgctggctgtaaagtacgactaccacaagtacttcaaagctgtctctcctgagctcttccatgtcattgatgactttgtgcagtttcagcttgagaagaatgaaatgcaaggaatggattctgagcttaggagatctgaggaggatgaagagaaagaagaggatattgaagttccaaaggccatgggggatatttttgagtcgcttgctggtgccatttacatggatagtgggatgtcactggagacagtctggcaggtgtactatcccatgatgcggccactaatagaaaagttttctgcaaatgtaccccgttcccctgtgcgagaattgcttgaaatggaaccagaaactgccaaatttagcccggctgagagaacttacgacgggaaggtcagagtcactgtggaagtagtaggaaaggggaaatttaaaggtgttggtcgaagttacaggattgccaaatctgcagcagcaagaagagccctccgaagcctcaaagctaatcaacctcaggttcccaatagctgaaaccgctttttaaaattcaaaacaagaaacaaaacaaaaaaaattaaggggaaaattatttaaatcggaaaggaagacttaaagttgatagtgagtggaatgaattgaaggcagaatttaaagtttggttgataacaggatagataacagaataaaacatttaacatatgtataaaattttggaactaattgtagttttagttttttgcgcaaacacaatcttatcttctttcctcacttctgctttgtttaaatcacaagagtgctttaatgatgacatttagcaagtgctcaaaataattgacaggttttgtttttttttttttgagtttatgtcagctttgcttagtgttagaaggccatggagcttaaacctccagcagtccctaggatgatgtagattcttctccatctctccgtgtgtgcagtagtgccagtcctgcagtagttgataagctgaatagaaagataaggttttcgagaggagaagtgcgccaatgttgtcttttctttccacgttatactgtgtaaggtgatgttcccggtcgctgttgcacctgatagtaagggacagatttttaatgaacattggctggcatgttggtgaatcacattttagttttctgatgccacatagtcttgcataaaaaagggttcttgccttaaaagtgaaaccttcatggatagtctttaatctctgatctttttggaacaaactgttttacattcctttcattttattatgcattagacgttgagacagcgtgatacttacaactcactagtatagttgtaacttattacaggatcatactaaaatttctgtcatatgtatactgaagacattttaaaaaccagaatatgtagtctacggatattttttatcataaaaatgatctttggctaaacaccccattttactaaagtcctcctgccaggtagttcccactgatggaaatgtttatggcaaataattttgccttctaggctgttgctctaacaaaataaaccttagacatatcacacctaaaatatgctgcagattttataattgattggttacttatttaagaagcaaaacacagcacctttacccttagtctcctcacataaatttcttactatacttttcataatgttgcatgcatatttcacctaccaaagctgtgctgttaatgccgtgaaagtttaacgtttgcgataaactgccgtaattttgatacatctgtgatttaggtcattaatttagataaactagctcattatttccatctttggaaaaggaaaaaaaaaaaaacttctttaggcatttgcctaagtttctttaattagacttgtaggcactcttcacttaaatacctcagttcttcttttcttttgcatgcatttttcccctgtttggtgctatgtttatgtattatgcttgaaattttaattttttttttttttgcactgtaactataatacctcttaatttacctttttaaaagctgtgggtcagtcttgcactcccatcaacataccagtagaggtttgctgcaatttgccccgttaattatgcttgaagtttaagaaagctgagcagaggtgtctcatatttcccagcacatgattctgaacttgatgcttcatggaatgctgcatttatatgtaagtgacatttgaatactgtccttcctgctttatctgcatcatccacccacagagaaatgcctctgtgcgagtgcaccgacagaaaactgtcagctctgctttctaaggaaccctgagtgaggggggtattaagcttctccagtgttttttgttgtctccaatcttaaacttaaattgagatctaaattattaaacgagtttttgagcaaattaggtgacttgttttaaaaatatttaattccgatttggaaccttagatgtctatttgattttttaaaaaaccttaatgtaagatatgaccagttaaaacaaagcaattcttgaattatataactgtaaaagtgtgcagttaacaaggctggatgtgaattttattctgagggtgatttgtgatcaagtttaatcacaaatctcttaatatttataaactacctgatgccaggagcttagggctttgcattgtgtctaatacattgatcccagtgttacgggattctcttgattcctggcaccaaaatcagattgttttcacagttatgattcccagtgggagaaaaatgcctcaatatatttgtaaccttaagaagagtatttttttgttaatactaagatgttcaaacttagacatgattaggtcatacattctcaggggttcaaatttccttctaccattcaaatgttttatcaacagcaaacttcagccgtttcactttttgttggagaaaaatagtagattttaatttgactcacagtttgaagcattctgtgatcccctggttactgagttaaaaaataaaaaagtacgagttagacatatgaaatggttatgaacgcttttgtgctgctgatttttaatgctgtaaagttttcctgtgtttagcttgttgaaatgttttgcatctgtcaattaaggaaaaaaaaaatcactctatgttgccccactttagagccctgtgtgccaccctgtgttcctgtgattgcaatgtgagaccgaatgtaatatggaaaacctaccagtggggtgtggttgtgccctgagcacgtgtgtaaaggactggggaggcgtgtcttgaaaaagcaactgcagaaattccttatgatgattgtgtgcaagttagttaacatgaaccttcatttgtaaattttttaaaatttcttttataatatgctttccgcagtcctaactatgctgcgttttataatagctttttcccttctgttctgttcatgtagcacagataagcattgcacttggtaccatgctttacctcatttcaagaaaatatgcttaacagagaggaaaaaaatgtggtttggccttgctgctgttttgatttatggaatttgaaaaagataattataatgcctgcaatgtgtcatatactcgcacaacttaaataggtcatttttgtctgtggcatttttactgtttgtgaaagtatgaaacagatttgttaactgaactcttaattatgtttttaaaatgtttgttatatttcttttcgacggtcctagtgatcatagatgggatgcgagcagatcgagtataagaggatcacaccgactgggttccgctgcctttggatatctactatctcattctccctgaccagcagtacagctcggacgggagcatgacacctacgtggaca

SEQ ID NO: 437125 - DNA, 7168 bp, Homo sapiens
agaaagggaaaaggaattgacggaagggcaccaccagaaagggcaacaagaagggcaaccttgacctaaccaatctcaaccagccactgctggatgtggaccacacatcttcaagacttaatcttttgacacctcgacatttgaatcagaaggggaaagcgcttcctttaagcagtgctgagaagaggaaagccaaatgggaaagtctgcagaataaacagatactggttccagaactctgtgctatacatccaattccagcatcactgtggagaaaagctgtttgtctccccagcatactttatcgccttcactgccttttgactgcagaggagctaagagcccagactgccagcgatgctggcgtgggagtcagatcacttcctgcggattttagataccctaacttagacttcgggtggaaaaaatctattgacagcaaatctttcatctcaatttctaactcctcttcagctgaaaatgataattactgtaagcacagcacaattgtccctgaaaatgctgcacatcaaggtgctaatagaacctcctctctagaaaatcatgaccaaatgtctgtgaactgcagaacgttgctcagcgagtcccctggtaagctccacgttgaagtttcagcagatcttacagcaattaatggtctttcttacaatcaaaatctcgccaatggcagttatgatttagctaacagagacttttgccaaggaaatcagctaaattactacaagcaggaaatacccgtgcaaccaactacctcatattccattcagaatttatacagttacgagaaccagccccagcccagcgatgaatgtactctcctgagtaataaataccttgatggaaatgctaacaaatctacctcagatggaagtcctgtgatggccgtaatgcctggtacgacagacactattcaagtgctcaagggcaggatggattctgagcagagcccttctattgggtactcctcaaggactcttggccccaatcctggacttattcttcaggctttgactctgtcaaacgctagtgatggatttaacctggagcggcttgaaatgcttggcgactcctttttaaagcatgccatcaccacatatctattttgcacttaccctgatgcgcatgagggccgcctttcatatatgagaagcaaaaaggtcagcaactgtaatctgtatcgccttggaaaaaagaagggactacccagccgcatggtggtgtcaatatttgatccccctgtgaattggcttcctcctggttatgtagtaaatcaagacaaaagcaacacagataaatgggaaaaagatgaaatgacaaaagactgcatgctggcgaatggcaaactggatgaggattacgaggaggaggatgaggaggaggagagcctgatgtggagggctccgaaggaagaggctgactatgaagatgatttcctggagtatgatcaggaacatatcagatttatagataatatgttaatggggtcaggagcttttgtaaagaaaatctctctttctcctttttcaaccactgattctgcatatgaatggaaaatgcccaaaaaatcctccttaggtagtatgccattttcatcagattttgaggattttgactacagctcttgggatgcaatgtgctatctggatcctagcaaagctgttgaagaagatgactttgtggtggggttctggaatccatcagaagaaaactgtggtgttgacacgggaaagcagtccatttcttacgacttgcacactgagcagtgtattgctgacaaaagcatagcggactgtgtggaagccctgctgggctgctatttaaccagctgtggggagagggctgctcagcttttcctctgttcactggggctgaaggtgctcccggtaattaaaaggactgatcgggaaaaggccctgtgccctactcgggagaatttcaacagccaacaaaagaacctttcagtgagctgtgctgctgcttctgtggccagttcacgctcttctgtattgaaagactcggaatatggttgtttgaagattccaccaagatgtatgtttgatcatccagatgcagataaaacactgaatcaccttatatcggggtttgaaaattttgaaaagaaaatcaactacagattcaagaataaggcttaccttctccaggcttttacacatgcctcctaccactacaatactatcactgattgttaccagcgcttagaattcctgggagatgcgattttggactacctcataaccaagcacctttatgaagacccgcggcagcactccccgggggtcctgacagacctgcggtctgccctggtcaacaacaccatctttgcatcgctggctgtaaagtacgactaccacaagtacttcaaagctgtctctcctgagctcttccatgtcattgatgactttgtgcagtttcagcttgagaagaatgaaatgcaaggaatggattctgagcttaggagatctgaggaggatgaagagaaagaagaggatattgaagttccaaaggccatgggggatatttttgagtcgcttgctggtgccatttacatggatagtgggatgtcactggagacagtctggcaggtgtactatcccatgatgcggccactaatagaaaagttttctgcaaatgtaccccgttcccctgtgcgagaattgcttgaaatggaaccagaaactgccaaatttagcccggctgagagaacttacgacgggaaggtcagagtcactgtggaagtagtaggaaaggggaaatttaaaggtgttggtcgaagttacaggattgccaaatctgcagcagcaagaagagccctccgaagcctcaaagctaatcaacctcaggttcccaatagctgaaaccgctttttaaaattcaaaacaagaaacaaaacaaaaaaaattaaggggaaaattatttaaatcggaaaggaagacttaaagttgatagtgagtggaatgaattgaaggcagaatttaaagtttggttgataacaggatagataacagaataaaacatttaacatatgtataaaattttggaactaattgtagttttagttttttgcgcaaacacaatcttatcttctttcctcacttctgctttgtttaaatcacaagagtgctttaatgatgacatttagcaagtgctcaaaataattgacaggttttgtttttttttttttgagtttatgtcagctttgcttagtgttagaaggccatggagcttaaacctccagcagtccctaggatgatgtagattcttctccatctctccgtgtgtgcagtagtgccagtcctgcagtagttgataagctgaatagaaagataaggttttcgagaggagaagtgcgccaatgttgtcttttctttccacgttatactgtgtaaggtgatgttcccggtcgctgttgcacctgatagtaagggacagatttttaatgaacattggctggcatgttggtgaatcacattttagttttctgatgccacatagtcttgcataaaaaagggttcttgccttaaaagtgaaaccttcatggatagtctttaatctctgatctttttggaacaaactgttttacattcctttcattttattatgcattagacgttgagacagcgtgatacttacaactcactagtatagttgtaacttattacaggatcatactaaaatttctgtcatatgtatactgaagacattttaaaaaccagaatatgtagtctacggatattttttatcataaaaatgatctttggctaaacaccccattttactaaagtcctcctgccaggtagttcccactgatggaaatgtttatggcaaataattttgccttctaggctgttgctctaacaaaataaaccttagacatatcacacctaaaatatgctgcagattttataattgattggttacttatttaagaagcaaaacacagcacctttacccttagtctcctcacataaatttcttactatacttttcataatgttgcatgcatatttcacctaccaaagctgtgctgttaatgccgtgaaagtttaacgtttgcgataaactgccgtaattttgatacatctgtgatttaggtcattaatttagataaactagctcattatttccatctttggaaaaggaaaaaaaaaaaaacttctttaggcatttgcctaagtttctttaattagacttgtaggcactcttcacttaaatacctcagttcttcttttcttttgcatgcatttttcccctgtttggtgctatgtttatgtattatgcttgaaattttaattttttttttttttgcactgtaactataatacctcttaatttacctttttaaaagctgtgggtcagtcttgcactcccatcaacataccagtagaggtttgctgcaatttgccccgttaattatgcttgaagtttaagaaagctgagcagaggtgtctcatatttcccagcacatgattctgaacttgatgcttcatggaatgctgcatttatatgtaagtgacatttgaatactgtccttcctgctttatctgcatcatccacccacagagaaatgcctctgtgcgagtgcaccgacagaaaactgtcagctctgctttctaaggaaccctgagtgaggggggtattaagcttctccagtgttttttgttgtctccaatcttaaacttaaattgagatctaaattattaaacgagtttttgagcaaattaggtgacttgttttaaaaatatttaattccgatttggaaccttagatgtctatttgattttttaaaaaaccttaatgtaagatatgaccagttaaaacaaagcaattcttgaattatataactgtaaaagtgtgcagttaacaaggctggatgtgaattttattctgagggtgatttgtgatcaagtttaatcacaaatctcttaatatttataaactacctgatgccaggagcttagggctttgcattgtgtctaatacattgatcccagtgttacgggattctcttgattcctggcaccaaaatcagattgttttcacagttatgattcccagtgggagaaaaatgcctcaatatatttgtaaccttaagaagagtatttttttgttaatactaagatgttcaaacttagacatgattaggtcatacattctcaggggttcaaatttccttctaccattcaaatgttttatcaacagcaaacttcagccgtttcactttttgttggagaaaaatagtagattttaatttgactcacagtttgaagcattctgtgatcccctggttactgagttaaaaaataaaaaagtacgagttagacatatgaaatggttatgaacgcttttgtgctgctgatttttaatgctgtaaagttttcctgtgtttagcttgttgaaatgttttgcatctgtcaattaaggaaaaaaaaaatcactctatgttgccccactttagagccctgtgtgccaccctgtgttcctgtgattgcaatgtgagaccgaatgtaatatggaaaacctaccagtggggtgtggttgtgccctgagcacgtgtgtaaaggactggggaggcgtgtcttgaaaaagcaactgcagaaattccttatgatgattgtgtgcaagttagttaacatgaaccttcatttgtaaattttttaaaatttcttttataatatgctttccgcagtcctaactatgctgcgttttataatagctttttcccttctgttctgttcatgtagcacagataagcattgcacttggtaccatgctttacctcatttcaagaaaatatgcttaacagagaggaaaaaaatgtggtttggccttgctgctgttttgatttatggaatttgaaaaagataattataatgcctgcaatgtgtcatatactcgcacaacttaaataggtcatttttgtctgtggcatttttactgtttgtgaaagtatgaaacagatttgttaactgaactcttaattatgtttttaaaatgtttgttatatttcttttcttttttcttttatattacgtgaagtgatgaaatttagaatgacctctaacactcctgtaattgtcttttaaaatactgatatttttatttgttaataatactttgccctcagaaagattctgataccctgccttgacaacatgaaacttgaggctgctttggttcatgaatccaggtgttcccccggcagtcggcttcttcagtcgctccctggaggcaggtgggcactgcagaggatcactggaatccagatcgagcgcagttcatgcacaaggccccgttgatttaaaatattggatcttgctctgttagggtgtctaatccctttacacaagattgaagccaccaaactgagaccttgatacctttttttaactgcatctgaaattatgttaagagtctttaacccatttgcattatctgcagaagagaaactcatgtcatgtttattacctatatggttgttttaattacatttgaataattatatttttccaaccactgattacttttcaggaatttaattatttccagataaatttctttattttatattgtacatgaaaagttttaaagatatgtttaagaccaagactattaaaatgatttttaaagttgttggagacgccaatagcaatatctaggaaatttgcattgagaccattgtattttccactagcagtgaaaatgatttttcacaactaacttgtaaatatattttaatcattacttctttttttctagtccatttttatttggacatcaaccacagacaatttaaattttatagatgcactaagaattcactgcagcagcaggttacatagcaaaaatgcaaaggtgaacaggaagtaaatttctggcttttctgctgtaaatagtgaaggaaaattactaaaatcaagtaaaactaatgcatattatttgattgacaataaaatatttaccatcacatgctgcagctgttttttaaggaacatgatgtcattcattcatacagtaatcatgctgcagaaatttgcagtctgcaccttatggatcacaattacctttagttgttttttttgtaataattgtagccaagtaaatctccaataaagttatcgtctgttca

SEQ ID NO: 437126 - DNA, 7078 bp, Homo sapiens
ggaaactctgaaagaacttagaatcagcattttgagagcagaagcttgggcatgctgtgattttccaataaactgctatcacaatgtcaaaatgcagttcagacaagagcaacacagagatctcaaacattaaaacgtaagctgtgctagaacaaaaatgcaatgaaagaaacactggatgaatgaaaagccctgctttgcaacccctcagcatggcaggcctgcagctcatgacccctgcttcctcaccaatgggtcctttctttggactgccatggcaacaagaagcaattcatgataacatttatacgccaagaaaatatcaggttgaactgcttgaagcagctctggatcataataccatcgtctgtttaaacactggctcagggaagacatttattgctagtactactctactaaagagctgtctctatctagatctaggggagacttcagctagaaatggaaaaaggacggtgttcttggtcaactctgcaaaccaggttgctcaacaagtgtcagctgtcagaactcattcagatctcaaggttggggaatactcaaacctagaagtaaatgcatcttggacaaaagagagatggaaccaagagtttactaagcaccaggttctcattatgacttgctatgtcgccttgaatgttttgaaaaatggttacttatcactgtcagacattaaccttttggtgtttgatgagtgtcatcttgcaatcctagaccacccctatcgagaatttatgaagctctgtgaaatttgtccatcatgtcctcgcattttgggactaactgcttccattttaaatgggaaatgggatccagaggatttggaagaaaagtttcagaaactagagaaaattcttaagagtaatgctgaaactgcaactgacctggtggtcttagacaggtatacttctcagccatgtgagattgtggtggattgtggaccatttactgacagaagtgggctttatgaaagactgctgatggaattagaagaagcacttaattttatcaatgattgtaatatatctgtacattcaaaagaaagagattctactttaatttcgaaacagatactatcagactgtcgtgccgtattggtagttctgggaccctggtgtgcagataaagtagctggaatgatggtaagagaactacagaaatacatcaaacatgagcaagaggagctgcacaggaaatttttattgtttacagacactttcctaaggaaaatacatgcactatgtgaagagcacttctcacctgcctcacttgacctgaaatttgtaactcctaaagtaatcaaactgctcgaaatcttacgcaaatataaaccatatgagcgacacagttttgaaagcgttgagtggtataataatagaaatcaggataattatgtgtcatggagtgattctgaggatgatgatgaggatgaagaaattgaagaaaaagagaagccagagacaaattttccttctccttttaccaacattttgtgcggaattatttttgtggaaagaagatacacagcagttgtcttaaacagattgataaaggaagctggcaaacaagatccagagctggcttatatcagtagcaatttcataactggacatggcattgggaagaatcagcctcgcaacaaacacgatggaagcagaattcagaaaacaggaagaggtacttaggaaatttcgagcacatgagaccaacctgcttattgcaacaagtattgtagaagagggtgttgatataccaaaatgcaacttggtggttcgttttgatttgcccacagaatatcgatcctatgttcaatctaaaggaagagcaagggcacccatctctaattatataatgttagcggatacagacaaaataaaaagttttgaagaagaccttaaaacctacaaagctattgaaaagatcttgagaaacaagtgttccaagtcggttgatactggtgagactgacattgatcctgtcatggatgatgatgacgttttcccaccatatgtgttgaggcctgacgatggtggtccacgagtcacaatcaacacggccattggacacatcaatagatactgtgctagattaccaagtgatccgtttactcatctagctcctaaatgcagaacccgagagttgcctgatggtacattttattcaactctttatctgccaattaactcacctcttcgagcctccattgttggtccaccaatgagctgtgtacgattggctgaaagagttgtagctctcatttgctgtgagaaactgcacaaaattggcgaactggatgaccatttgatgccagttgggaaagagactgttaaatatgaagaggagcttgatttgcatgatgaagaagagaccagtgttccaggaagaccaggttccacgaaacgaaggcagtgctacccaaaagcaattccagagtgtttgagggatagttatcccagacctgatcagccctgttacctgtatgtgataggaatggttttaactacacctttacctgatgaactcaactttagaaggcggaagctctatcctcctgaagataccacaagatgctttggaatactgacggccaaacccatacctcagattccacactttcctgtgtacacacgctctggagaggttaccatatccattgagttgaagaagtctggtttcatgttgtctctacaaatgcttgagttgattacaagacttcaccagtatatattctcacatattcttcggcttgaaaaacctgcactagaatttaaacctacagacgctgattcagcatactgtgttctacctcttaatgttgttaatgactccagcactttggatattgactttaaattcatggaagatattgagaagtctgaagctcgcataggcattcccagtacaaagtatacaaaagaaacaccctttgtttttaaattagaagattaccaagatgccgttatcattccaagatatcgcaattttgatcagcctcatcgattttatgtagctgatgtgtacactgatcttaccccactcagtaaatttccttcccctgagtatgaaacttttgcagaatattataaaacaaagtacaaccttgacctaaccaatctcaaccagccactgctggatgtggaccacacatcttcaagacttaatcttttgacacctcgacatttgaatcagaaggggaaagcgcttcctttaagcagtgctgagaagaggaaagccaaatgggaaagtctgcagaataaacagatactggttccagaactctgtgctatacatccaattccagcatcactgtggagaaaagctgtttgtctccccagcatactttatcgccttcactgccttttgactgcagaggagctaagagcccagactgccagcgatgctggcgtgggagtcagatcacttcctgcggattttagataccctaacttagacttcgggtggaaaaaatctattgacagcaaatctttcatctcaatttctaactcctcttcagctgaaaatgataattactgtaagcacagcacaattgtccctgaaaatgctgcacatcaaggtgctaatagaacctcctctctagaaaatcatgaccaaatgtctgtgaactgcagaacgttgctcagcgagtcccctggtaagctccacgttgaagtttcagcagatcttacagcaattaatggtctttcttacaatcaaaatctcgccaatggcagttatgatttagctaacagagacttttgccaaggaaatcagctaaattactacaagcaggaaatacccgtgcaaccaactacctcatattccattcagattttataattgattggttacttatttaagaagcaaaacacagcacctttacccttagtctcctcacataaatttcttactatacttttcataatgttgcatgcatatttcacctaccaaagctgtgctgttaatgccgtgaaagtttaacgtttgcgataaactgccgtaattttgatacatctgtgatttaggtcattaatttagataaactagctcattatttccatctttggaaaaggaaaaaaaaaaaaacttctttaggcatttgcctaagtttctttaattagacttgtaggcactcttcacttaaatacctcagttcttcttttcttttgcatgcatttttcccctgtttggtgctatgtttatgtattatgcttgaaattttaattttttttttttttgcactgtaactataatacctcttaatttacctttttaaaagctgtgggtcagtcttgcactcccatcaacataccagtagaggtttgctgcaatttgccccgttaattatgcttgaagtttaagaaagctgagcagaggtgtctcatatttcccagcacatgattctgaacttgatgcttcatggaatgctgcatttatatgtaagtgacatttgaatactgtccttcctgctttatctgcatcatccacccacagagaaatgcctctgtgcgagtgcaccgacagaaaactgtcagctctgctttctaaggaaccctgagtgaggggggtattaagcttctccagtgttttttgttgtctccaatcttaaacttaaattgagatctaaattattaaacgagtttttgagcaaattaggtgacttgttttaaaaatatttaattccgatttggaaccttagatgtctatttgattttttaaaaaaccttaatgtaagatatgaccagttaaaacaaagcaattcttgaattatataactgtaaaagtgtgcagttaacaaggctggatgtgaattttattctgagggtgatttgtgatcaagtttaatcacaaatctcttaatatttataaactacctgatgccaggagcttagggctttgcattgtgtctaatacattgatcccagtgttacgggattctcttgattcctggcaccaaaatcagattgttttcacagttatgattcccagtgggagaaaaatgcctcaatatatttgtaaccttaagaagagtatttttttgttaatactaagatgttcaaacttagacatgattaggtcatacattctcaggggttcaaatttccttctaccattcaaatgttttatcaacagcaaacttcagccgtttcactttttgttggagaaaaatagtagattttaatttgactcacagtttgaagcattctgtgatcccctggttactgagttaaaaaataaaaaagtacgagttagacatatgaaatggttatgaacgcttttgtgctgctgatttttaatgctgtaaagttttcctgtgtttagcttgttgaaatgttttgcatctgtcaattaaggaaaaaaaaaatcactctatgttgccccactttagagccctgtgtgccaccctgtgttcctgtgattgcaatgtgagaccgaatgtaatatggaaaacctaccagtggggtgtggttgtgccctgagcacgtgtgtaaaggactggggaggcgtgtcttgaaaaagcaactgcagaaattccttatgatgattgtgtgcaagttagttaacatgaaccttcatttgtaaattttttaaaatttcttttataatatgctttccgcagtcctaactatgctgcgttttataatagctttttcccttctgttctgttcatgtagcacagataagcattgcacttggtaccatgctttacctcatttcaagaaaatatgcttaacagagaggaaaaaaatgtggtttggccttgctgctgttttgatttatggaatttgaaaaagataattataatgcctgcaatgtgtcatatactcgcacaacttaaataggtcatttttgtctgtggcatttttactgtttgtgaaagtatgaaacagatttgttaactgaactcttaattatgtttttaaaatgtttgttatatttcttttcttttttcttttatattacgtgaagtgatgaaatttagaatgacctctaacactcctgtaattgtcttttaaaatactgatatttttatttgttaataatactttgccctcagaaagattctgataccctgccttgacaacatgaaacttgaggctgctttggttcatgaatccaggtgttcccccggcagtcggcttcttcagtcgctccctggaggcaggtgggcactgcagaggatcactggaatccagatcgagcgcagttcatgcacaaggccccgttgatttaaaatattggatcttgctctgttagggtgtctaatccctttacacaagattgaagccaccaaactgagaccttgatacctttttttaactgcatctgaaattatgttaagagtctttaacccatttgcattatctgcagaagagaaactcatgtcatgtttattacctatatggttgttttaattacatttgaataattatatttttccaaccactgattacttttcaggaatttaattatttccagataaatttctttattttatattgtacatgaaaagttttaaagatatgtttaagaccaagactattaaaatgatttttaaagttgttggagacgccaatagcaatatctaggaaatttgcattgagaccattgtattttccactagcagtgaaaatgatttttcacaactaacttgtaaatatattttaatcattacttctttttttctagtccatttttatttggacatcaaccacagacaatttaaattttatagatgcactaagaattcactgcagcagcaggttacatagcaaaaatgcaaaggtgaacaggaagtaaatttctggcttttctgctgtaaatagtgaaggaaaattactaaaatcaagtaaaactaatgcatattatttgattgacaataaaatatttaccatcacatgctgcagctgttttttaaggaacatgatgtcattcattcatacagtaatcatgctgcagaaatttgcagtctgcaccttatggatcacaattacctttagttgttttttttgtaataattgtagccaagtaaatctccaataaagttatcgtctgttca

SEQ ID NO: 437127 - DNA, 2044 bp, Homo sapiens
ggaaactctgaaagaacttagaatcagcattttgagagcagaagcttgggcatgctgtgattttccaataaactgctatcacaatgtcaaaatgcagttcagacaagagcaacacagagatctcaaacattaaaacgtaagctgtgctagaacaaaaatgcaatgaaagaaacactggatgaatgaaaagccctgctttgcaacccctcagcatggcaggcctgcagctcatgacccctgcttcctcaccaatgggtcctttctttggactgccatggcaacaagaagcaattcatgataacatttatacgccaagaaaatatcaggttgaactgcttgaagcagctctggatcataataccatcgtctgtttaaacactggctcagggaagacatttattgctagtactactctactaaagagctgtctctatctagatctaggggagacttcagctagaaatggaaaaaggacggtgttcttggtcaactctgcaaaccaggttgctcaacaagtgtcagctgtcagaactcattcagatctcaaggttggggaatactcaaacctagaagtaaatgcatcttggacaaaagagagatggaaccaagagtttactaagcaccaggttctcattatgacttgctatgtcgccttgaatgttttgaaaaatggttacttatcactgtcagacattaaccttttggtgtttgatgagtgtcatcttgcaatcctagaccacccctatcgagaatttatgaagctctgtgaaatttgtccatcatgtcctcgcattttgggactaactgcttccattttaaatgggaaatgggatccagaggatttggaagaaaagtttcagaaactagagaaaattcttaagagtaatgctgaaactgcaactgacctggtggtcttagacaggtatacttctcagccatgtgagattgtggtggattgtggaccatttactgacagaagtgggctttatgaaagactgctgatggaattagaagaagcacttaattttatcaatgattgtaatatatctgtacattcaaaagaaagagattctactttaatttcgaaacagatactatcagactgtcgtgccgtattggtagttctgggaccctggtgtgcagataaagtagctggaatgatggtaagagaactacagaaatacatcaaacatgagcaagaggagctgcacaggaaatttttattgtttacagacactttcctaaggaaaatacatgcactatgtgaagagcacttctcacctgcctcacttgacctgaaatttgtaactcctaaagtaatcaaactgctcgaaatcttacgcaaatataaaccatatgagcgacacagttttgaaagcgttgagtggtataataatagaaatcaggataattatgtgtcatggagtgattctgaggatgatgatgaggatgaagaaattgaagaaaaagagaagccagagacaaattttccttctccttttaccaacattttgtgcggaattatttttgtggaaagaagatacacagcagttgtcttaaacagattgataaaggaagctggcaaacaagatccagagctggcttatatcagtagcaatttcataactggacatggcattgggaagaatcagcctcgcaacaaacacgatggaagcagaattcagaaaacaggaagaggtacttaggaaatttcgagcacatgagaccaacctgcttattgcaacaagtattgtagaagagggtgttgatataccaaaatgcaacttggtggttcgttttgatttgcccacagaatatcgatcctatgttcaatctaaaggaagagcaagggcacccatctctaattatataatgttagcggatacagacaaaataaaaagttttgaagaagaccttaaaacctacaaagctattgaaaagatcttgagaaacaagtgttccaagtcggttgatactggtgagactgacattgatcctgtcatggatgatcgatctgtcctggtgagggtcctcaggcgcaccc

SEQ ID NO: 437128 - DNA, 2975 bp, Homo sapiens
  misc_feature (2)..(5): n is a, c, g, or t
  misc_feature (7)..(8): n is a, c, g, or t
  misc_feature (10)..(10): n is a, c, g, or t
  misc_feature (2165)..(2166): n is a, c, g, or t
  misc_feature (2168)..(2168): n is a, c, g, or t
  misc_feature (2174)..(2174): n is a, c, g, or t
gnnnncnncngccgggaactggaggaaggagaccctggcttcgcaggggccccggctggggcagaggcgaggggcctgggggggcgctggctttggccccgcctggggcaggatggtgaatctggagtccatgcacacagatatcaagatgagtggggatgtagccgattccacggatgctcgcagcactctcagccaggtggagccaggaaatgatcgaaatggcctagatttcaacaggcagattaaaaccgaagatctcagtgactccctgcagcagaccctctcccatcggccatgccacctgagtcaaggacctgccatgatgtccggaaaccaaatgtctgggctaaatgccagcccatgtcaggacatggcttccctccatccgctccagcagcttgtgctggttcccggccacttacagtctgtatcccagttcctgctatctcagacccagcctgggcagcaaggtctgcagccaaatctcctcccctttccacagcaacaaagcggtctcctcctcccacagactgggccgggactggcatcccaggcatttgggcaccctgggctgccaggatcctctttagaaccccacctggaagcatcccagcatctcccagtgcccaagcatctacccagctctggaggggccgatgagcccagtgacctcgaggagctggagaagtttgccaagaccttcaagcagaggcgcattaagctgggcttcacacagggagatgtggggctggcgatgggaaagctgtatggcaacgacttcagccagaccaccatctcacgatttgaggccctcaacctgagcttcaagaacatgtgcaagctcaagcccctgctggagaagtggctgaatgatgcagagtcctctccgtcagacccctcagtgagcacgcccagctcctaccccagcctcagtgaagtatttggtaggaagagaaagaaacggaccagcatcgagaccaacatccgcctgactctggagaagaggtttcaagataacccaaaacccagctcggaggagatctccatgattgcagagcagttgtccatggagaaggaggtggtgagggtctggttctgcaaccgacgccaaaaggagaagcgaatcaactgccctgtggccacacccatcaaaccacctgtctacaactcccggctggtatctccctcagggtctctgggccccctctctgtccctcctgtccacagtaccatgcctggaacagtaacgtcatcctgttcccctgggaacaacagcaggccttcatctcctggctcaggactccacgccagcagccccactgcatctcaaaataactccaaagcagcagtgaactccgcctccagttttaactcttcaggatcttggtaccgatggaatcattccacctacctccactgagaccaaaaagtttctcctactccagctggccctgtattccccctggaaggaagggaatcatgccttctatatacagacagattgccttcagaagagtggaagaaaatctccactatcaatgaacccagactcttgtcttcttcaagagcaagggcctccggagatccaaactgtgattgaaccaagtgcagactcctaatgctcttgaaatacacagcccctcctaggagcttaccattttcaccttccttgcctatgcccttgccttctagttccaaatattttagccagcttcactgtggcaatagtctttcagagaaaagacttcttgctgttattctccaactcatccgtgggcttctggggacagccatttggctggggtgccaaacaccagaaggggagataatagttttgactctgaacttggccacaacccctgaactgatcccaaaatctgtgaaaagatttgaatctgatatctccaccaaagccttgatgttttctctgtacagctaagttttctgatggaatcttcatctcaccccattttctttttaacctcgcccccttttctacaatcaaatccattcattattgcgccctccaggtcccctcctttttgcagaaggtgtaaaagagctgcccttggtgggtgcccttgggcatgttgcaacgcctgctggtgcccttctgtctgtccacgtctgcctagggctcaggagtgcttgttctttccctnncnccctgngtttctctttatcctgtcccctctcctttctcctggcagcagaaaaggaagaacacaagagcaaacacacaacaatgatggtggcaaagtacctgtatatagccctttcccattttttgcattatgttcttaactccttaatgtggaattttccagcaaaatgtttaactcaggtgtgatttttgaaaatgtctctgtaatattttatcttctttaaaaaaaagggggggaaataccaaagtgtgaaatactgtgctaccttccagagttcccacatgggctgggatttttttttctttttcttttttttttttttttttgagacagtcttgctccagcccaggctggagtgcagtggcatgatcttggctcactgcatgctctgccacttgggttcaagcgattctcctgcctcagcctctcaagtagcggattacaggcgcccaccaccaaaaattagcccagctaatttttgtatttttagtagagatggggtttcaccatgttggtcaggctggtcttgaactcctgacctcctgatccacccacctcagcgtcccgaagtgctgggattacaggtgtgagccaccgcgcctggcctgggctgggaatctttgttgacttctttgggaacattatctctagagtctgcttttttgtgggccagtttgtagagatgtaacatgaagccattccagaaatggtaacttaaaaaaaaaaagactacatgtctaggaaactgttgagattcaaaggaatctcactgttcctaaataaatgtgtatagtgattatgaaaagt

SEQ ID NO: 437129 - DNA, 3510 bp, Homo sapiens
  misc_feature (1644)..(1644): n is a, c, g, or t
gaggttttggaaatccagaatccaaacaaaatgcaactctgccttccgcccttagcacctgcacaaatgacagtcactatccttagtttccaaggcacctcagaatattatggtgatgaatgagaccctatttgaatttttaagtgtttattttggttaaaaaataaacatcatactcctggaatggaaaagggaaggtaacagtttaatttgttttcagaagactggagagcgacatgaaaatggcccaggcttataaccacctaggtcagtgtatgatgcagtggtggaaagacacttccaaatttggagtcagaaaaatttactggtttctttaaaaagtcacttactaactgtgtgttttggggaaagttacctaacctctctgagcttccatttcctcttctgaaaaaatgggataatagcaaggctctgcctcatgagattattgagagtcacttgaaataatgcatgtgaaaaggctgtatccatttcaaccgccatgtcagaattgccattagtacccaagcctctcaactcccagttctggattccttgtaagagctttcttgcctatgtattttaataatgaacaatgaagccctgactttttgaaactgaagagcataaaggtcaacatcagcagatgctgtatgtacattgtgacccagaacagcctagggaaaacagagaccccaaagtgctgttgagtgacaagcgattgggatgaccaaccccattgtctgctttggtggtttgatggccccactcctgctgggagagtgagccaccaaccaggcagagtccctcatgtaccgttttcctggggaggatggagaagccggtataatacatactgcccaagggagtttccagaggctcagccctggactttccctcctctctcagccctctctcccaagtataaaatgtcctggtcagccacatgcctctggctaaggcccactgccctttagagccgtatggtcgtatctgcttggtctggcatcctcgcagatttgattgggcctctgtagccataacccagctacttctcctgcagggaaagccaaaatcctcagccctagcttgaattctcagcagccaccctgcatcctttcccttcttggttttcttcagctctggtaatcagatcccagagtagatcgtcttgaccctccttagcctctacgcctctccagacaggcgggcaggtggaaggactggtttggggactgctgtttacatgtctgtttatccctgtatctgatttgcctccacctgtatgtggcaatgcctggcagtgctaggagggcctctccatgggacttgaggtgggtggagggacctgatcaggtggcagggggtggggacagtgatcgtggtgccaaagttgtagcacatgtgtttcaaatagcctggattttatttgtctgttcctttgtccctcccctttcacccaggtctgcagccaaatctcctcccctttccacagcaacaaagcggtctcctcctcccacagactgggccgggactggcatcccaggtaaacaaccccattcttcctgtttcctctaggaatgtctcagctctcactgagtttaactcactggtttccccctacccctttaacagggcactaanccctctggggagaggggatagcagggaactatccattggcacaggggaaatccaagctacagcaagtggggggacaatttaccaagtgtcactggtggggccacagttagaatccagagattccagctcccaggccagcctccttcatgctccaggcactgaactccaaccctgcacaggccccagcattgctcctctgagagccaggctcagctcacttctcaggcataccaagatggccacgaaccctacctaggtgctctcaagccccaagagggagactagaatactacagacctgatgtcccagaccacaaagccagtgtctttcacctctgggccactattccagattgcctcctgcagtgggcacgtatataggccagtgggctgaggtctgggagaggggttgtttgcagagctgccatggttccacacagcaccttttttccaactaggaaaaaggcacctcttctggccaggtgcagtctcatgccaaggtggacagattggcgacagcagcatgagctgtatcttagctgccattcctcccctgatctgggtgcccctgtacagttaataacctgcacagctgcatgagatggctctgcacagatggttgggcagaatggttgggaatgactgcagagatctctgtgctaagatccccatggctcaccaagagcccggccttcagagagggctgaggccactaaaagtacctggaggggaagctcgccatctagtggttgaaatggggacaccagcatcataagctgctcttccgcctcctcctggctgccctctccagaatctcatagccatgggcttacagctggaagagatcttagaatcttcaagatcaactctcatctcttatcatattttggcatggagagactggtagcagagagaccacatagaagattatgaagatcatccaggggaggggtcataaaggattggcttagagttgtggcaataagaagaggggatgattgaggagatgctttgggaagttgaatcagtgcagtttgccagtggattggagatgaaaggaggagggagaaggtctagcagagagccccataagtctttgtcaaatgaaagaacaaatgatttaatgaaaaggaaggttcaaagaggactggggctttgtcctgagggtctggtctatgccacactctcctcacacaccctctccctgcaaactaagaccaaattcatgatggtttcagactaaaagacccttcactgggggaaagactcctaaacttctctctagaggtccttttaccttcttcatcataaggatacctatctgaatggtaaacccaaatatcccagaggagaagaagtaatgtttagtctacaaaaagtaaatcaaaaaggagagaagaggtggatttagccctttgagctagctggccacagtgcctggacccctaggcccagattccactctatccttgtggaatgatagatgtccttaagatcggattcattcctgaccccaaataggcacagcatggttctaggtttaagggtacgttttcctatgaaaataagctcaagaaataatatttggctgggcacggtggctcatacttgtagtcccagcactttgggaggccaaagcaggtagatcacttgagcccaggagtttgagaccagcttgggcaacatggtgaagccctgtctctaaaaaaacaaaagttagccaggtgtggtggcacacgcctgtagccccagctgttcaggagcctgaggcaggagaatgacttaagcccaggaggttgacgctgcagtgagcagtgattgtgccactacactctagcctgggtgacagagtgagatcctgattcaa

SEQ ID NO: 437130 - DNA, 2116 bp, Homo sapiens
  misc_feature (15)..(15): n is a, c, g, or t
  misc_feature (1306)..(1307): n is a, c, g, or t
  misc_feature (1309)..(1309): n is a, c, g, or t
  misc_feature (1315)..(1315): n is a, c, g, or t
tgggtgctagtcgtntccagaggatcccctgtggagggattcggagatgtggggctggcgatgggaaagctgtatggcaacgacttcagccagaccaccatctcacgatttgaggccctcaacctgagcttcaagaacatgtgcaagctcaagcccctgctggagaagtggctgaatgatgcagagtcctctccgtcagacccctcagtgagcacgcccagctcctaccccagcctcagtgaagtatttggtaggaagagaaagaaacggaccagcatcgagaccaacatccgcctgactctggagaagaggtttcaagatgtatctccctcagggtctctgggccccctctctgtccctcctgtccacagtaccatgcctggaacagtaacgtcatcctgttcccctgggaacaacagcaggccttcatctcctggctcaggactccacgccagcagccccactgcatctcaaaataactccaaagcagcagtgaactccgcctccagttttaactcttcaggatcttggtaccgatggaatcattccacctacctccactgagaccaaaaagtttctcctactccagctggccctgtattccccctggaaggaagggaatcatgccttctatatacagacagattgccttcagaagagtggaagaaaatctccactatcaatgaacccagactcttgtcttcttcaagagcaagggcctccggagatccaaactgtgattgaaccaagtgcagactcctaatgctcttgaaatacacagcccctcctaggagcttaccattttcaccttccttgcctatgcccttgccttctagttccaaatattttagccagcttcactgtggcaatagtctttcagagaaaagacttcttgctgttattctccaactcatccgtgggcttctggggacagccatttggctggggtgccaaacaccagaaggggagataatagttttgactctgaacttggccacaacccctgaactgatcccaaaatctgtgaaaagatttgaatctgatatctccaccaaagccttgatgttttctctgtacagctaagttttctgatggaatcttcatctcaccccattttctttttaacctcgcccccttttctacaatcaaatccattcattattgcgccctccaggtcccctcctttttgcagaaggtgtaaaagagctgcccttggtgggtgcccttgggcatgttgcaacgcctgctggtgcccttctgtctgtccacgtctgcctagggctcaggagtgcttgttctttccctnncnccctgngtttctctttatcctgtcccctctcctttctcctggcagcagaaaaggaagaacacaagagcaaacacacaacaatgatggtggcaaagtacctgtatatagccctttcccattttttgcattatgttcttaactccttaatgtggaattttccagcaaaatgtttaactcaggtgtgatttttgaaaatgtctctgtaatattttatcttctttaaaaaaaagggggggaaataccaaagtgtgaaatactgtgctaccttccagagttcccacatgggctgggatttttttttctttttcttttttttttttttttttgagacagtcttgctccagcccaggctggagtgcagtggcatgatcttggctcactgcatgctctgccacttgggttcaagcgattctcctgcctcagcctctcaagtagcggattacaggcgcccaccaccaaaaattagcccagctaatttttgtatttttagtagagatggggtttcaccatgttggtcaggctggtcttgaactcctgacctcctgatccacccacctcagcgtcccgaagtgctgggattacaggtgtgagccaccgcgcctggcctgggctgggaatctttgttgacttctttgggaacattatctctagagtctgcttttttgtgggccagtttgtagagatgtaacatgaagccattccagaaatggtaacttaaaaaaaaaaagactacatgtctaggaaactgttgagattcaaaggaatctcactgttcctaaataaatgtgtatagtgattatgaaaagt

SEQ ID NO: 437131 - DNA, 2918 bp, Homo sapiens
gggcgcgtgcgcgcgcacctcgctcacgcgccggcgcgctccttttgcaggctcgtggcggtcggtcagcggggcgttctcccacctgtagcgactcaggttactgaaaaggcgggaaaacgctgcgatggcggcagctgggggaggaggaagataagcgcgtgaggctggggtcctggcgcgtggttggcagaggcagagacataagacgtgcacgactcgccccacagggccctcagaccccttccttccaaaggagcctccaagctcatggcctccttaggagcgaacccaaggaggacaccgcagggaccgagacctggggcggcctcctccggcttccccagcccggccccagtgccgggccccagggaggccgaggaggaggaagtcgaggaggaggaggagctggccgagatccatctgtgtgtgctgtggaattcaggatacttgggcattgcctactatgatactagtgactccactatccacttcatgccagatgccccagaccacgagagcctcaagcttctccagagagttctggatgagatcaatccccagtctgttgttacgagtgccaaacaggatgagaatatgactcgatttctgggaaagcttgcctcccaggagcacagagagcctaaaagacctgaaatcatatttttgccaagtgtggattttggtctggagataagcaaacaacgcctcctttctggaaactactccttcatcccagacgccatgactgccactgagaaaatcctcttcctctcttccattattccctttgactgcctcctcacagttcgagcacttggagggctgctgaagttcctgggtcgaagaagaatcggggttgaactggaagactataatgtcagcgtccccatcctgggctttaagaaatttatgttgactcatctggtgaacatagatcaagacacttacagtgttctacagatttttaagagtgagtctcacccctcagtgtacaaagtggccagtggactgaaggaggggctcagcctctttggaatcctcaacagatgccactgtaagtggggagagaagctgctcaggctatggttcacacgtccgactcatgacctgggggagctcagttctcgtctggacgtcattcagttttttctgctgccccagaatctggacatggctcagatgctgcatcggctcctgggtcacatcaagaacgtgcctctgattctgaaacgcatgaagttgtcccacaccaaggtcagcgactggcaggttctctacaagactgtgtacagtgccctgggcctgagggatgcctgccgctccctgccgcagtccatccagctctttcgggacattgcccaagagttctctgatgacctgcaccatatcgccagcctcattgggaaagtagtggactttgagggcagccttgctgaaaatcgcttcacagtcctccccaacatagatcctgaaattgatgagaaaaagcgaagactgatgggacttcccagtttccttactgaggttgcccgcaaggagctggagaatctggactcccgtattccttcatgcagtgtcatctacatccctctgattggcttccttctttctattccccgcctgccttccatggtagaggccagtgactttgagattaatggactggacttcatgtttctctcagaggagaagctgcactatcgtagtgcccgaaccaaggagctggatgcattgctgggggacctgcactgcgagatccgggaccaggagacgctgctgatgtaccagctacagtgccaggtgctggcacgagcagctgtcttaacccgagtattggaccttgcctcccgcctggacgtcctgctggctcttgccagtgctgcccgggactatggctactcaaggccgcgttactccccacaagtccttggggtacgaatccagaatggcagacatcctctgatggaactctgtgcccgaacctttgtgcccaactccacagaatgtggtggggacaaagggagggtcaaagtcatcactggacccaactcatcagggaagagcatatacctcaaacaggtaggcttgatcacattcatggccctggtaggcagctttgtgccagcagaggaggccgaaattggggcagtagacgccatcttcacacgaattcatagctgcgaatccatctcccttggcctctccaccttcatgatcgacctcaaccaggtggcgaaagcagtgaacaatgccactgcacagtcgctggtccttattgatgaatttggaaagggaaccaacacggtggatgggctcgcgcttctggccgctgtgctccgacactggctggcacgtggacccacatgcccccacatctttgtggccaccaactttctgagccttgttcagctacaactgctgccacaagggcccctggtgcagtatttgaccatggagacctgtgaggatggcaacgatcttgtcttcttctatcaggtttgcgaaggtgttgcgaaggccagccatgcctcccacacagctgcccaggctgggcttcctgacaagcttgtggctcgtggcaaggaggtctcagacttgatccgcagtggaaaacccatcaagcctgtcaaggatttgctaaagaagaaccaaatggaaaattgccagacattagtggataagtttatgaaactggatttggaagatcctaacctggacttgaacgttttcatgagccaggaagtgctgcctgctgccaccagcatcctctgagagtccttccagtgtcctccccagcctcctgagactccggtgggctgccatgccctctttgtttccttatctccctcagacgcagagtttttagtttctctagaaattttgtttcatattaggaataaagtttattttgaaga

SEQ ID NO: 437132 - DNA, 4368 bp, Homo sapiens
gggcgcgtgcgcgcgcacctcgctcacgcgccggcgcgctccttttgcaggctcgtggcggtcggtcagcggggcgttctcccacctgtagcgactcagagcctccaagctcatggcctccttaggagcgaacccaaggaggacaccgcagggaccgagacctggggcggcctcctccggcttccccagcccggccccagtgccgggccccagggaggccgaggaggaggaagtcgaggaggaggaggagctggccgagatccatctgtgtgtgctgtggaattcaggatacttgggcattgcctactatgatactagtgactccactatccacttcatgccagatgccccagaccacgagagcctcaagcttctccagagagttctggatgagatcaatccccagtctgttgttacgagtgccaaacaggatgagaatatgactcgatttctgggaaagcttgcctcccaggagcacagagagcctaaaagacctgaaatcatatttttgccaagtgtggattttggtctggagataagcaaacaacgcctcctttctggaaactactccttcatcccagacgccatgactgccactgagaaaatcctcttcctctcttccattattccctttgactgcctcctcacagttcgagcacttggagggctgctgaagttcctgggtcgaagaagaatcggggttgaactggaagactataatgtcagcgtccccatcctgggctttaagaaatttatgttgactcatctggtgaacatagatcaagacacttacagtgttctacagatttttaagagtgagtctcacccctcagtgtacaaagtggccagtggactgaaggaggggctcagcctctttggaatcctcaacagatgccactgtaagtggggagagaagctgctcaggctatggttcacacgtccgactcatgacctgggggagctcagttctcgtctggacgtcattcagttttttctgctgccccagaatctggacatggctcagatgctgcatcggctcctgggtcacatcaagaacgtgcctctgattctgaaacgcatgaagttgtcccacaccaaggtcagcgactggcaggttctctacaagactgtgtacagtgccctgggcctgagggatgcctgccgctccctgccgcagtccatccagctctttcgggacattgcccaagagttctctgatgacctgcaccatatcgccagcctcattgggaaagtagtggactttgagggcagccttgctgaaaatcgcttcacagtcctccccaacatagatcctgaaattgatgagaaaaagcgaagactgatgggacttcccagtttccttactgaggttgcccgcaaggagctggagaatctggactcccgtattccttcatgcagtgtcatctacatccctctgattggcttccttctttctattccccgcctgccttccatggtagaggccagtgactttgagattaatggactggacttcatgtttctctcagaggagaagctgcactatcgtagtgcccgaaccaaggagctggatgcattgctgggggacctgcactgcgagatccgggaccaggagacgctgctgatgtaccagctacagtgccaggtgctggcacgagcagctgtcttaacccgagtattggaccttgcctcccgcctggacgtcctgctggctcttgccagtgctgcccgggactatggctactcaaggccgcgttactccccacaagtccttggggtacgaatccagaatggcagacatcctctgatggaactctgtgcccgaacctttgtgcccaactccacagaatgtggtggggacaaagggagggtcaaagtcatcactggacccaactcatcagggaagagcatatacctcaaacaggtaggcttgatcacattcatggccctggtaggcagctttgtgccagcagaggaggccgaaattggggcagtagacgccatcttcacacgaattcatagctgcgaatccatctcccttggcctctccaccttcatgatcgacctcaaccaggtggcgaaagcagtgaacaatgccactgcacagtcgctggtccttattgatgaatttggaaagggaaccaacacggtggatgggctcgcgcttctggccgctgtgctccgacactggctggcacgtggacccacatgcccccacatctttgtggccaccaactttctgagccttgttcagctacaactgctgccacaagggcccctggtgcagtatttgaccatggagacctgtgaggatggcaacgatcttgtcttcttctatcaggtttgcgaaggtgttgcgaaggccagccatgcctcccacacagctgcccaggctgggcttcctgacaagcttgtggctcgtggcaaggaggtctcagacttgatccgcagtggaaaacccatcaagcctgtcaaggatttgctaaagaagaaccaaatggaaaattgccagacattagtggataagtttatgaaactggatttggaagatcctaacctggacttgaacgttttcatgagccaggaagtgctgcctgctgccaccagcatcctctgagagtccttccagtgtcctccccagcctcctgagactccggtgggctgccatgccctctttgtttccttatctccctcagacgcagagtttttagtttctctagaaattttgtttcatattaggaataaagtttattttgaagaaagatattgtttctttagtctcaaaacaagagactaggaaagatccaaaacacagagcaggagtccacaggggaacctgccctgcctcagtaaaaatacagtgttgttgctgtaggaagactcccggattctaccccaggatacttcatgagaacgaaccccttcagagaggccctacaaaacagattagagggaagacagaggggtccaagggagatggtctctcttctcaagtaggaacaccccagcctcagacagacacagcaggaaggggcctgagaggctgacagaggcaggatgggtgcaaggcaggggtggaggggagggaccagcccgggctgcaccagtgggagtggctccacccttcccacctcagagccatggggagccagggctctggcggggtgcccttggtgcaggctccctacacagtcctgctgctgccgctggggacaagccgccaagacccaggggcccagagcttcttcctttggctacgcaggatgcaggctctggagagagaacaggatgccctgtggcagggtctggagctgctacagcatggccaggcctggtttgaagaccatctgagggaggcacagcgacagcagctgcatctaggggcccttggtgagaattttctaacagatttacactcagagcctggtcgccccccgttagcccagattcaaaaggtgaacatctgtttgcagaatctgattcatgagaaggtgagtttattgttttcagtttagacttttgggaagttggactagagaggggagttgttggggtcagtgctggcttaacagaaaacacagcgaatttcccctccagttctccccaagtccactgaacaaggctagttcctgcaccacccaggattcaaaggaaagacgaagggagcagaacttgtggcagcaacaggtaaacttcaagaaggagggcaggagccccaccctacagggctgggaggagcccagaggccccatctgtttctcctccaggagttgtcaaggcagcagaaaggagtcacccagccaaaggaggagatggctcagcggggctgcaccaaggggccaagaggccctacccgtgtctaaaccctcctctcactcccctaagcctggtgaaagagtcagaagccccaggctcctttttctgtttcttaactcaacagctaaaaaatggctccaggtagtgagtcaatgaagttcagacatgttggtgtaaagtttctcctctgctcctgaaaacttcatcttcttggtgtctcatgtcctcattctcccctatatgacatgcaaaaacgatctttctttgaaatccctctgggaagaagcatgtttattgaaactgtccttcagccttaaatacaaaaataaaactgaaactgctccagaaagcagctttctccaaaaatgtctttggtttgtttctcatagggttaggaaaagtgcattgtgggaatatccattgccctctatcccagtcttgcagggtgttttgttttgttttgtttctgagatagggtctcactgtcgctcaggctgtagtgcagtggttcgaccacaactcactgcagcctcaacctcctgggctcaagtg

SEQ ID NO: 437133 - DNA, 4177 bp, Homo sapiens
gggcgcgtgcgcgcgcacctcgctcacgcgccggcgcgctccttttgcaggctcgtggcggtcggtcagcggggcgttctcccacctgtagcgactcagagcctccaagctcatggcctccttaggagcgaacccaaggaggacaccgcagggaccgagacctggggcggcctcctccggcttccccagcccggccccagtgccgggccccagggaggccgaggaggaggaagtcgaggaggaggaggagctggccgagatccatctgtgtgtgctgtggaattcaggatacttgggcattgcctactatgatactagtgactccactatccacttcatgccagatgccccagaccacgagagcctcaagcttctccagagagttctggatgagatcaatccccagtctgttgttacgagtgccaaacaggatgagaatatgactcgatttctgggaaagcttgcctcccaggagcacagagagcctaaaagacctgaaatcatatttttgccaagtgtggattttggtctggagataagcaaacaacgcctcctttctggaaactactccttcatcccagacgccatgactgccactgagaaaatcctcttcctctcttccattattccctttgactgcctcctcacagttcgagcacttggagggctgctgaagttcctgggtcgaagaagaatcggggttgaactggaagactataatgtcagcgtccccatcctgggctttaagaaatttatgttgactcatctggtgaacatagatcaagacacttacagtgttctacagatttttaagagtgagtctcacccctcagtgtacaaagtggccagtggactgaaggaggggctcagcctctttggaatcctcaacagatgccactgtaagtggggagagaagctgctcaggctatggttcacacgtccgactcatgacctgggggagctcagttctcgtctggacgtcattcagttttttctgctgccccagaatctggacatggctcagatgctgcatcggctcctgggtcacatcaagaacgtgcctctgattctgaaacgcatgaagttgtcccacaccaaggtcagcgactggcaggttctctacaagactgtgtacagtgccctgggcctgagggatgcctgccgctccctgccgcagtccatccagctctttcgggacattgcccaagagttctctgatgacctgcaccatatcgccagcctcattgggaaagtagtggactttgagggcagccttgctgaaaatcgcttcacagtcctccccaacatagatcctgaaattgatgagaaaaagcgaagactgatgggacttcccagtttccttactgaggttgcccgcaaggagctggagaatctggactcccgtattccttcatgcagtgtcatctacatccctctgattggcttccttctttctattccccgcctgccttccatggtagaggccagtgactttgagattaatggactggacttcatgtttctctcagaggagaagctgcactatcgtagtgcccgaaccaaggagctggatgcattgctgggggacctgcactgcgagatccgggaccaggagacgctgctgatgtaccagctacagtgccaggtgctggcacgagcagctgtcttaacccgagtattggaccttgcctcccgcctggacgtcctgctggctcttgccagtgctgcccgggactatggctactcaaggccgcgttactccccacaagtccttggggtacgaatccagaatggcagacatcctctgatggaactctgtgcccgaacctttgtgcccaactccacagaatgtggtggggacaaagggagggtcaaagtcatcactggacccaactcatcagggaagagcatatacctcaaacaggtaggcttgatcacattcatggccctggtaggcagctttgtgccagcagaggaggccgaaattggggcagtagacgccatcttcacacgaattcatagctgcgaatccatctcccttggcctctccaccttcatgatcgacctcaaccaggtggcgaaagcagtgaacaatgccactgcacagtcgctggtccttattgatgaatttggaaagggaaccaacacggtggatgggctcgcgcttctggccgctgtgctccgacactggctggcacgtggacccacatgcccccacatctttgtggccaccaactttctgagccttgttcagctacaactgctgccacaagggcccctggtgcagtatttgaccatggagacctgtgaggatggcaacgatcttgtcttcttctatcaggtttgcgaaggtgttgcgaaggccagccatgcctcccacacagctgcccaggctgggcttcctgacaagcttgtggctcgtggcaaggaggtctcagacttgatccgcagtggaaaacccatcaagcctgtcaaggatttgctaaagaagaaccaaatggaaaattgccagacattagtggataagtttatgaaactggatttggaagatcctaacctggacttgaacgttttcatgagccaggaagtgctgcctgctgccaccagcatcctctgagagtccttccagtgtcctccccagcctcctgagactccggtgggctgccatgccctctttgtttccttatctccctcagacgcagagtttttagtttctctagaaattttgtttcatattaggaataaagtttattttgaagaaagatattgtttctttagtctcaaaacaagagactaggaaagatccaaaacacagagcaggagtccacaggggaacctgccctgcctcagtaaaaatacagtgttgttgctgtaggaagactcccggattctaccccaggatacttcatgagaacgaaccccttcagagaggccctacaaaacagattagagggaagacagaggggtccaagggagatggtctctcttctcaagtaggaacaccccagcctcagacagacacagcaggaaggggcctgagaggctgacagaggcaggatgggtgcaaggcaggggtggaggggagggaccagcccgggctgcaccagtgggagtggctccacccttcccacctcagagccatggggagccagggctctggcggggtgcccttggtgcaggctccctacacagtcctgctgctgccgctggggacaagccgccaagacccaggggcccagagcttcttcctttggctacgcaggatgcaggctctggagagagaacaggatgccctgtggcagggtctggagctgctacagcatggccaggcctggtttgaagaccatctgagggaggcacagcgacagcagctgcatctaggggcccttggtgagaattttctaacagatttacactcagagcctggtcgccccccgttagcccagattcaaaaggtgaacatctgtttgcagaatctgattcatgagaaggtgagtttattgttttcagtttagacttttgggaagttggactagagaggggagttgttggggtcagtgctggcttaacagaaaacacagcgaatttcccctccagttctccccaagtccactgaacaaggctagttcctgcaccacccaggattcaaaggaaagacgaagggagcagaacttgtggcagcaacaggtaaacttcaagaaggagggcaggagccccaccctacagggctgggaggagcccagaggccccatctgtttctcctccaggagttgtcaaggcagcagaaaggagtcacccagccaaaggaggagatggctcagcggggctgcaccaaggggccaagaggccctacccgtgtctaaaccctcctctcactcccctaagcctggtgaaagagtcagaagccccaggctcctttttctgtttcttaactcaacagctaaaaaatggctccaggtagtgagtcaatgaagttcagacatgttggtgtaaagtttctcctctgctcctgaaaacttcatcttcttggtgtctcatgtcctcattctcccctatatgacatgcaaaaacgatctttctttgaaatccctctgggaagaagcatgtttattgaaactgtccttcagccttaaatacaaaaataaaactgaaactgctccagaaagcagctttctcc

SEQ ID NO: 437134 - DNA, 4262 bp, Homo sapiens
gggcgcgtgcgcgcgcacctcgctcacgcgccggcgcgctccttttgcaggctcgtggcggtcggtcagcggggcgttctcccacctgtagcgactcagagcctccaagctcatggcctccttaggagcgaacccaaggaggacaccgcagggaccgagacctggggcggcctcctccggcttccccagcccggccccagtgccgggccccagggaggccgaggaggaggaagtcgaggaggaggaggagctggccgagatccatctgtgtgtgctgtggaattcaggatacttgggcattgcctactatgatactagtgactccactatccacttcatgccagatgccccagaccacgagagcctcaagcttctccagagagttctggatgagatcaatccccagtctgttgttacgagtgccaaacaggatgagaatatgactcgatttctgggaaagcttgcctcccaggagcacagagagcctaaaagacctgaaatcatatttttgccaagtgtggattttggtctggagataagcaaacaacgcctcctttctggaaactactccttcatcccagacgccatgactgccactgagaaaatcctcttcctctcttccattattccctttgactgcctcctcacagttcgagcacttggagggctgctgaagttcctgggtcgaagaagaatcggggttgaactggaagactataatgtcagcgtccccatcctgggctttaagaaatttatgttgactcatctggtgaacatagatcaagacacttacagtgttctacagatttttaagagtgagtctcacccctcagtgtacaaagtggccagtggactgaaggaggggctcagcctctttggaatcctcaacagatgccactgtaagtggggagagaagctgctcaggctatggttcacacgtccgactcatgacctgggggagctcagttctcgtctggacgtcattcagttttttctgctgccccagaatctggacatggctcagatgctgcatcggctcctgggtcacatcaagaacgtgcctctgattctgaaacgcatgaagttgtcccacaccaaggtcagcgactggcaggttctctacaagactgtgtacagtgccctgggcctgagggatgcctgccgctccctgccgcagtccatccagctctttcgggacattgcccaagagttctctgatgacctgcaccatatcgccagcctcattgggaaagtagtggactttgagggcagccttgctgaaaatcgcttcacagtcctccccaacatagatcctgaaattgatgagaaaaagcgaagactgatgggacttcccagtttccttactgaggttgcccgcaaggagctggagaatctggactcccgtattccttcatgcagtgtcatctacatccctctgattggcttccttctttctattccccgcctgccttccatggtagaggccagtgactttgagattaatggactggacttcatgtttctctcagaggagaagctgcactatcgtagtgcccgaaccaaggagctggatgcattgctgggggacctgcactgcgagatccgggaccaggagacgctgctgatgtaccagctacagtgccaggtgctggcacgagcagctgtcttaacccgagtattggaccttgcctcccgcctggacgtcctgctggctcttgccagtgctgcccgggactatggctactcaaggccgcgttactccccacaagtccttggggtacgaatccagaatggcagacatcctctgatggaactctgtgcccgaacctttgtgcccaactccacagaatgtggtggggacaaagggagggtcaaagtcatcactggacccaactcatcagggaagagcatatacctcaaacaggtaggcttgatcacattcatggccctggtaggcagctttgtgccagcagaggaggccgaaattggggcagtagacgccatcttcacacgaattcatagctgcgaatccatctcccttggcctctccaccttcatgatcgacctcaaccaggtggcgaaagcagtgaacaatgccactgcacagtcgctggtccttattgatgaatttggaaagggaaccaacacggtggatgggctcgcgcttctggccgctgtgctccgacactggctggcacgtggacccacatgcccccacatctttgtggccaccaactttctgagccttgttcagctacaactgctgccacaagggcccctggtgcagtatttgaccatggagacctgtgaggatggcaacgatcttgtcttcttctatcaggtttgcgaaggtgttgcgaaggccagccatgcctcccacacagctgcccaggctgggcttcctgacaagcttgtggctcgtggcaaggaggtctcagacttgatccgcagtggaaaacccatcaagcctgtcaaggatttgctaaagaagaaccaaatggaaaattgccagacattagtggataagtttatgaaactggatttggaagatcctaacctggacttgaacgttttcatgagccaggaagtgctgcctgctgccaccagcatcctctgagagtccttccagtgtcctccccagcctcctgagactccggtgggctgccatgccctctttgtttccttatctccctcagacgcagagtttttagtttctctagaaattttgtttcatattaggaataaagtttattttgaagaaagatattgtttctttagtctcaaaacaagagactaggaaagatccaaaacacagagcaggagtccacaggggaacctgccctgcctcagtaaaaatacagtgttgttgctgtaggaagactcccggattctaccccaggatacttcatgagaacgaaccccttcagagaggccctacaaaacagattagagggaagacagaggggtccaagggagatggtctctcttctcaagtaggaacaccccagcctcagacagacacagcaggaaggggcctgagaggctgacagaggcaggatgggtgcaaggcaggggtggaggggagggaccagcccgggctgcaccagtgggagtggctccacccttcccacctcagagccatggggagccagggctctggcggggtgcccttggtgcaggctccctacacagtcctgctgctgccgctggggacaagccgccaagacccaggggcccagagcttcttcctttggctacgcaggatgcaggctctggagagagaacaggatgccctgtggcagggtctggagctgctacagcatggccaggcctggtttgaagaccatctgagggaggcacagcgacagcagctgcatctaggggcccttggtgagaattttctaacagatttacactcagagcctggtcgccccccgttagcccagattcaaaaggtgaacatctgtttgcagaatctgattcatgagaagttctccccaagtccactgaacaaggctagttcctgcaccacccaggattcaaaggaaagacgaagggagcagaacttgtggcagcaacaggtaaacttcaagaaggagggcaggagccccaccctacagggctgggaggagcccagaggccccatctgtttctcctccaggagttgtcaaggcagcagaaaggagtcacccagccaaaggaggagatggctcagcggggctgcaccaaggggccaagaggccctacccgtgtctaaaccctcctctcactcccctaagcctggtgaaagagtcagaagccccaggctcctttttctgtttcttaactcaacagctaaaaaatggctccaggtagtgagtcaatgaagttcagacatgttggtgtaaagtttctcctctgctcctgaaaacttcatcttcttggtgtctcatgtcctcattctcccctatatgacatgcaaaaacgatctttctttgaaatccctctgggaagaagcatgtttattgaaactgtccttcagccttaaatacaaaaataaaactgaaactgctccagaaagcagctttctccaaaaatgtctttggtttgtttctcatagggttaggaaaagtgcattgtgggaatatccattgccctctatcccagtcttgcagggtgttttgttttgttttgtttctgagatagggtctcactgtcgctcaggctgtagtgcagtggttcgaccacaactcactgcagcctcaacctcctgggctcaagtg

SEQ ID NO: 437135 - DNA, 4285 bp, Homo sapiens
gggcgcgtgcgcgcgcacctcgctcacgcgccggcgcgctccttttgcaggctcgtggcggtcggtcagcggggcgttctcccacctgtagcgactcagagcctccaagctcatggcctccttaggagcgaacccaaggaggacaccgcagggaccgagacctggggcggcctcctccggcttccccagcccggccccagtgccgggccccagggaggccgaggaggaggaagtcgaggaggaggaggagctggccgagatccatctgtgtgtgctgtggaattcaggatacttgggcattgcctactatgatactagtgactccactatccacttcatgccagatgccccagaccacgagagcctcaagcttctccagagagttctggatgagatcaatccccagtctgttgttacgagtgccaaacaggatgagaatatgactcgatttctgggaaagcttgcctcccaggagcacagagagcctaaaagacctgaaatcatatttttgccaagtgtggattttggtctggagataagcaaacaacgcctcctttctggaaactactccttcatcccagacgccatgactgccactgagaaaatcctcttcctctcttccattattccctttgactgcctcctcacagttcgagcacttggagggctgctgaagttcctgggtcgaagaagaatcggggttgaactggaagactataatgtcagcgtccccatcctgggctttaagaaatttatgttgactcatctggtgaacatagatcaagacacttacaggaatcctcaacagatgccactgtaagtggggagagaagctgctcaggctatggttcacacgtccgactcatgacctgggggagctcagttctcgtctggacgtcattcagttttttctgctgccccagaatctggacatggctcagatgctgcatcggctcctgggtcacatcaagaacgtgcctctgattctgaaacgcatgaagttgtcccacaccaaggtcagcgactggcaggttctctacaagactgtgtacagtgccctgggcctgagggatgcctgccgctccctgccgcagtccatccagctctttcgggacattgcccaagagttctctgatgacctgcaccatatcgccagcctcattgggaaagtagtggactttgagggcagccttgctgaaaatcgcttcacagtcctccccaacatagatcctgaaattgatgagaaaaagcgaagactgatgggacttcccagtttccttactgaggttgcccgcaaggagctggagaatctggactcccgtattccttcatgcagtgtcatctacatccctctgattggcttccttctttctattccccgcctgccttccatggtagaggccagtgactttgagattaatggactggacttcatgtttctctcagaggagaagctgcactatcgtagtgcccgaaccaaggagctggatgcattgctgggggacctgcactgcgagatccgggaccaggagacgctgctgatgtaccagctacagtgccaggtgctggcacgagcagctgtcttaacccgagtattggaccttgcctcccgcctggacgtcctgctggctcttgccagtgctgcccgggactatggctactcaaggccgcgttactccccacaagtccttggggtacgaatccagaatggcagacatcctctgatggaactctgtgcccgaacctttgtgcccaactccacagaatgtggtggggacaaagggagggtcaaagtcatcactggacccaactcatcagggaagagcatatacctcaaacaggtaggcttgatcacattcatggccctggtaggcagctttgtgccagcagaggaggccgaaattggggcagtagacgccatcttcacacgaattcatagctgcgaatccatctcccttggcctctccaccttcatgatcgacctcaaccaggtggcgaaagcagtgaacaatgccactgcacagtcgctggtccttattgatgaatttggaaagggaaccaacacggtggatgggctcgcgcttctggccgctgtgctccgacactggctggcacgtggacccacatgcccccacatctttgtggccaccaactttctgagccttgttcagctacaactgctgccacaagggcccctggtgcagtatttgaccatggagacctgtgaggatggcaacgatcttgtcttcttctatcaggtttgcgaaggtgttgcgaaggccagccatgcctcccacacagctgcccaggctgggcttcctgacaagcttgtggctcgtggcaaggaggtctcagacttgatccgcagtggaaaacccatcaagcctgtcaaggatttgctaaagaagaaccaaatggaaaattgccagacattagtggataagtttatgaaactggatttggaagatcctaacctggacttgaacgttttcatgagccaggaagtgctgcctgctgccaccagcatcctctgagagtccttccagtgtcctccccagcctcctgagactccggtgggctgccatgccctctttgtttccttatctccctcagacgcagagtttttagtttctctagaaattttgtttcatattaggaataaagtttattttgaagaaagatattgtttctttagtctcaaaacaagagactaggaaagatccaaaacacagagcaggagtccacaggggaacctgccctgcctcagtaaaaatacagtgttgttgctgtaggaagactcccggattctaccccaggatacttcatgagaacgaaccccttcagagaggccctacaaaacagattagagggaagacagaggggtccaagggagatggtctctcttctcaagtaggaacaccccagcctcagacagacacagcaggaaggggcctgagaggctgacagaggcaggatgggtgcaaggcaggggtggaggggagggaccagcccgggctgcaccagtgggagtggctccacccttcccacctcagagccatggggagccagggctctggcggggtgcccttggtgcaggctccctacacagtcctgctgctgccgctggggacaagccgccaagacccaggggcccagagcttcttcctttggctacgcaggatgcaggctctggagagagaacaggatgccctgtggcagggtctggagctgctacagcatggccaggcctggtttgaagaccatctgagggaggcacagcgacagcagctgcatctaggggcccttggtgagaattttctaacagatttacactcagagcctggtcgccccccgttagcccagattcaaaaggtgaacatctgtttgcagaatctgattcatgagaaggtgagtttattgttttcagtttagacttttgggaagttggactagagaggggagttgttggggtcagtgctggcttaacagaaaacacagcgaatttcccctccagttctccccaagtccactgaacaaggctagttcctgcaccacccaggattcaaaggaaagacgaagggagcagaacttgtggcagcaacaggtaaacttcaagaaggagggcaggagccccaccctacagggctgggaggagcccagaggccccatctgtttctcctccaggagttgtcaaggcagcagaaaggagtcacccagccaaaggaggagatggctcagcggggctgcaccaaggggccaagaggccctacccgtgtctaaaccctcctctcactcccctaagcctggtgaaagagtcagaagccccaggctcctttttctgtttcttaactcaacagctaaaaaatggctccaggtagtgagtcaatgaagttcagacatgttggtgtaaagtttctcctctgctcctgaaaacttcatcttcttggtgtctcatgtcctcattctcccctatatgacatgcaaaaacgatctttctttgaaatccctctgggaagaagcatgtttattgaaactgtccttcagccttaaatacaaaaataaaactgaaactgctccagaaagcagctttctccaaaaatgtctttggtttgtttctcatagggttaggaaaagtgcattgtgggaatatccattgccctctatcccagtcttgcagggtgttttgttttgttttgtttctgagatagggtctcactgtcgctcaggctgtagtgcagtggttcgaccacaactcactgcagcctcaacctcctgggctcaagtg

SEQ ID NO: 437136 - DNA, 4395 bp, Homo sapiens
gggcgcgtgcgcgcgcacctcgctcacgcgccggcgcgctccttttgcaggctcgtggcggtcggtcagcggggcgttctcccacctgtagcgactcagggccctcagaccccttccttccaaaggagcctccaagctcatggcctccttaggagcgaacccaaggaggacaccgcagggaccgagacctggggcggcctcctccggcttccccagcccggccccagtgccgggccccagggaggccgaggaggaggaagtcgaggaggaggaggagctggccgagatccatctgtgtgtgctgtggaattcaggatacttgggcattgcctactatgatactagtgactccactatccacttcatgccagatgccccagaccacgagagcctcaagcttctccagagagttctggatgagatcaatccccagtctgttgttacgagtgccaaacaggatgagaatatgactcgatttctgggaaagcttgcctcccaggagcacagagagcctaaaagacctgaaatcatatttttgccaagtgtggattttggtctggagataagcaaacaacgcctcctttctggaaactactccttcatcccagacgccatgactgccactgagaaaatcctcttcctctcttccattattccctttgactgcctcctcacagttcgagcacttggagggctgctgaagttcctgggtcgaagaagaatcggggttgaactggaagactataatgtcagcgtccccatcctgggctttaagaaatttatgttgactcatctggtgaacatagatcaagacacttacagtgttctacagatttttaagagtgagtctcacccctcagtgtacaaagtggccagtggactgaaggaggggctcagcctctttggaatcctcaacagatgccactgtaagtggggagagaagctgctcaggctatggttcacacgtccgactcatgacctgggggagctcagttctcgtctggacgtcattcagttttttctgctgccccagaatctggacatggctcagatgctgcatcggctcctgggtcacatcaagaacgtgcctctgattctgaaacgcatgaagttgtcccacaccaaggtcagcgactggcaggttctctacaagactgtgtacagtgccctgggcctgagggatgcctgccgctccctgccgcagtccatccagctctttcgggacattgcccaagagttctctgatgacctgcaccatatcgccagcctcattgggaaagtagtggactttgagggcagccttgctgaaaatcgcttcacagtcctccccaacatagatcctgaaattgatgagaaaaagcgaagactgatgggacttcccagtttccttactgaggttgcccgcaaggagctggagaatctggactcccgtattccttcatgcagtgtcatctacatccctctgattggcttccttctttctattccccgcctgccttccatggtagaggccagtgactttgagattaatggactggacttcatgtttctctcagaggagaagctgcactatcgtagtgcccgaaccaaggagctggatgcattgctgggggacctgcactgcgagatccgggaccaggagacgctgctgatgtaccagctacagtgccaggtgctggcacgagcagctgtcttaacccgagtattggaccttgcctcccgcctggacgtcctgctggctcttgccagtgctgcccgggactatggctactcaaggccgcgttactccccacaagtccttggggtacgaatccagaatggcagacatcctctgatggaactctgtgcccgaacctttgtgcccaactccacagaatgtggtggggacaaagggagggtcaaagtcatcactggacccaactcatcagggaagagcatatacctcaaacaggtaggcttgatcacattcatggccctggtaggcagctttgtgccagcagaggaggccgaaattggggcagtagacgccatcttcacacgaattcatagctgcgaatccatctcccttggcctctccaccttcatgatcgacctcaaccaggtggcgaaagcagtgaacaatgccactgcacagtcgctggtccttattgatgaatttggaaagggaaccaacacggtggatgggctcgcgcttctggccgctgtgctccgacactggctggcacgtggacccacatgcccccacatctttgtggccaccaactttctgagccttgttcagctacaactgctgccacaagggcccctggtgcagtatttgaccatggagacctgtgaggatggcaacgatcttgtcttcttctatcaggtttgcgaaggtgttgcgaaggccagccatgcctcccacacagctgcccaggctgggcttcctgacaagcttgtggctcgtggcaaggaggtctcagacttgatccgcagtggaaaacccatcaagcctgtcaaggatttgctaaagaagaaccaaatggaaaattgccagacattagtggataagtttatgaaactggatttggaagatcctaacctggacttgaacgttttcatgagccaggaagtgctgcctgctgccaccagcatcctctgagagtccttccagtgtcctccccagcctcctgagactccggtgggctgccatgccctctttgtttccttatctccctcagacgcagagtttttagtttctctagaaattttgtttcatattaggaataaagtttattttgaagaaagatattgtttctttagtctcaaaacaagagactaggaaagatccaaaacacagagcaggagtccacaggggaacctgccctgcctcagtaaaaatacagtgttgttgctgtaggaagactcccggattctaccccaggatacttcatgagaacgaaccccttcagagaggccctacaaaacagattagagggaagacagaggggtccaagggagatggtctctcttctcaagtaggaacaccccagcctcagacagacacagcaggaaggggcctgagaggctgacagaggcaggatgggtgcaaggcaggggtggaggggagggaccagcccgggctgcaccagtgggagtggctccacccttcccacctcagagccatggggagccagggctctggcggggtgcccttggtgcaggctccctacacagtcctgctgctgccgctggggacaagccgccaagacccaggggcccagagcttcttcctttggctacgcaggatgcaggctctggagagagaacaggatgccctgtggcagggtctggagctgctacagcatggccaggcctggtttgaagaccatctgagggaggcacagcgacagcagctgcatctaggggcccttggtgagaattttctaacagatttacactcagagcctggtcgccccccgttagcccagattcaaaaggtgaacatctgtttgcagaatctgattcatgagaaggtgagtttattgttttcagtttagacttttgggaagttggactagagaggggagttgttggggtcagtgctggcttaacagaaaacacagcgaatttcccctccagttctccccaagtccactgaacaaggctagttcctgcaccacccaggattcaaaggaaagacgaagggagcagaacttgtggcagcaacaggtaaacttcaagaaggagggcaggagccccaccctacagggctgggaggagcccagaggccccatctgtttctcctccaggagttgtcaaggcagcagaaaggagtcacccagccaaaggaggagatggctcagcggggctgcaccaaggggccaagaggccctacccgtgtctaaaccctcctctcactcccctaagcctggtgaaagagtcagaagccccaggctcctttttctgtttcttaactcaacagctaaaaaatggctccaggtagtgagtcaatgaagttcagacatgttggtgtaaagtttctcctctgctcctgaaaacttcatcttcttggtgtctcatgtcctcattctcccctatatgacatgcaaaaacgatctttctttgaaatccctctgggaagaagcatgtttattgaaactgtccttcagccttaaatacaaaaataaaactgaaactgctccagaaagcagctttctccaaaaatgtctttggtttgtttctcatagggttaggaaaagtgcattgtgggaatatccattgccctctatcccagtcttgcagggtgttttgttttgttttgtttctgagatagggtctcactgtcgctcaggctgtagtgcagtggttcgaccacaactcactgcagcctcaacctcctgggctcaagtg

SEQ ID NO: 437137 - DNA, 4509 bp, Homo sapiens
gggcgcgtgcgcgcgcacctcgctcacgcgccggcgcgctccttttgcaggctcgtggcggtcggtcagcggggcgttctcccacctgtagcgactcagagcctccaagctcatggcctccttaggagcgaacccaaggaggacaccgcagggaccgagacctggggcggcctcctccggcttccccagcccggccccagtgccgggccccagggaggccgaggaggaggaagtcgaggaggaggaggagctggccgagatccatctgtgtgtgctgtggaattcaggatacttgggcattgcctactatgatactagtgactccactatccacttcatgccagatgccccagaccacgagagcctcaagcttctccagagagttctggatgagatcaatccccagtctgttgttacgagtgccaaacaggatgagaatatgactcgatttctgggaaagcttgcctcccaggagcacagagagcctaaaagacctgaaatcatatttttgccaagtgtggattttggtctggagataagcaaacaacgcctcctttctggaaactactccttcatcccagacgccatgactgccactgagaaaatcctcttcctctcttccattattccctttgactgcctcctcacagttcgagcacttggagggctgctgaagttcctgggtcgaagaagaatcggggttgaactggaagactataatgtcagcgtccccatcctgggctttaagaaatttatgttgactcatctggtgaacatagatcaagacacttacaggaatcctcaacagatgccactgtaagtggggagagaagctgctcaggctatggttcacacgtccgactcatgacctgggggagctcagttctcgtctggacgtcattcagttttttctgctgccccagaatctggacatggctcagatgctgcatcggctcctgggtcacatcaagaacgtgcctctgattctgaaacgcatgaagttgtcccacaccaaggtcagcgactggcaggttctctacaagactgtgtacagtgccctgggcctgagggatgcctgccgctccctgccgcagtccatccagctctttcgggacattgcccaagagttctctgatgacctgcaccatatcgccagcctcattgggaaagtagtggactttgagggcagccttgctgaaaatcgcttcacagtcctccccaacatagatcctgaaattgatgagaaaaagcgaagactgatgggacttcccagtttccttactgaggttgcccgcaaggagctggagaatctggactcccgtattccttcatgcagtgtcatctacatccctctgattggcttccttctttctattccccgcctgccttccatggtagaggccagtgactttgagattaatggactggacttcatgtttctctcagaggagaagctgcactatcgtagtgcccgaaccaaggagctggatgcattgctgggggacctgcactgcgagatccgggaccaggagacgctgctgatgtaccagctacagtgccaggtgctggcacgagcagctgtcttaacccgagtattggaccttgcctcccgcctggacgtcctgctggctcttgccagtgctgcccgggactatggctactcaaggccgcgttactccccacaagtccttggggtacgaatccagaatggcagacatcctctgatggaactctgtgcccgaacctttgtgcccaactccacagaatgtggtggggacaaagggagggtcaaagtcatcactggacccaactcatcagggaagagcatatacctcaaacaggtaggcttgatcacattcatggccctggtaggcagctttgtgccagcagaggaggccgaaattggggcagtagacgccatcttcacacgaattcatagctgcgaatccatctcccttggcctctccaccttcatgatcgacctcaaccaggtggcgaaagcagtgaacaatgccactgcacagtcgctggtccttattgatgaatttggaaagggaaccaacacggtggatgggctcgcgcttctggccgctgtgctccgacactggctggcacgtggacccacatgcccccacatctttgtggccaccaactttctgagccttgttcagctacaactgctgccacaagggcccctggtgcagtatttggattggccaagggtttcaggacaggaaggaggtgattgatgatacactgtcttttattctcttttaagaccatggagacctgtgaggatggcaacgatcttgtcttcttctatcaggtttgcgaaggtgttgcgaaggccagccatgcctcccacacagctgcccaggctgggcttcctgacaagcttgtggctcgtggcaaggaggtgatgagatccaaatgtgcaaccacctccacatcagagctccctttcattcctagtcctactgggcctgggtctaggtccacaggatttctgacccttatttccccttctcttccccactccccttactcctcccaccttcttgcttgttcctaggtctcagacttgatccgcagtggaaaacccatcaagcctgtcaaggatttgctaaagaagaaccaaatggaaaattgccagacattagtggataagtttatgaaactggatttggaagatcctaacctggacttgaacgttttcatgagccaggaagtgctgcctgctgccaccagcatcctctgagagtccttccagtgtcctccccagcctcctgagactccggtgggctgccatgccctctttgtttccttatctccctcagacgcagagtttttagtttctctagaaattttgtttcatattaggaataaagtttattttgaagaaagatattgtttctttagtctcaaaacaagagactaggaaagatccaaaacacagagcaggagtccacaggggaacctgccctgcctcagtaaaaatacagtgttgttgctgtaggaagactcccggattctaccccaggatacttcatgagaacgaaccccttcagagaggccctacaaaacagattagagggaagacagaggggtccaagggagatggtctctcttctcaagtaggaacaccccagcctcagacagacacagcaggaaggggcctgagaggctgacagaggcaggatgggtgcaaggcaggggtggaggggagggaccagcccgggctgcaccagtgggagtggctccacccttcccacctcagagccatggggagccagggctctggcggggtgcccttggtgcaggctccctacacagtcctgctgctgccgctggggacaagccgccaagacccaggggcccagagcttcttcctttggctacgcaggatgcaggctctggagagagaacaggatgccctgtggcagggtctggagctgctacagcatggccaggcctggtttgaagaccatctgagggaggcacagcgacagcagctgcatctaggggcccttggtgagaattttctaacagatttacactcagagcctggtcgccccccgttagcccagattcaaaaggtgaacatctgtttgcagaatctgattcatgagaaggtgagtttattgttttcagtttagacttttgggaagttggactagagaggggagttgttggggtcagtgctggcttaacagaaaacacagcgaatttcccctccagttctccccaagtccactgaacaaggctagttcctgcaccacccaggattcaaaggaaagacgaagggagcagaacttgtggcagcaacaggtaaacttcaagaaggagggcaggagccccaccctacagggctgggaggagcccagaggccccatctgtttctcctccaggagttgtcaaggcagcagaaaggagtcacccagccaaaggaggagatggctcagcggggctgcaccaaggggccaagaggccctacccgtgtctaaaccctcctctcactcccctaagcctggtgaaagagtcagaagccccaggctcctttttctgtttcttaactcaacagctaaaaaatggctccaggtagtgagtcaatgaagttcagacatgttggtgtaaagtttctcctctgctcctgaaaacttcatcttcttggtgtctcatgtcctcattctcccctatatgacatgcaaaaacgatctttctttgaaatccctctgggaagaagcatgtttattgaaactgtccttcagccttaaatacaaaaataaaactgaaactgctccagaaagcagctttctccaaaaatgtctttggtttgtttctcatagggttaggaaaagtgcattgtgggaatatccattgccctctatcccagtcttgcagggtgttttgttttgttttgtttctgagatagggtctcactgtcgctcaggctgtagtgcagtggttcgaccacaactcactgcagcctcaacctcctgggctcaagtg

SEQ ID NO: 437138 - DNA, 3667 bp, Homo sapiens
gggcgcgtgcgcgcgcacctcgctcacgcgccggcgcgctccttttgcaggctcgtggcggtcggtcagcggggcgttctcccacctgtagcgactcagagcctccaagctcatggcctccttaggagcgaacccaaggaggacaccgcagggaccgagacctggggcggcctcctccggcttccccagcccggccccagtgccgggccccagggaggccgaggaggaggaagtcgaggaggaggaggagctggccgagatccatctgtgtgtgctgtggaattcaggatacttgggcattgcctactatgatactagtgactccactatccacttcatgccagatgccccagaccacgagagcctcaagcttctccagagagttctggatgagatcaatccccagtctgttgttacgagtgccaaacaggatgagaatatgactcgatttctgggaaagcttgcctcccaggagcacagagagcctaaaagacctgaaatcatatttttgccaagtgtggattttggtctggagataagcaaacaacgcctcctttctggaaactactccttcatcccagacgccatgactgccactgagaaaatcctcttcctctcttccattattccctttgactgcctcctcacagttcgagcacttggagggctgctgaagttcctgggtcgaagaagaatcggggttgaactggaagactataatgtcagcgtccccatcctgggctttaagaaatttatgttgactcatctggtgaacatagatcaagacacttacaggaatcctcaacagatgccactgtaagtggggagagaagctgctcaggctatggttcacacgtccgactcatgacctgggggagctcagttctcgtctggacgtcattcagttttttctgctgccccagaatctggacatggctcagatgctgcatcggctcctgggtcacatcaagaacgtgcctctgattctgaaacgcatgaagttgtcccacaccaaggtcagcgactggcaggttctctacaagactgtgtacagtgccctgggcctgagggatgcctgccgctccctgccgcagtccatccagctctttcgggacattgcccaagagttctctgatgacctgcaccatatcgccagcctcattgggaaagtagtggactttgagggcagccttgctgaaaatcgcttcacagtcctccccaacatagatcctgaaattgatgagaaaaagcgaagactgatgggacttcccagtttccttactgaggttgcccgcaaggagctggagaatctggactcccgtattccttcatgcagtgtcatctacatccctctgattggcttccttctttctattccccgcctgccttccatggtagaggccagtgactttgagattaatggactggacttcatgtttctctcagaggagaagctgcactatcgtagtgcccgaaccaaggagctggatgcattgctgggggacctgcactgcgagatccgggaccaggagacgctgctgatgtaccagctacagtgccaggtgctggcacgagcagctgtcttaacccgagtattggaccttgcctcccgcctggacgtcctgctggctcttgccagtgctgcccgggactatggctactcaaggccgcgttactccccacaagtccttggggtacgaatccagaatggcagacatcctctgatggaactctgtgcccgaacctttgtgcccaactccacagaatgtggtggggacaaagggagggtcaaagtcatcactggacccaactcatcagggaagagcatatacctcaaacaggtaggcttgatcacattcatggccctggtaggcagctttgtgccagcagaggaggccgaaattggggcagtagacgccatcttcacacgaattcatagctgcgaatccatctcccttggcctctccaccttcatgatcgacctcaaccaggtggcgaaagcagtgaacaatgccactgcacagtcgctggtccttattgatgaatttggaaagggaaccaacacggtggatgggctcgcgcttctggccgctgtgctccgacactggctggcacgtggacccacatgcccccacatctttgtggccaccaactttctgagccttgttcagctacaactgctgccacaagggcccctggtgcagtatttggattggccaagggtttcaggacaggaaggaggtgattgatgatacactgtcttttattctcttttaagaccatggagacctgtgaggatggcaacgatcttgtcttcttctatcaggtctcagacttgatccgcagtggaaaacccatcaagcctgtcaaggatttgctaaagaagaaccaaatggaaaattgccagacattagtggataagtttatgaaactggatttggaagatcctaacctggacttgaacgttttcatgagccaggaagtgctgcctgctgccaccagcatcctctgagagtccttccagtgtcctccccagcctcctgagactccggaagactcccggattctaccccaggatacttcatgagaacgaaccccttcagagaggccctacaaaacagattagagggaagacagaggggtccaagggagatggtctctcttctcaagtaggaacaccccagcctcagacagacacagcaggaaggggcctgagaggctgacagaggcaggatgggtgcaaggcaggggtggaggggagggaccagcccgggctgcaccagtgggagtggctccacccttcccacctcagagccatggggagccagggctctggcggggtgcccttggtgcaggctccctacacagtcctgctgctgccgctggggacaagccgccaagacccaggggcccagagcttcttcctttggctacgcaggatgcaggctctggagagagaacaggatgccctgtggcagggtctggagctgctacagcatggccaggcctggtttgaagaccatctgagggaggcacagcgacagcagctgcatctaggggcccttggtgagaattttctaacagatttacactcagagcctggtcgccccccgttagcccagattcaaaaggtgaacatctgtttgcagaatctgattcatgagaagttctccccaagtccactgaacaaggctagttcctgcaccacccaggattcaaaggaaagacgaagggagcagaacttgtggcagcaacaggagttgtcaaggcagcagaaaggagtcacccagccaaaggaggagatggctcagcggggctgcaccaaggggccaagaggccctacccgtgtctaaaccctcctctcactcccctaagcctggtgaaagagtcagaagccccaggctcctttttctgtttcttaactcaacagctaaaaaatggctccaggtagtgagtcaatgaagttcagacatgttggtgtaaagtttctcctctgctcctgaaaacttcatcttcttggtgtctcatgtcctcattctcccctatatgacatgcaaaaacgatctttctttgaaatccctctgggaagaagcatgtttattgaaactgtccttcagccttaaatacaaaaataaaactgaaactgctccagaaagcagctttctcc

SEQ ID NO: 437139 - DNA, 2901 bp, Homo sapiens
gggcgcgtgcgcgcgcacctcgctcacgcgccggcgcgctccttttgcaggctcgtggcggtcggtcagcggggcgttctcccacctgtagcgactcagagcctccaagctcatggcctccttaggagcgaacccaaggaggacaccgcagggaccgagacctggggcggcctcctccggcttccccagcccggccccagtgccgggccccagggaggccgaggaggaggaagtcgaggaggaggaggagctggccgagatccatctgtgtgtgctgtggaattcaggatacttgggcattgcctactatgatactagtgactccactatccacttcatgccagatgccccagaccacgagagcctcaagcttctccagagagttctggatgagatcaatccccagtctgttgttacgagtgccaaacaggatgagaatatgactcgatttctgggaaagcttgcctcccaggagcacagagagcctaaaagacctgaaatcatatttttgccaagtgtggattttggtctggagataagcaaacaacgcctcctttctggaaactactccttcatcccagacgccatgactgccactgagaaaatcctcttcctctcttccattattccctttgactgcctcctcacagttcgagcacttggagggctgctgaagttcctgggtcgaagaagaatcggggttgaactggaagactataatgtcagcgtccccatcctgggctttaagaaatttatgttgactcatctggtgaacatagatcaagacacttacaggaatcctcaacagatgccactgtaagtggggagagaagctgctcaggctatggttcacacgtccgactcatgacctgggggagctcagttctcgtctggacgtcattcagttttttctgctgccccagaatctggacatggctcagatgctgcatcggctcctgggtcacatcaagaacgtgcctctgattctgaaacgcatgaagttgtcccacaccaaggtcagcgactggcaggttctctacaagactgtgtacagtgccctgggcctgagggatgcctgccgctccctgccgcagtccatccagctctttcgggacattgcccaagagttctctgatgacctgcaccatatcgccagcctcattgggaaagtagtggactttgagggcagccttgctgaaaatcgcttcacagtcctccccaacatagatcctgaaattgatgagaaaaagcgaagactgatgggacttcccagtttccttactgaggttgcccgcaaggagctggagaatctggactcccgtattccttcatgcagtgtcatctacatccctctgattggcttccttctttctattccccgcctgccttccatggtagaggccagtgactttgagattaatggactggacttcatgtttctctcagaggagaagctgcactatcgtagtgcccgaaccaaggagctggatgcattgctgggggacctgcactgcgagatccgggaccaggagacgctgctgatgtaccagctacagtgccaggtgctggcacgagcagctgtcttaacccgagtattggaccttgcctcccgcctggacgtcctgctggctcttgccagtgctgcccgggactatggctactcaaggccgcgttactccccacaagtccttggggtacgaatccagaatggcagacatcctctgatggaactctgtgcccgaacctttgtgcccaactccacagaatgtggtggggacaaagggagggtcaaagtcatcactggacccaactcatcagggaagagcatatacctcaaacaggtaggcttgatcacattcatggccctggtaggcagctttgtgccagcagaggaggccgaaattggggcagtagacgccatcttcacacgaattcatagctgcgaatccatctcccttggcctctccaccttcatgatcgacctcaaccaggtggcgaaagcagtgaacaatgccactgcacagtcgctggtccttattgatgaatttggaaagggaaccaacacggtggatgggctcgcgcttctggccgctgtgctccgacactggctggcacgtggacccacatgcccccacatctttgtggccaccaactttctgagccttgttcagctacaactgctgccacaagggcccctggtgcagtatttggattggccaagggtttcaggacaggaaggaggtgattgatgatacactgtcttttattctcttttaagaccatggagacctgtgaggatggcaacgatcttgtcttcttctatcaggtttgcgaaggtgttgcgaaggccagccatgcctcccacacagctgcccaggctgggcttcctgacaagcttgtggctcgtggcaaggaggtgatgagatccaaatgtgcaaccacctccacatcagagctccctttcattcctagtcctactgggcctgggtctaggtccacaggatttctgacccttatttccccttctcttccccactccccttactcctcccaccttcttgcttgttcctaggtctcagacttgatccgcagtggaaaacccatcaagcctgtcaaggatttgctaaagaagaaccaaatggaaaattgccagacattagtggataagtttatgaaactggatttggaagatcctaacctggacttgaacgttttcatgagccaggaagtgctgcctgctgccaccagcatcctctgagagtccttccagtgtcctccccagcctcctgagactccggtgggctgccatgccctctttgtttccttatctccctcagacgcagagtttttagtttctctagaaattttgtttcatattaggaataaagtttattttgaaga

SEQ ID NO: 437140 - DNA, 2629 bp, Homo sapiens
gggcgcgtgcgcgcgcacctcgctcacgcgccggcgcgctccttttgcaggctcgtggcggtcggtcagcggggcgttctcccacctgtagcgactcagagcctccaagctcatggcctccttaggagcgaacccaaggaggacaccgcagggaccgagacctggggcggcctcctccggcttccccagcccggccccagtgccgggccccagggaggccgaggaggaggaagtcgaggaggaggaggagctggccgagatccatctgtgtgtgctgtggaattcaggatacttgggcattgcctactatgatactagtgactccactatccacttcatgccagatgccccagaccacgagagcctcaagcttctccagagagttctggatgagatcaatccccagtctgttgttacgagtgccaaacaggatgagaatatgactcgatttctgggaaagcttgcctcccaggagcacagagagcctaaaagacctgaaatcatatttttgccaagtgtggattttggtctggagataagcaaacaacgcctcctttctggaaactactccttcatcccagacgccatgactgccactgagaaaatcctcttcctctcttccattattccctttgactgcctcctcacagttcgagcacttggagggctgctgaagttcctgggtcgaagaagaatcggggttgaactggaagactataatgtcagcgtccccatcctgggctttaagaaatttatgttgactcatctggtgaacatagatcaagacacttacaggaatcctcaacagatgccactgtaagtggggagagaagctgctcaggctatggttcacacgtccgactcatgacctgggggagctcagttctcgtctggacgtcattcagttttttctgctgccccagaatctggacatggctcagatgctgcatcggctcctgggtcacatcaagaacgtgcctctgattctgaaacgcatgaagttgtcccacaccaaggtcagcgactggcaggttctctacaagactgtgtacagtgccctgggcctgagggatgcctgccgctccctgccgcagtccatccagctctttcgggacattgcccaagagttctctgatgacctgcaccatatcgccagcctcattgggaaagtagtggactttgagggcagccttgctgaaaatcgcttcacagtcctccccaacatagatcctgaaattgatgagaaaaagcgaagactgatgggacttcccagtttccttactgaggttgcccgcaaggagctggagaatctggactcccgtattccttcatgcagtgtcatctacatccctctgattggcttccttctttctattccccgcctgccttccatggtagaggccagtgactttgagattaatggactggacttcatgtttctctcagaggagaagctgcactatcgtagtgcccgaaccaaggagctggatgcattgctgggggacctgcactgcgagatccgggaccaggagacgctgctgatgtaccagctacagtgccaggtgctggcacgagcagctgtcttaacccgagtattggaccttgcctcccgcctggacgtcctgctggctcttgccagtgctgcccgggactatggctactcaaggccgcgttactccccacaagtccttggggtacgaatccagaatggcagacatcctctgatggaactctgtgcccgaacctttgtgcccaactccacagaatgtggtggggacaaagggagggtcaaagtcatcactggacccaactcatcagggaagagcatatacctcaaacaggtaggcttgatcacattcatggccctggtaggcagctttgtgccagcagaggaggccgaaattggggcagtagacgccatcttcacacgaattcatagctgcgaatccatctcccttggcctctccaccttcatgatcgacctcaaccaggtggcgaaagcagtgaacaatgccactgcacagtcgctggtccttattgatgaatttggaaagggaaccaacacggtggatgggctcgcgcttctggccgctgtgctccgacactggctggcacgtggacccacatgcccccacatctttgtggccaccaactttctgagccttgttcagctacaactgctgccacaagggcccctggtgcagtatttggtttgcgaaggtgttgcgaaggccagccatgcctcccacacagctgcccaggctgggcttcctgacaagcttgtggctcgtggcaaggaggtctcagacttgatccgcagtggaaaacccatcaagcctgtcaaggatttgctaaagaagaaccaaatggaaaattgccagacattagtggataagtttatgaaactggatttggaagatcctaacctggacttgaacgttttcatgagccaggaagtgctgcctgctgccaccagcatcctctgagagtccttccagtgtcctccccagcctcctgagactccggtgggctgccatgccctctttgtttccttatctccctcagacgcagagtttttagtttctctagaaattttgtttcatattaggaataaagtttattttgaaga

SEQ ID NO: 437141 - DNA, 2510 bp, Homo sapiens
gggcgcgtgcgcgcgcacctcgctcacgcgccggcgcgctccttttgcaggctcgtggcggtcggtcagcggggcgttctcccacctgtagcgactcagagcctccaagctcatggcctccttaggagcgaacccaaggaggacaccgcagggaccgagacctggggcggcctcctccggcttccccagcccggccccagtgccgggccccagggaggccgaggaggaggaagtcgaggaggaggaggagctggccgagatccatctgtgtgtgctgtggaattcaggatacttgggcattgcctactatgatactagtgactccactatccacttcatgccagatgccccagaccacgagagcctcaagcttctccagagagttctggatgagatcaatccccagtctgttgttacgagtgccaaacaggatgagaatatgactcgatttctgggaaagcttgcctcccaggagcacagagagcctaaaagacctgaaatcatatttttgccaagtgtggattttggtctggagataagcaaacaacgcctcctttctggaaactactccttcatcccagacgccatgactgccactgagaaaatcctcttcctctcttccattattccctttgactgcctcctcacagttcgagcacttggagggctgctgaagttcctgggtcgaagaagaatcggggttgaactggaagactataatgtcagcgtccccatcctgggctttaagaaatttatgttgactcatctggtgaacatagatcaagacacttacaggaatcctcaacagatgccactgtaagtggggagagaagctgctcaggctatggttcacacgtccgactcatgacctgggggagctcagttctcgtctggacgtcattcagttttttctgctgccccagaatctggacatggctcagatgctgcatcggctcctgggtcacatcaagaacgtgcctctgattctgaaacgcatgaagttgtcccacaccaaggtcagcgactggcaggttctctacaagactgtgtacagtgccctgggcctgagggatgcctgccgctccctgccgcagtccatccagctctttcgggacattgcccaagagttctctgatgacctgcaccatatcgccagcctcattgggaaagtagtggactttgagggcagccttgctgaaaatcgcttcacagtcctccccaacatagatcctgaaattgatgagaaaaagcgaagactgatgggacttcccagtttccttactgaggttgcccgcaaggagctggagaatctggactcccgtattccttcatgcagtgtcatctacatccctctgattggcttccttctttctattccccgcctgccttccatggtagaggccagtgactttgagattaatggactggacttcatgtttctctcagaggagaagctgcactatcgtagtgcccgaaccaaggagctggatgcattgctgggggacctgcactgcgagatccgggaccaggagacgctgctgatgtaccagctacagtgccaggtgctggcacgagcagctgtcttaacccgagtattggaccttgcctcccgcctggacgtcctgctggctcttgccagtgctgcccgggactatggctactcaaggccgcgttactccccacaagtccttggggtacgaatccagaatggcagacatcctctgatggaactctgtgcccgaacctttgtgcccaactccacagaatgtggtggggacaaagggagggtcaaagtcatcactggacccaactcatcagggaagagcatatacctcaaacaggtggcgaaagcagtgaacaatgccactgcacagtcgctggtccttattgatgaatttggaaagggaaccaacacggtggatgggctcgcgcttctggccgctgtgctccgacactggctggcacgtggacccacatgcccccacatctttgtggccaccaactttctgagccttgttcagctacaactgctgccacaagggcccctggtgcagtatttggattggccaagggtttcaggacaggaaggaggtttgcgaaggtgttgcgaaggccagccatgcctcccacacagctgcccaggctgggcttcctgacaagcttgtggctcgtggcaaggaggtctcagacttgatccgcagtggaaaacccatcaagcctgtcaaggatttgctaaagaagaaccaaatggaaaattgccagacattagtggataagtttatgaaactggatttggaagatcctaacctggacttgaacgttttcatgagccaggaagtgctgcctgctgccaccagcatcctctgagagtccttccagtgtcctccccagcctcctgagactccggtgggctgccatgccctctttgtttccttatctccctcagacgcagagtttttagtttctctagaaattttgtttcatattaggaataaagtttattttgaaga

SEQ ID NO: 437142 - DNA, 416 bp, Homo sapiens
gccttcctccagcactttgcccttcagaaacccaccatttctttctgaaatccctaaatcttcaagatcccaggttttctgtgccacagcctctcccctctgcccagggatttggttgtccattctgccataaatcttgcgattttctctcttcttcagttgccagacattagtggataagtttatgaaactggatttggaagatcctaacctggacttgaacgttttcatgagccaggaagtgctgcctgctgccaccagcatcctctgagagtccttccagtgtcctccccagcctcctgagactccggtgggctgccatgccctctttgtttccttatctccctcagacgcagagtttttagtttctctagaaattttgtttcatattaggaataaagtttattttgaagaaa

SEQ ID NO: 437143 - DNA, 2760 bp, Homo sapiens
gggcgcgtgcgcgcgcacctcgctcacgcgccggcgcgctccttttgcaggctcgtggcggtcggtcagcggggcgttctcccacctgtagcgactcagagcctccaagctcatggcctccttaggagcgaacccaaggaggacaccgcagggaccgagacctggggcggcctcctccggcttccccagcccggccccagtgccgggccccagggaggccgaggaggaggaagtcgaggaggaggaggagctggccgagatccatctgtgtgtgctgtggaattcaggatacttgggcattgcctactatgatactagtgactccactatccacttcatgccagatgccccagaccacgagagcctcaagcttctccagagagttctggatgagatcaatccccagtctgttgttacgagtgccaaacaggatgagaatatgactcgatttctgggaaagcttgcctcccaggagcacagagagcctaaaagacctgaaatcatatttttgccaagtgtggattttggtctggagataagcaaacaacgcctcctttctggaaactactccttcatcccagacgccatgactgccactgagaaaatcctcttcctctcttccattattccctttgactgcctcctcacagttcgagcacttggagggctgctgaagttcctgggtcgaagaagaatcggggttgaactggaagactataatgtcagcgtccccatcctgggctttaagaaatttatgttgactcatctggtgaacatagatcaagacacttacagtgttctacagatttttaagagtgagtctcacccctcagtgtacaaagtggccagtggactgaaggaggggctcagcctctttggaatcctcaacagatgccactgtaagtggggagagaagctgctcaggctatggttcacacgtccgactcatgacctgggggagctcagttctcgtctggacgtcattcagttttttctgctgccccagaatctggacatggctcagatgctgcatcggctcctgggtcacatcaagaacgtgcctctgattctgaaacgcatgaagttgtcccacaccaaggtcagcgactggcaggttctctacaagactgtgtacagtgccctgggcctgagggatgcctgccgctccctgccgcagtccatccagctctttcgggacattgcccaagagttctctgatgacctgcaccatatcgccagcctcattgggaaagtagtggactttgagggcagccttgctgaaaatcgcttcacagtcctccccaacatagatcctgaaattgatgagaaaaagcgaagactgatgggacttcccagtttccttactgaggttgcccgcaaggagctggagaatctggactcccgtattccttcatgcagtgtcatctacatccctctgattggcttccttctttctattccccgcctgccttccatggtagaggccagtgactttgagattaatggactggacttcatgtttctctcagaggagaagctgcactatcgtagtgcccgaaccaaggagctggatgcattgctgggggacctgcactgcgagatccgggaccaggagacgctgctgatgtaccagctacagtgccaggtgctggcacgagcagctgtcttaacccgagtattggaccttgcctcccgcctggacgtcctgctggctcttgccagtgctgcccgggactatggctactcaaggccgcgttactccccacaagtccttggggtacgaatccagaatggcagacatcctctgatggaactctgtgcccgaacctttgtgcccaactccacagaatgtggtggggacaaagggagggtcaaagtcatcactggacccaactcatcagggaagagcatatacctcaaacaggtaggcttgatcacattcatggccctggtaggcagctttgtgccagcagaggaggccgaaattggggcagtagacgccatcttcacacgaattcatagctgcgaatccatctcccttggcctctccaccttcatgatcgacctcaaccaggtggcgaaagcagtgaacaatgccactgcacagtcgctggtccttattgatgaatttggaaagggaaccaacacggtggatgggctcgcgcttctggccgctgtgctccgacactggctggcacgtggacccacatgcccccacatctttgtggccaccaactttctgagccttgttcagctacaactgctgccacaagggcccctggtgcagtatttgaccatggagacctgtgaggatggcaacgatcttgtcttcttctatcaggtttgcgaaggtgttgcgaaggccagccatgcctcccacacagctgcccaggctgggcttcctgacaagcttgtggctcgtggcaaggaggtctcagacttgatccgcagtggaaaacccatcaagcctgtcaaggatttgctaaagaagaaccaaatggaaaattgccagacattagtggataagtttatgaaactggatttggaagatcctaacctggacttgaacgttttcatgagccaggaagtgctgcctgctgccaccagcatcctctgagagtccttccagtgtcctccccagcctcctgagactccggtgggctgccatgccctctttgtttccttatctccctcagacgcagagtttttagtttctctagaaattttgtttcatattaggaataaagtttattttgaaga

SEQ ID NO: 437144 - DNA, 4230 bp, Homo sapiens
gggcgcgtgcgcgcgcacctcgctcacgcgccggcgcgctccttttgcaggctcgtggcggtcggtcagcggggcgttctcccacctgtagcgactcagagcctccaagctcatggcctccttaggagcgaacccaaggaggacaccgcagggaccgagacctggggcggcctcctccggcttccccagcccggccccagtgccgggccccagggaggccgaggaggaggaagtcgaggaggaggaggagctggccgagatccatctgtgtgtgctgtggaattcaggatacttgggcattgcctactatgatactagtgactccactatccacttcatgccagatgccccagaccacgagagcctcaagcttctccagagagttctggatgagatcaatccccagtctgttgttacgagtgccaaacaggatgagaatatgactcgatttctgggaaagcttgcctcccaggagcacagagagcctaaaagacctgaaatcatatttttgccaagtgtggattttggtctggagataagcaaacaacgcctcctttctggaaactactccttcatcccagacgccatgactgccactgagaaaatcctcttcctctcttccattattccctttgactgcctcctcacacccccaggagatttaagatttaccccgattccactgctgatcccctccgttcgagcacttggagggctgctgaagttcctgggtcgaagaagaatcggggttgaactggaagactataatgtcagcgtccccatcctgggctttaagaaatttatgttgactcatctggtgaacatagatcaagacacttacagtgttctacagatttttaagagtgagtctcacccctcagtgtacaaagtggccagtggactgaaggaggggctcagcctctttggaatcctcaacagatgccactgtaagtggggagagaagctgctcaggctatggttcacacgtccgactcatgacctgggggagctcagttctcgtctggacgtcattcagttttttctgctgccccagaatctggacatggctcagatgctgcatcggctcctgggtcacatcaagaacgtgcctctgattctgaaacgcatgaagttgtcccacaccaaggtcagcgactggcaggttctctacaagactgtgtacagtgccctgggcctgagggatgcctgccgctccctgccgcagtccatccagctctttcgggacattgcccaagagttctctgatgacctgcaccatatcgccagcctcattgggaaagtagtggactttgagggcagccttgctgaaaatcgcttcacagtcctccccaacatagatcctgaaattgatgagaaaaagcgaagactgatgggacttcccagtttccttactgaggttgcccgcaaggagctggagaatctggactcccgtattccttcatgcagtgtcatctacatccctctgattggcttccttctttctattccccgcctgccttccatggtagaggccagtgactttgagattaatggactggacttcatgtttctctcagaggagaagctgcactatcgtagtgcccgaaccaaggagctggatgcattgctgggggacctgcactgcgagatccgggaccaggagacgctgctgatgtaccagctacagtgccaggtgctggcacgagcagctgtcttaacccgagtattggaccttgcctcccgcctggacgtcctgctggctcttgccagtgctgcccgggactatggctactcaaggccgcgttactccccacaagtccttggggtacgaatccagaatggcagacatcctctgatggaactctgtgcccgaacctttgtgcccaactccacagaatgtggtggggacaaagggagggtcaaagtcatcactggacccaactcatcagggaagagcatatacctcaaacaggtaggcttgatcacattcatggccctggtaggcagctttgtgccagcagaggaggccgaaattggggcagtagacgccatcttcacacgaattcatagctgcgaatccatctcccttggcctctccaccttcatgatcgacctcaaccaggtggcgaaagcagtgaacaatgccactgcacagtcgctggtccttattgatgaatttggaaagggaaccaacacggtggatgggctcgcgcttctggccgctgtgctccgacactggctggcacgtggacccacatgcccccacatctttgtggccaccaactttctgagccttgttcagctacaactgctgccacaagggcccctggtgcagtatttgaccatggagacctgtgaggatggcaacgatcttgtcttcttctatcaggtttgcgaaggtgttgcgaaggccagccatgcctcccacacagctgcccaggctgggcttcctgacaagcttgtggctcgtggcaaggaggtctcagacttgatccgcagtggaaaacccatcaagcctgtcaaggatttgctaaagaagaaccaaatggaaaattgccagacattagtggataagtttatgaaactggatttggaagatcctaacctggacttgaacgttttcatgagccaggaagtgctgcctgctgccaccagcatcctctgagagtccttccagtgtcctccccagcctcctgagactccggtgggctgccatgccctctttgtttccttatctccctcagacgcagagtttttagtttctctagaaattttgtttcatattaggaataaagtttattttgaagaaagatattgtttctttagtctcaaaacaagagactaggaaagatccaaaacacagagcaggagtccacaggggaacctgccctgcctcagtaaaaatacagtgttgttgctgtaggaagactcccggattctaccccaggatacttcatgagaacgaaccccttcagagaggccctacaaaacagattagagggaagacagaggggtccaagggagatggtctctcttctcaagtaggaacaccccagcctcagacagacacagcaggaaggggcctgagaggctgacagaggcaggatgggtgcaaggcaggggtggaggggagggaccagcccgggctgcaccagtgggagtggctccacccttcccacctcagagccatggggagccagggctctggcggggtgcccttggtgcaggctccctacacagtcctgctgctgccgctggggacaagccgccaagacccaggggcccagagcttcttcctttggctacgcaggatgcaggctctggagagagaacaggatgccctgtggcagggtctggagctgctacagcatggccaggcctggtttgaagaccatctgagggaggcacagcgacagcagctgcatctaggggcccttggtgagaattttctaacagatttacactcagagcctggtcgccccccgttagcccagattcaaaaggtgaacatctgtttgcagaatctgattcatgagaagttctccccaagtccactgaacaaggctagttcctgcaccacccaggattcaaaggaaagacgaagggagcagaacttgtggcagcaacaggagttgtcaaggcagcagaaaggagtcacccagccaaaggaggagatggctcagcggggctgcaccaaggggccaagaggccctacccgtgtctaaaccctcctctcactcccctaagcctggtgaaagagtcagaagccccaggctcctttttctgtttcttaactcaacagctaaaaaatggctccaggtagtgagtcaatgaagttcagacatgttggtgtaaagtttctcctctgctcctgaaaacttcatcttcttggtgtctcatgtcctcattctcccctatatgacatgcaaaaacgatctttctttgaaatccctctgggaagaagcatgtttattgaaactgtccttcagccttaaatacaaaaataaaactgaaactgctccagaaagcagctttctccaaaaatgtctttggtttgtttctcatagggttaggaaaagtgcattgtgggaatatccattgccctctatcccagtcttgcagggtgttttgttttgttttgtttctgagatagggtctcactgtcgctcaggctgtagtgcagtggttcgaccacaactcactgcagcctcaacctcctgggctcaagtg

SEQ ID NO: 437145 - DNA, 4092 bp, Homo sapiens
gggcgcgtgcgcgcgcacctcgctcacgcgccggcgcgctccttttgcaggctcgtggcggtcggtcagcggggcgttctcccacctgtagcgactcagagcctccaagctcatggcctccttaggagcgaacccaaggaggacaccgcagggaccgagacctggggcggcctcctccggcttccccagcccggccccagtgccgggccccagggaggccgaggaggaggaagtcgaggaggaggaggagctggccgagatccatctgtgtgtgctgtggaattcaggatacttgggcattgcctactatgatactagtgactccactatccacttcatgccagatgccccagaccacgagagcctcaagcttctccagagagttctggatgagatcaatccccagtctgttgttacgagtgccaaacaggatgagaatatgactcgatttctgggaaagcttgcctcccaggagcacagagagcctaaaagacctgaaatcatatttttgccaagtgtggattttggtctggagataagcaaacaacgcctcctttctggaaactactccttcatcccagacgccatgactgccactgagaaaatcctcttcctctcttccattattccctttgactgcctcctcacagttcgagcacttggagggctgctgaagttcctgggtcgaagaagaatcggggttgaactggaagactataatgtcagcgtccccatcctgggctttaagaaatttatgttgactcatctggtgaacatagatcaagacacttacagtgttctacagatttttaagagtgagtctcacccctcagtgtacaaagtggccagtggactgaaggaggggctcagcctctttggaatcctcaacagatgccactgtaagtggggagagaagctgctcaggctatggttcacacgtccgactcatgacctgggggagctcagttctcgtctggacgtcattcagttttttctgctgccccagaatctggacatggctcagatgctgcatcggctcctgggtcacatcaagaacgtgcctctgattctgaaacgcatgaagttgtcccacaccaaggtcagcgactggcaggttctctacaagactgtgtacagtgccctgggcctgagggatgcctgccgctccctgccgcagtccatccagctctttcgggacattgcccaagagttctctgatgacctgcaccatatcgccagcctcattgggaaagtagtggactttgagggcagccttgctgaaaatcgcttcacagtcctccccaacatagatcctgaaattgatgagaaaaagcgaagactgatgggacttcccagtttccttactgaggttgcccgcaaggagctggagaatctggactcccgtattccttcatgcagtgtcatctacatccctctgattggcttccttctttctattccccgcctgccttccatggtagaggccagtgactttgagattaatggactggacttcatgtttctctcagaggagaagctgcactatcgtagtgcccgaaccaaggagctggatgcattgctgggggacctgcactgcgagatccgggaccaggagacgctgctgatgtaccagctacagtgccaggtgctggcacgagcagctgtcttaacccgagtattggaccttgcctcccgcctggacgtcctgctggctcttgccagtgctgcccgggactatggctactcaaggccgcgttactccccacaagtccttggggtacgaatccagaatggcagacatcctctgatggaactctgtgcccgaacctttgtgcccaactccacagaatgtggtggggacaaagggagggtcaaagtcatcactggacccaactcatcagggaagagcatatacctcaaacaggtaggcttgatcacattcatggccctggtaggcagctttgtgccagcagaggaggccgaaattggggcagtagacgccatcttcacacgaattcatagctgcgaatccatctcccttggcctctccaccttcatgatcgacctcaaccaggtggcgaaagcagtgaacaatgccactgcacagtcgctggtccttattgatgaatttggaaagggaaccaacacggtggatgggctcgcgcttctggccgctgtgctccgacactggctggcacgtggacccacatgcccccacatctttgtggccaccaactttctgagccttgttcagctacaactgctgccacaagggcccctggtgcagtatttgaccatggagacctgtgaggatggcaacgatcttgtcttcttctatcaggtttgcgaaggtgttgcgaaggccagccatgcctcccacacagctgcccaggctgggcttcctgacaagcttgtggctcgtggcaaggaggtctcagacttgatccgcagtggaaaacccatcaagcctgtcaaggatttgctaaagaagaaccaaatggaaaattgccagacattagtggataagtttatgaaactggatttggaagatcctaacctggacttgaacgttttcatgagccaggaagtgctgcctgctgccaccagcatcctctgagagtccttccagtgtcctccccagcctcctgagactccggtgggctgccatgccctctttgtttccttatctccctcagacgcagagtttttagtttctctagaaattttgtttcatattaggaataaagtttattttgaagaaagatattgtttctttagtctcaaaacaagagactaggaaagatccaaaacacagagcaggagtccacaggggaacctgccctgcctcagtaaaaatacagtgttgttgctgtaggaagactcccggattctaccccaggatacttcatgagaacgaaccccttcagagaggccctacaaaacagattagagggaagacagaggggtccaagggagatggtctctcttctcaagtaggaacaccccagcctcagacagacacagcaggaaggggcctgagaggctgacagaggcaggatgggtgcaaggcaggggtggaggggagggaccagcccgggctgcaccagtgggagtggctccacccttcccacctcagagccatggggagccagggctctggcggggtgcccttggtgcaggctccctacacagtcctgctgctgccgctggggacaagccgccaagacccaggggcccagagcttcttcctttggctacgcaggatgcaggctctggagagagaacaggatgccctgtggcagggtctggagctgctacagcatggccaggcctggtttgaagaccatctgagggaggcacagcgacagcagctgcatctaggggcccttggtgagaattttctaacagatttacactcagagcctggtcgccccccgttagcccagattcaaaaggtgaacatctgtttgcagaatctgattcatgagaaggagttgtcaaggcagcagaaaggagtcacccagccaaaggaggagatggctcagcggggctgcaccaaggggccaagaggccctacccgtgtctaaaccctcctctcactcccctaagcctggtgaaagagtcagaagccccaggctcctttttctgtttcttaactcaacagctaaaaaatggctccaggtagtgagtcaatgaagttcagacatgttggtgtaaagtttctcctctgctcctgaaaacttcatcttcttggtgtctcatgtcctcattctcccctatatgacatgcaaaaacgatctttctttgaaatccctctgggaagaagcatgtttattgaaactgtccttcagccttaaatacaaaaataaaactgaaactgctccagaaagcagctttctccaaaaatgtctttggtttgtttctcatagggttaggaaaagtgcattgtgggaatatccattgccctctatcccagtcttgcagggtgttttgttttgttttgtttctgagatagggtctcactgtcgctcaggctgtagtgcagtggttcgaccacaactcactgcagcctcaacctcctgggctcaagtg

SEQ ID NO: 437146 - DNA, 3991 bp, Homo sapiens
gggcgcgtgcgcgcgcacctcgctcacgcgccggcgcgctccttttgcaggctcgtggcggtcggtcagcggggcgttctcccacctgtagcgactcagagcctccaagctcatggcctccttaggagcgaacccaaggaggacaccgcagggaccgagacctggggcggcctcctccggcttccccagcccggccccagtgccgggccccagggaggccgaggaggaggaagtcgaggaggaggaggagctggccgagatccatctgtgtgtgctgtggaattcaggatacttgggcattgcctactatgatactagtgactccactatccacttcatgccagatgccccagaccacgagagcctcaagcttctccagagagttctggatgagatcaatccccagtctgttgttacgagtgccaaacaggatgagaatatgactcgatttctgggaaagcttgcctcccaggagcacagagagcctaaaagacctgaaatcatatttttgccaagtgtggattttggtctggagataagcaaacaacgcctcctttctggaaactactccttcatcccagacgccatgactgccactgagaaaatcctcttcctctcttccattattccctttgactgcctcctcacagttcgagcacttggagggctgctgaagttcctgggtcgaagaagaatcggggttgaactggaagactataatgtcagcgtccccatcctgggctttaagaaatttatgttgactcatctggtgaacatagatcaagacacttacagtgttctacagatttttaagagtgagtctcacccctcagtgtacaaagtggccagtggactgaaggaggggctcagcctctttggaatcctcaacagatgccactgtaagtggggagagaagctgctcaggctatggttcacacgtccgactcatgacctgggggagctcagttctcgtctggacgtcattcagttttttctgctgccccagaatctggacatggctcagatgctgcatcggctcctgggtcacatcaagaacgtgcctctgattctgaaacgcatgaagttgtcccacaccaaggtcagcgactggcaggttctctacaagactgtgtacagtgccctgggcctgagggatgcctgccgctccctgccgcagtccatccagctctttcgggacattgcccaagagttctctgatgacctgcaccatatcgccagcctcattgggaaagtagtggactttgagggcagccttgctgaaaatcgcttcacagtcctccccaacatagatcctgaaattgatgagaaaaagcgaagactgatgggacttcccagtttccttactgaggttgcccgcaaggagctggagaatctggactcccgtattccttcatgcagtgtcatctacatccctctgattggcttccttctttctattccccgcctgccttccatggtagaggccagtgactttgagattaatggactggacttcatgtttctctcagaggagaagctgcactatcgtagtgcccgaaccaaggagctggatgcattgctgggggacctgcactgcgagatccgggaccaggagacgctgctgatgtaccagctacagtgccaggtgctggcacgagcagctgtcttaacccgagtattggaccttgcctcccgcctggacgtcctgctggctcttgccagtgctgcccgggactatggctactcaaggccgcgttactccccacaagtccttggggtacgaatccagaatggcagacatcctctgatggaactctgtgcccgaacctttgtgcccaactccacagaatgtggtggggacaaagggagggtcaaagtcatcactggacccaactcatcagggaagagcatatacctcaaacaggtaggcttgatcacattcatggccctggtaggcagctttgtgccagcagaggaggccgaaattggggcagtagacgccatcttcacacgaattcatagctgcgaatccatctcccttggcctctccaccttcatgatcgacctcaaccaggtggcgaaagcagtgaacaatgccactgcacagtcgctggtccttattgatgaatttggaaagggaaccaacacggtggatgggctcgcgcttctggccgctgtgctccgacactggctggcacgtggacccacatgcccccacatctttgtggccaccaactttctgagccttgttcagctacaactgctgccacaagggcccctggtgcagtatttgaccatggagacctgtgaggatggcaacgatcttgtcttcttctatcaggtttgcgaaggtgttgcgaaggccagccatgcctcccacacagctgcccaggctgggcttcctgacaagcttgtggctcgtggcaaggaggtctcagacttgatccgcagtggaaaacccatcaagcctgtcaaggatttgctaaagaagaaccaaatggaaaattgccagacattagtggataagtttatgaaactggatttggaagatcctaacctggacttgaacgttttcatgagccaggaagtgctgcctgctgccaccagcatcctctgagagtccttccagtgtcctccccagcctcctgagactccggtgggctgccatgccctctttgtttccttatctccctcagacgcagagtttttagtttctctagaaattttgtttcatattaggaataaagtttattttgaagaaagatattgtttctttagtctcaaaacaagagactaggaaagatccaaaacacagagcaggagtccacaggggaacctgccctgcctcagtaaaaatacagtgttgttgctgtaggaagactcccggattctaccccaggatacttcatgagaacgaaccccttcagagaggccctacaaaacagattagagggaagacagaggggtccaagggagatggtctctcttctcaagtaggaacaccccagcctcagacagacacagcaggaaggggcctgagaggctgacagaggcaggatgggtgcaaggcaggggtggaggggagggaccagcccgggctgcaccagtgggagtggctccacccttcccacctcagagccatggggagccagggctctggcggggtgcccttggtgcaggctccctacacagtcctgctgctgccgctggggacaagccgccaagacccaggggcccagagcttcttcctttggctacgcaggatgcaggctctggagagagaacaggatgccctgtggcagggtctggagctgctacagcatggccaggcctggtttgaagaccatctgagggaggcacagcgacagcagctgcatctaggggcccttggtgagaattttctaacagatttacactcagagcctggtcgccccccgttagcccagattcaaaaggtgaacatctgtttgcagaatctgattcatgagaagttctccccaagtccactgaacaaggctagttcctgcaccacccaggattcaaaggaaagacgaagggagcagaacttgtggcagcaacaggagttgtcaaggcagcagaaaggagtcacccagccaaaggaggagatggctcagcggggctgcaccaaggggccaagaggccctacccgtgtctaaaccctcctctcactcccctaagcctggtgaaagagtcagaagccccaggctcctttttctgtttcttaactcaacagctaaaaaatggctccaggtagtgagtcaatgaagttcagacatgttggtgtaaagtttctcctctgctcctgaaaacttcatcttcttggtgtctcatgtcctcattctcccctatatgacatgcaaaaacgatctttctttgaaatccctctgggaagaagcatgtttattgaaactgtccttcagccttaaatacaaaaataaaactgaaactgctccagaaagcagctttctcc

SEQ ID NO: 437147 - DNA, 4532 bp, Homo sapiens
gggcgcgtgcgcgcgcacctcgctcacgcgccggcgcgctccttttgcaggctcgtggcggtcggtcagcggggcgttctcccacctgtagcgactcagagcctccaagctcatggcctccttaggagcgaacccaaggaggacaccgcagggaccgagacctggggcggcctcctccggcttccccagcccggccccagtgccgggccccagggaggccgaggaggaggaagtcgaggaggaggaggagctggccgagatccatctgtgtgtgctgtggaattcaggatacttgggcattgcctactatgatactagtgactccactatccacttcatgccagatgccccagaccacgagagcctcaagcttctccagagagttctggatgagatcaatccccagtctgttgttacgagtgccaaacaggatgagaatatgactcgatttctgggaaagcttgcctcccaggagcacagagagcctaaaagacctgaaatcatatttttgccaagtgtggattttggtctggagataagcaaacaacgcctcctttctggaaactactccttcatcccagacgccatgactgccactgagaaaatcctcttcctctcttccattattccctttgactgcctcctcacagttcgagcacttggagggctgctgaagttcctgggtcgaagaagaatcggggttgaactggaagactataatgtcagcgtccccatcctgggctttaagaaatttatgttgactcatctggtgaacatagatcaagacacttacaggaatcctcaacagatgccactgtaagtggggagagaagctgctcaggctatggttcacacgtccgactcatgacctgggggagctcagttctcgtctggacgtcattcagttttttctgctgccccagaatctggacatggctcagatgctgcatcggctcctgggtcacatcaagaacgtgcctctgattctgaaacgcatgaagttgtcccacaccaaggtcagcgactggcaggttctctacaagactgtgtacagtgccctgggcctgagggatgcctgccgctccctgccgcagtccatccagctctttcgggacattgcccaagagttctctgatgacctgcaccatatcgccagcctcattgggaaagtagtggactttgagggcagccttgctgaaaatcgcttcacagtcctccccaacatagatcctgaaattgatgagaaaaagcgaagactgatgggacttcccagtttccttactgaggttgcccgcaaggagctggagaatctggactcccgtattccttcatgcagtgtcatctacatccctctgattggcttccttctttctattccccgcctgccttccatggtagaggccagtgactttgagattaatggactggacttcatggtaagaccctcaacctctgtaaggtgagtgatgaggaaaatgagtcagcagctgaggaagagcgttactctacagcagcactgcccaatatgggatctctcctctgtagttttactctgagctttaccagcactgagacaaaggaaagagaagtcagagttaggggctggaggtggggttagaaagatggggaaggagaggaggaccaagagatgcaaagtccacagctttgaacccctgtacccagtttctctcagaggagaagctgcactatcgtagtgcccgaaccaaggagctggatgcattgctgggggacctgcactgcgagatccgggaccaggagacgctgctgatgtaccagctacagtgccaggtgctggcacgagcagctgtcttaacccgagtattggaccttgcctcccgcctggacgtcctgctggctcttgccagtgctgcccgggactatggctactcaaggccgcgttactccccacaagtccttggggtacgaatccagaatggcagacatcctctgatggaactctgtgcccgaacctttgtgcccaactccacagaatgtggtggggacaaagggagggtcaaagtcatcactggacccaactcatcagggaagagcatatacctcaaacaggtaggcttgatcacattcatggccctggtaggcagctttgtgccagcagaggaggccgaaattggggcagtagacgccatcttcacacgaattcatagctgcgaatccatctcccttggcctctccaccttcatgatcgacctcaaccaggtggcgaaagcagtgaacaatgccactgcacagtcgctggtccttattgatgaatttggaaagggaaccaacacggtggatgggctcgcgcttctggccgctgtgctccgacactggctggcacgtggacccacatgcccccacatctttgtggccaccaactttctgagccttgttcagctacaactgctgccacaagggcccctggtgcagtatttgaccatggagacctgtgaggatggcaacgatcttgtcttcttctatcaggtttgcgaaggtgttgcgaaggccagccatgcctcccacacagctgcccaggctgggcttcctgacaagcttgtggctcgtggcaaggaggtctcagacttgatccgcagtggaaaacccatcaagcctgtcaaggatttgctaaagaagaaccaaatggaaaattgccagacattagtggataagtttatgaaactggatttggaagatcctaacctggacttgaacgttttcatgagccaggaagtgctgcctgctgccaccagcatcctctgagagtccttccagtgtcctccccagcctcctgagactccggtgggctgccatgccctctttgtttccttatctccctcagacgcagagtttttagtttctctagaaattttgtttcatattaggaataaagtttattttgaagaaagatattgtttctttagtctcaaaacaagagactaggaaagatccaaaacacagagcaggagtccacaggggaacctgccctgcctcagtaaaaatacagtgttgttgctgtaggaagactcccggattctaccccaggatacttcatgagaacgaaccccttcagagaggccctacaaaacagattagagggaagacagaggggtccaagggagatggtctctcttctcaagtaggaacaccccagcctcagacagacacagcaggaaggggcctgagaggctgacagaggcaggatgggtgcaaggcaggggtggaggggagggaccagcccgggctgcaccagtgggagtggctccacccttcccacctcagagccatggggagccagggctctggcggggtgcccttggtgcaggctccctacacagtcctgctgctgccgctggggacaagccgccaagacccaggggcccagagcttcttcctttggctacgcaggatgcaggctctggagagagaacaggatgccctgtggcagggtctggagctgctacagcatggccaggcctggtttgaagaccatctgagggaggcacagcgacagcagctgcatctaggggcccttggtgagaattttctaacagatttacactcagagcctggtcgccccccgttagcccagattcaaaaggtgaacatctgtttgcagaatctgattcatgagaaggtgagtttattgttttcagtttagacttttgggaagttggactagagaggggagttgttggggtcagtgctggcttaacagaaaacacagcgaatttcccctccagttctccccaagtccactgaacaaggctagttcctgcaccacccaggattcaaaggaaagacgaagggagcagaacttgtggcagcaacaggtaaacttcaagaaggagggcaggagccccaccctacagggctgggaggagcccagaggccccatctgtttctcctccaggagttgtcaaggcagcagaaaggagtcacccagccaaaggaggagatggctcagcggggctgcaccaaggggccaagaggccctacccgtgtctaaaccctcctctcactcccctaagcctggtgaaagagtcagaagccccaggctcctttttctgtttcttaactcaacagctaaaaaatggctccaggtagtgagtcaatgaagttcagacatgttggtgtaaagtttctcctctgctcctgaaaacttcatcttcttggtgtctcatgtcctcattctcccctatatgacatgcaaaaacgatctttctttgaaatccctctgggaagaagcatgtttattgaaactgtccttcagccttaaatacaaaaataaaactgaaactgctccagaaagcagctttctccaaaaatgtctttggtttgtttctcatagggttaggaaaagtgcattgtgggaatatccattgccctctatcccagtcttgcagggtgttttgttttgttttgtttctgagatagggtctcactgtcgctcaggctgtagtgcagtggttcgaccacaactcactgcagcctcaacctcctgggctcaagtg

SEQ ID NO: 437148 - DNA, 4268 bp, Homo sapiens
gggcgcgtgcgcgcgcacctcgctcacgcgccggcgcgctccttttgcaggctcgtggcggtcggtcagcggggcgttctcccacctgtagcgactcagagcctccaagctcatggcctccttaggagcgaacccaaggaggacaccgcagggaccgagacctggggcggcctcctccggcttccccagcccggccccagtgccgggccccagggaggccgaggaggaggaagtcgaggaggaggaggagctggccgagatccatctgtgtgtgctgtggaattcaggatacttgggcattgcctactatgatactagtgactccactatccacttcatgccagatgccccagaccacgagagcctcaagcttctccagagagttctggatgagatcaatccccagtctgttgttacgagtgccaaacaggatgagaatatgactcgatttctgggaaagcttgcctcccaggagcacagagagcctaaaagacctgaaatcatatttttgccaagtgtggattttggtctggagataagcaaacaacgcctcctttctggaaactactccttcatcccagacgccatgactgccactgagaaaatcctcttcctctcttccattattccctttgactgcctcctcacagttcgagcacttggagggctgctgaagttcctgggtcgaagaagaatcggggttgaactggaagactataatgtcagcgtccccatcctgggctttaagaaatttatgttgactcatctggtgaacatagatcaagacacttacaggaatcctcaacagatgccactgtaagtggggagagaagctgctcaggctatggttcacacgtccgactcatgacctgggggagctcagttctcgtctggacgtcattcagttttttctgctgccccagaatctggacatggctcagatgctgcatcggctcctgggtcacatcaagaacgtgcctctgattctgaaacgcatgaagttgtcccacaccaaggtcagcgactggcaggttctctacaagactgtgtacagtgccctgggcctgagggatgcctgccgctccctgccgcagtccatccagctctttcgggacattgcccaagagttctctgatgacctgcaccatatcgccagcctcattgggaaagtagtggactttgagggcagccttgctgaaaatcgcttcacagtcctccccaacatagatcctgaaattgatgagaaaaagcgaagactgatgggacttcccagtttccttactgaggttgcccgcaaggagctggagaatctggactcccgtattccttcatgcagtgtcatctacatccctctgattggcttccttctttctattccccgcctgccttccatggtagaggccagtgactttgagattaatggactggacttcatgtttctctcagaggagaagctgcactatcgtagtgcccgaaccaaggagctggatgcattgctgggggacctgcactgcgagatccgggaccaggagacgctgctgatgtaccagctacagtgccaggtgctggcacgagcagctgtcttaacccgagtattggaccttgcctcccgcctggacgtcctgctggctcttgccagtgctgcccgggactatggctactcaaggccgcgttactccccacaagtccttggggtacgaatccagaatggcagacatcctctgatggaactctgtgcccgaacctttgtgcccaactccacagaatgtggtggggacaaagggagggtcaaagtcatcactggacccaactcatcagggaagagcatatacctcaaacaggtaggcttgatcacattcatggccctggtaggcagctttgtgccagcagaggaggccgaaattggggcagtagacgccatcttcacacgaattcatagctgcgaatccatctcccttggcctctccaccttcatgatcgacctcaaccaggtggcgaaagcagtgaacaatgccactgcacagtcgctggtccttattgatgaatttggaaagggaaccaacacggtggatgggctcgcgcttctggccgctgtgctccgacactggctggcacgtggacccacatgcccccacatctttgtggccaccaactttctgagccttgttcagctacaactgctgccacaagggcccctggtgcagtatttggattggccaagggtttcaggacaggaaggaggtttgcgaaggtgttgcgaaggccagccatgcctcccacacagctgcccaggctgggcttcctgacaagcttgtggctcgtggcaaggaggtctcagacttgatccgcagtggaaaacccatcaagcctgtcaaggatttgctaaagaagaaccaaatggaaaattgccagacattagtggataagtttatgaaactggatttggaagatcctaacctggacttgaacgttttcatgagccaggaagtgctgcctgctgccaccagcatcctctgagagtccttccagtgtcctccccagcctcctgagactccggtgggctgccatgccctctttgtttccttatctccctcagacgcagagtttttagtttctctagaaattttgtttcatattaggaataaagtttattttgaagaaagatattgtttctttagtctcaaaacaagagactaggaaagatccaaaacacagagcaggagtccacaggggaacctgccctgcctcagtaaaaatacagtgttgttgctgtaggaagactcccggattctaccccaggatacttcatgagaacgaaccccttcagagaggccctacaaaacagattagagggaagacagaggggtccaagggagatggtctctcttctcaagtaggaacaccccagcctcagacagacacagcaggaaggggcctgagaggctgacagaggcaggatgggtgcaaggcaggggtggaggggagggaccagcccgggctgcaccagtgggagtggctccacccttcccacctcagagccatggggagccagggctctggcggggtgcccttggtgcaggctccctacacagtcctgctgctgccgctggggacaagccgccaagacccaggggcccagagcttcttcctttggctacgcaggatgcaggctctggagagagaacaggatgccctgtggcagggtctggagctgctacagcatggccaggcctggtttgaagaccatctgagggaggcacagcgacagcagctgcatctaggggcccttggtgagaattttctaacagatttacactcagagcctggtcgccccccgttagcccagattcaaaaggtgaacatctgtttgcagaatctgattcatgagaaggtgagtttattgttttcagtttagacttttgggaagttggactagagaggggagttgttggggtcagtgctggcttaacagaaaacacagcgaatttcccctccagttctccccaagtccactgaacaaggctagttcctgcaccacccaggattcaaaggaaagacgaagggagcagaacttgtggcagcaacaggtaaacttcaagaaggagggcaggagccccaccctacagggctgggaggagcccagaggccccatctgtttctcctccaggagttgtcaaggcagcagaaaggagtcacccagccaaaggaggagatggctcagcggggctgcaccaaggggccaagaggccctacccgtgtctaaaccctcctctcactcccctaagcctggtgaaagagtcagaagccccaggctcctttttctgtttcttaactcaacagctaaaaaatggctccaggtagtgagtcaatgaagttcagacatgttggtgtaaagtttctcctctgctcctgaaaacttcatcttcttggtgtctcatgtcctcattctcccctatatgacatgcaaaaacgatctttctttgaaatccctctgggaagaagcatgtttattgaaactgtccttcagccttaaatacaaaaataaaactgaaactgctccagaaagcagctttctccaaaaatgtctttggtttgtttctcatagggttaggaaaagtgcattgtgggaatatccattgccctctatcccagtcttgcagggtgttttgttttgttttgtttctgagatagggtctcactgtcgctcaggctgtagtgcagtggttcgaccacaactcactgcagcctcaacctcctgggctcaagtg

SEQ ID NO: 437149 - DNA, 3573 bp, Homo sapiens
gctggcccagtgttcctagcgggctttaagaaatatatgttgactcatctggctgaactaagtatgatcaagacacttacagtgaatcctcaacagatgccactgtaagtggggagagaagctgctcaggctatggttcacacgtccgactcatgacctgggggagctcagttctcgtctggacgtcattcagttttttctgctgccccagaatctggacatggctcagatgctgcatcggctcctgggtcacatcaagaacgtgcctctgattctgaaacgcatgaagttgtcccacaccaaggtcagcgactggcaggttctctacaagactgtgtacagtgccctgggcctgagggatgcctgccgctccctgccgcagtccatccagctctttcgggacattgcccaagagttctctgatgacctgcaccatatcgccagcctcattgggaaagtagtggactttgagggcagccttgctgaaaatcgcttcacagtcctccccaacatagatcctgaaattgatgagaaaaagcgaagactgatgggacttcccagtttccttactgaggttgcccgcaaggagctggagaatctggactcccgtattccttcatgcagtgtcatctacatccctctgattggcttccttctttctattccccgcctgccttccatggtagaggccagtgactttgagattaatggactggacttcatgtttctctcagaggagaagctgcactatcgtagtgcccgaaccaaggagctggatgcattgctgggggacctgcactgcgagatccgggaccaggagacgctgctgatgtaccagctacagtgccaggtgctggcacgagcagctgtcttaacccgagtattggaccttgcctcccgcctggacgtcctgctggctcttgccagtgctgcccgggactatggctactcaaggccgcgttactccccacaagtccttggggtacgaatccagaatggcagacatcctctgatggaactctgtgcccgaacctttgtgcccaactccacagaatgtggtggggacaaagggagggtcaaagtcatcactggacccaactcatcagggaagagcatatacctcaaacaggtaggcttgatcacattcatggccctggtaggcagctttgtgccagcagaggaggccgaaattggggcagtagacgccatcttcacacgaattcatagctgcgaatccatctcccttggcctctccaccttcatgatcgacctcaaccaggtggcgaaagcagtgaacaatgccactgcacagtcgctggtccttattgatgaatttggaaagggaaccaacacggtggatgggctcgcgcttctggccgctgtgctccgacactggctggcacgtggacccacatgcccccacatctttgtggccaccaactttctgagccttgttcagctacaactgctgccacaagggcccctggtgcagtatttgaccatggagacctgtgaggatggcaacgatcttgtcttcttctatcaggtttgcgaaggtgttgcgaaggccagccatgcctcccacacagctgcccaggctgggcttcctgacaagcttgtggctcgtggcaaggaggtctcagacttgatccgcagtggaaaacccatcaagcctgtcaaggatttgctaaagaagaaccaaatggaaaattgccagacattagtggataagtttatgaaactggatttggaagatcctaacctggacttgaacgttttcatgagccaggaagtgctgcctgctgccaccagcatcctctgagagtccttccagtgtcctccccagcctcctgagactccggtgggctgccatgccctctttgtttccttatctccctcagacgcagagtttttagtttctctagaaattttgtttcatattaggaataaagtttattttgaagaaagatattgtttctttagtctcaaaacaagagactaggaaagatccaaaacacagagcaggagtccacaggggaacctgccctgcctcagtaaaaatacagtgttgttgctgtaggaagactcccggattctaccccaggatacttcatgagaacgaaccccttcagagaggccctacaaaacagattagagggaagacagaggggtccaagggagatggtctctcttctcaagtaggaacaccccagcctcagacagacacagcaggaaggggcctgagaggctgacagaggcaggatgggtgcaaggcaggggtggaggggagggaccagcccgggctgcaccagtgggagtggctccacccttcccacctcagagccatggggagccagggctctggcggggtgcccttggtgcaggctccctacacagtcctgctgctgccgctggggacaagccgccaagacccaggggcccagagcttcttcctttggctacgcaggatgcaggctctggagagagaacaggatgccctgtggcagggtctggagctgctacagcatggccaggcctggtttgaagaccatctgagggaggcacagcgacagcagctgcatctaggggcccttggtgagaattttctaacagatttacactcagagcctggtcgccccccgttagcccagattcaaaaggtgaacatctgtttgcagaatctgattcatgagaaggtgagtttattgttttcagtttagacttttgggaagttggactagagaggggagttgttggggtcagtgctggcttaacagaaaacacagcgaatttcccctccagttctccccaagtccactgaacaaggctagttcctgcaccacccaggattcaaaggaaagacgaagggagcagaacttgtggcagcaacaggtaaacttcaagaaggagggcaggagccccaccctacagggctgggaggagcccagaggccccatctgtttctcctccaggagttgtcaaggcagcagaaaggagtcacccagccaaaggaggagatggctcagcggggctgcaccaaggggccaagaggccctacccgtgtctaaaccctcctctcactcccctaagcctggtgaaagagtcagaagccccaggctcctttttctgtttcttaactcaacagctaaaaaatggctccaggtagtgagtcaatgaagttcagacatgttggtgtaaagtttctcctctgctcctgaaaacttcatcttcttggtgtctcatgtcctcattctcccctatatgacatgcaaaaacgatctttctttgaaatccctctgggaagaagcatgtttattgaaactgtccttcagccttaaatacaaaaataaaactgaaactgctccagaaagcagctttctccaaaaatgtctttggtttgtttctcatagggttaggaaaagtgcattgtgggaatatccattgccctctatcccagtcttgcagggtgttttgttttgttttgtttctgagatagggtctcactgtcgctcaggctgtagtgcagtggttcgaccacaactcactgcagcctcaacctcctgggctcaagtg

SEQ ID NO: 437150 - DNA, 2660 bp, Homo sapiens
gggcgcgtgcgcgcgcacctcgctcacgcgccggcgcgctccttttgcaggctcgtggcggtcggtcagcggggcgttctcccacctgtagcgactcagagcctccaagctcatggcctccttaggagcgaacccaaggaggacaccgcagggaccgagacctggggcggcctcctccggcttccccagcccggccccagtgccgggccccagggaggccgaggaggaggaagtcgaggaggaggaggagctggccgagatccatctgtgtgtgctgtggaattcaggatacttgggcattgcctactatgatactagtgactccactatccacttcatgccagatgccccagaccacgagagcctcaagcttctccagagagttctggatgagatcaatccccagtctgttgttacgagtgccaaacaggatgagaatatgactcgatttctgggaaagcttgcctcccaggagcacagagagcctaaaagacctgaaatcatatttttgccaagtgtggattttggtctggagataagcaaacaacgcctcctttctggaaactactccttcatcccagacgccatgactgccactgagaaaatcctcttcctctcttccattattccctttgactgcctcctcacagttcgagcacttggagggctgctgaagttcctgggtcgaagaagaatcggggttgaactggaagactataatgtcagcgtccccatcctgggctttaagaaatttatgttgactcatctggtgaacatagatcaagacacttacaggaatcctcaacagatgccactgtaagtggggagagaagctgctcaggctatggttcacacgtccgactcatgacctgggggagctcagttctcgtctggacgtcattcagttttttctgctgccccagaatctggacatggctcagatgctgcatcggctcctgggtcacatcaagaacgtgcctctgattctgaaacgcatgaagttgtcccacaccaaggtcagcgactggcaggttctctacaagactgtgtacagtgccctgggcctgagggatgcctgccgctccctgccgcagtccatccagctctttcgggacattgcccaagagttctctgatgacctgcaccatatcgccagcctcattgggaaagtagtggactttgagggcagccttgctgaaaatcgcttcacagtcctccccaacatagatcctgaaattgatgagaaaaagcgaagactgatgggacttcccagtttccttactgaggttgcccgcaaggagctggagaatctggactcccgtattccttcatgcagtgtcatctacatccctctgattggcttccttctttctattccccgcctgccttccatggtagaggccagtgactttgagattaatggactggacttcatgtttctctcagaggagaagctgcactatcgtagtgcccgaaccaaggagctggatgcattgctgggggacctgcactgcgagatccgggaccaggagacgctgctgatgtaccagctacagtgccaggtgctggcacgagcagctgtcttaacccgagtattggaccttgcctcccgcctggacgtcctgctggctcttgccagtgctgcccgggactatggctactcaaggccgcgttactccccacaagtccttggggtacgaatccagaatggcagacatcctctgatggaactctgtgcccgaacctttgtgcccaactccacagaatgtggtggggacaaagggagggtcaaagtcatcactggacccaactcatcagggaagagcatatacctcaaacaggtaggcttgatcacattcatggccctggtaggcagctttgtgccagcagaggaggccgaaattggggcagtagacgccatcttcacacgaattcatagctgcgaatccatctcccttggcctctccaccttcatgatcgacctcaaccaggtggcgaaagcagtgaacaatgccactgcacagtcgctggtccttattgatgaatttggaaagggaaccaacacggtggatgggctcgcgcttctggccgctgtgctccgacactggctggcacgtggacccacatgcccccacatctttgtggccaccaactttctgagccttgttcagctacaactgctgccacaagggcccctggtgcagtatttggattggccaagggtttcaggacaggaaggaggtttgcgaaggtgttgcgaaggccagccatgcctcccacacagctgcccaggctgggcttcctgacaagcttgtggctcgtggcaaggaggtctcagacttgatccgcagtggaaaacccatcaagcctgtcaaggatttgctaaagaagaaccaaatggaaaattgccagacattagtggataagtttatgaaactggatttggaagatcctaacctggacttgaacgttttcatgagccaggaagtgctgcctgctgccaccagcatcctctgagagtccttccagtgtcctccccagcctcctgagactccggtgggctgccatgccctctttgtttccttatctccctcagacgcagagtttttagtttctctagaaattttgtttcatattaggaataaagtttattttgaaga

SEQ ID NO: 437151 - DNA, 2406 bp, Homo sapiens
ccctgttgaaatgtatcaatcccgtactttatctctccaggacaaggataagtgtggctacagtaaaagtttattgctctaaacggcgctaacctgagataatgagaaaaggccagaagagattgtttgatctctgtctgtcaatatatatgcatttcaactgtgaccatctggatccagggccctttctaacctatataacgactcatttgtttggttaatgatgaatatcactggggctcttaagtcctttcgttctatccaagacttcattgtttttttctgtatgaaaaaagtgcagaatatcactcacctttcccctacttttggatcccctacacgaggatcactagcttaatgagaagcagagtaacgctattaagtctgggcaagctccttataagttgctgtgtgcttaaaagaatgtgatttatgtctggggccaaagcagttttccttcttttccctcattgaattcaagacagctagacccttgtgtagatcccaggatattacctctactccccccaacctgtgtgtgtagggagagtaacaacacgggaagaggggagggaagttggaaggagattggtcacatgttcagttgtctgagatactggtaaatgtgcgctgtttgtcaatgaaggttgcatgcctgcatttacaaggtggtctcatactgattgtgctctgtccagttagattcgtggcttctcccttggaagctacaattaaggactagttagaagcagaggctagatgtgttctctccagcccttactaactgggaaaataattgagaaatccctcttttcctcagtgaaagcccagtcattggttagaaaaatctaattgtcaaactagcattatgttccatcatatctgtgggatagtaattcatgtaagacacatttttacctctcttacaagtcaattcacttacaagccagtttcaaatcaagcttcccttgcgaggaatggagatcattatggggcttattatgactacatttcttttatgagtgaccattttaaataattaatattttatttaatattaaattattaaagacttagctagacttttaacattagatgaaccttgtgaatcatatattgcatagattagcacatgtatgcaatctaggtcatcaatttgttgaatttatacagccctagatttgagattgtggccctgagtatctggatagttgagttgtgtgtttatgtgcttatatgatagaggtgctttgttcctgcagcttagaaacagaagcagccattcactgagaagcttaagagaggaagtatcaacctcattttccaaaccagcattactttcaccgctcgtggatctgaaagattacatttagaacatttagtactattacactctcagaaactgtggtaaaaagtcacattttcaaaacttcatgcatattgtattcttgttggaaataagtcctatagtttcttaattgtcttcatgccgtccatatttaacaaacattgcaagtcctttttatatttgggtaattatttgtaatttagtgaaggagactaggggatgttttcttccaaagggaatttaaaatcaattttatggtattttgaaagtaaaatactccttaacgtgtcaatatttttaaaatgttatctcgaagttttctattgctcaggtatataatctaataaaattttttgtttgctctaaggttatttttgctattctctattttgaattatgttaaaatttgtgtgcattttatgaaatgccttttttcttattttgaaagtgtaaaattgggcatctcagagtaaaatgtgggattattagctacaaagactaggcacatcgtgaaagctcagtaactaattttcttgactgagtcctatgccagagtgtcacagattcaacagaattttcctgaagggtgatacacaccaaaatctagcttgtgtggatctgagactattgactcaaagattcaaatctacttcggaagtgactccacggtttgagtgaaaactgaggaaggactcatgcctgtatatcactagatatcttatttctccataattttaagtgttcataatttcttcttctttgatgggtgtgcaactggggcatgtttgtaccagccagcatgtgttctgcccaacagtgtgtccgtgtgtgaggttaactgattcagaactcattctcttgataaactatttcttgaaagcatttattttaagtctttatttcctgctgaaatgaagtttcatgctgtcatgcccatcttatttattctagaagaaaattttcatagaagaaaatgatttatggccaaagttacagaacattcatcttttagacttagccttagaatatcattggaaattacttggcttgaatttggt

SEQ ID NO: 437152 - DNA, 1575 bp, Homo sapiens
gcggctggggagctgggagggttcagctgccacgtgagttatgcggccgctgctacacgcctggtgggcagcatgtcggcaacagcggctgctcgtaagcggggaaagccggcctctggggccggggctggcgcgggggccggcaagcggcggcgaaaggccgactctgcgggggacaggggcaaatccaagggtggcggcaagatgaatgaggagatctccagcgactctgagagcgagagcctagctccaaggaagcctgaggaggaggaggaggaggagctggaggaaactgcacaggaaaagaagctgcgcttggccaagctctacctagagcagctccgtcagcaagaggaggagaaggctgaggcccgtgcatttgaggaggaccaggtggcggggcgcctgaaggaggatgtgcttgagcagaggggcaggctgcagaagttggtggcaaaagagatccaggccccagcctcagctgacattcgcgttttacgggggcaccagctctctatcacatgtttggtcgtcacccccgatgactcagccatcttctctgctgccaaagactgcagcatcattaagtggagcgtggagagtggacggaagctgcatgtgattcctcgagccaagaagggtgccgagggaaagccccctggccacagcagccacgtcctctgcatggccatctcctccgacggcaagtaccttgcctctggtgaccgcagcaagctcattctcatttgggaggcccagagctgccagcacttgtacaccttcacaggacaccgggatgcagtgtcgggtctggcattccgcagaggcacccaccagctctacagcacatcccacgatcgctccgtgaaggtgtggaatgtggcagagaactcctacgtggagacgctcttcggacaccaggacgctgtggctgcactggatgccttgagccgggagtgctgtgtgacggctgggggccgggatgggactgtacgtgtgtggaagatccccgaggagtcccagcttgtcttctatggccaccagggctccatcgactgcatccacctaatcaatgaggagcacatggtgtccggcgcggacgatggctctgtggccttgtggggtctctccaagaagcgaccacttgccctgcagcgtgaagctcacgggctgcggggagagccaggcctggagcagcccttctggatatcgtcggtggcagccctcctcaacacagaccttgtggccacaggctcccacagctcctgtgtgcggctttggcagtgtggggaaggcttccggcagcttgaccttctctgtgacatccccctggtgggttttatcaacagcctcaagttctccagctctggggacttcctggtggctggggtagggcaggagcacaggcttggccgatggtggagaatcaaagaggctcggaattctgtctgcatcatcccactccgcagggtccctgtacccccagctgctggttcctgacactcttatcctccttatttaagtccttcccaggctatgccccaccctctttgtattaaaagcctcctcttttgg

SEQ ID NO: 437153 - DNA, 436 bp, Homo sapiens
ataaggcccagcccttgactgtgatgctgaggacggtggtggcggggggcgttctaatgtctttccgtgttgtctttctgctcaggtgggttttatcaacagcctcaagttctccagctctggggacttcctggtggctggggtagggcaggagcacaggtatgtgtggccctcgagggttcaggtaaggtggtgcaggctggacagctcggtggaaatggggtggagactgggccgagtctcagctgcgtcttgcactccctgcaggcttggccgatggtggagaatcaaagaggctcggaattctgtctgcatcatcccactccgcagggtccctgtacccccagctgctggttcctgacactcttatcctccttatttaagtccttcccaggctatgccccaccctctttgtattaaaagcctcctcttttgg

SEQ ID NO: 437154 - DNA, 1549 bp, Homo sapiens
gcggctggggagctgggagggttcagctgccacgtgagttatgcggccgctgctacacgcctggtgggcagcatgtcggcaacagcggctgctcgtaagcggggaaagccggcctctggggccggggctggcgcgggggccggcaagcggcggcgaaaggccgactctgcgggggacaggggcaaatccaagggtggcggcaagatgaatgaggagatctccagcgactctgagagcgagagcctagctccaaggaagcctgaggaggaggaggaggaggagctggaggaaactgcacaggaaaagaagctgcgcttggccaagctctacctagagcagctccgtcagcaagaggaggagaaggctgaggcccgtgcatttgaggaggaccaggtggcggggcgcctgaaggaggatgtgcttgagcagaggggcaggctgcagaagttggtggcaaaagagatccaggccccagcctcagctgacattcgcgttttacgggggcaccagctctctatcacatgtttggtcgtcacccccgatgactcagccatcttctctgctgccaaagactgcagcatcattaagtggagcgtggagagtggacggaagctgcatgtgattcctcgagccaagaagggtgccgagggaaagccccctggccacagcagccacgtcctctgcatggccatctcctccgacggcaagtaccttgcctctggtgaccgcagcaagctcattctcatttgggaggcccagagctgccagcacttgtacaccttcacaggacaccgggatgcagtgtcgggtctggcattccgcagaggcacccaccagctctacagcacatcccacgatcgctccgtgaaggtgtggaatgtggcagagaactcctacgtggagacgctcttcggacaccaggacgctgtggctgcactggatgccttgagccgggagtgctgtgtgacggctgggggccgggatgggactgtacgtgtgtggaagatccccgaggagtcccagcttgtcttctatggccaccagggctccatcgactgcatccacctaatcaatgaggagcacatggtgtccggcgcggacgatggctctgtggccttgtggggtctctccaagaagcgaccacttgccctgcagcgtgaagctcacgggctgcggggagagccaggcctggagcagcccttctggatatcgtcggtggcagccctcctcaacacagaccttgtggccacaggctcccacagctcctgtgtgcggctttggcagtgtggggaaggcttccggcagcttgaccttctctgtgacatccccctggtgggttttatcaacagcctcaagttctccagctctggggacttcctggtggctggggtagggcaggagcacaggcttggccgatggtggagaatcaaagaggctcggaattctgtctgcatcatcccactccgcagggtccctgtacccccagctgctggttcctgacactcttatcctcctctgtgccctcctctgtgctgtcgggacctctaga

SEQ ID NO: 437155 - DNA, 1288 bp, Homo sapiens
  misc_feature (1254)..(1254): n is a, c, g, or t
gcggctggggagctgggagggttcagctgccacgtgagttatgcggccgctgctacacgcctggtgggcagcatgtcggcaacagcggctgctcgtaagcggggaaagccggcctctggggccggggctggcgcgggggccggcaagcggcggcgaaaggccgactctgcgggggacaggggcaaatccaagggtggcggcaagatgaatgaggagatctccagcgactctgagagcgagagcctagctccaaggaagcctgaggaggaggaggaggaggagctggaggaaactgcacaggaaaagaagctgcgcttggccaagctctacctagagcagctccgtcagcaagaggaggagaaggctgaggcccgtgcatttgaggaggaccaggtggcggggcgcctgaaggaggatgtgcttgagcagaggggcaggctgcagaagttggtggcaaaagagatccaggccccagcctcagctgacattcgcgttttacgggggcaccagctctctatcacatgtttggtcgtcacccccgatgactcagccatcttctctgctgccaaagactgcagcatcattaagtggagcgtggagagtggacggaagctgcatgtgattcctcgagccaagaagggtgccgagggaaagccccctggccacagcagccacgtcctctgcatggccatctcctccgacggcaagtaccttgcctctggtgaccgcagcaagctcattctcatttgggaggcccagagctgccagcacttgtacaccttcacaggacaccgggatgcagtgtcgggtctggcattccgcagaggcacccaccagctctacagcacatcccacgatcgctccgtgaaggtgtggaatgtggcagagaactcctacgtggagacgctcttcggacaccaggacgctgtggctgcactggatgccttgagccgggagtgctgtgtgacggctgggggccgggatgggactgtacgtgtgtggaagatccccgaggagtcccagcttgtcttctatggccaccagggctccatcgactgcatccacctaatcaatgaggagcacatggtgtccggcgcggacgatggctctgtggccttgtggggtctctccaagaagcgaccacttgccctgcagcgtgaagctcacgggctgcggggagagccaggcctggagcagcccttctggatatcgtcggtggcagccctcctcaacacagaccttgtggccacaggntccccagttcctgggtcccgctcggccatgtggg

SEQ ID NO: 437156 - DNA, 1462 bp, Homo sapiens
gcggctggggagctgggagggttcagctgccacgtgagttatgcggccgctgctacacgcctggtgggcagcatgtcggcaacagcggctgctcgtaagcggggaaagccggcctctggggccggggctggcgcgggggccggcaagcggcggcgaaaggccgactctgcgggggacaggggcaaatccaagggtggcggcaagatgaatgaggagatctccagcgactctgagagcgagagcctagctccaaggaagcctgaggaggaggaggaggaggagctggaggaaactgcacaggaaaagaagctgcgcttggccaagctctacctagagcagctccgtcagcaagaggaggagaaggctgaggcccgtgcatttgaggaggaccaggtggcggggcgcctgaaggaggatgtgcttgagcagaggggcaggctgcagaagttggtggcaaaagagatccaggccccagcctcagctgacattcgcgttttacgggggcaccagctctctatcacatgtttggtcgtcacccccgatgactcagccatcttctctgctgccaaagactgcagcatcattaagtggagcgtggagagtggacggaagctgcatgtgattcctcgagccaagaagggtgccgagggaaagccccctggccacagcagccacgtcctctgcatggccatctcctccgacggcaagtaccttgcctctggtgaccgcagcaagctcattctcatttgggaggcccagagctgccagcacttgtacaccttcacaggacaccgggatgcagtgtcgggtctggcattccgcagaggcacccaccagctctacagcacatcccacgatcgctccgtgaaggtgtggaatgtggcagagaactcctacgtggagacgctcttcggacaccaggacgctgtggctgcactggatgccttgagccgggagtgctgtgtgacggctgggggccgggatgggactgtacgtgtgtggaagatccccgaggagtcccagcttgtcttctatggccaccagggctccatcgactgcatccacctaatcaatgaggagcacatggtgtccggcgcggacgatggctctgtggccttgtggggtctctccaagaagcgaccacttgccctgcagcgtgaagctcacgggctgcggggagagccaggcctggagcagcccttctggatatcgtcggtggcagccctcctcaacacagaccttgtggccacaggctcccacagctcctgtgtgcggctttggcagtgtggggaaggcttccggcagcttgaccttctctgtgacatccccctggtgggttttatcaacagcctcaagttctccagctctggggacttctggttcctgacactcttatcctccttatttaagtccttcccaggctatgccccaccctctttgtattaaaagcctcctcttttgg

SEQ ID NO: 437157 - DNA, 1393 bp, Homo sapiens
tcggtaccggcacgtggcgtggctcttcgcgcggctcttgtgtcttttctacatcccatagactcaggccgagaccccatgcgggcgcctggaggaggagctggaggaaactgcacaggaaaagaagctgcgcttggccaagctctacctagagcagctccgtcagcaagaggaggagaaggctgaggcccgtgcatttgaggaggaccaggtggcggggcgcctgaaggaggatgtgcttgagcagaggggcaggctgcagaagttggtggcaaaagagatccaggccccagcctcagctgacattcgcgttttacgggggcaccagctctctatcacatgtttggtcgtcacccccgatgactcagccatcttctctgctgccaaagactgcagcatcattaagtggagcgtggagagtggacggaagctgcatgtgattcctcgagccaagaagggtgccgagggaaagccccctggccacagcagccacgtcctctgcatggccatctcctccgacggcaagtaccttgcctctggtgaccgcagcaagctcattctcatttgggaggcccagagctgccagcacttgtacaccttcacaggacaccgggatgcagtgtcgggtctggcattccgcagaggcacccaccagctctacagcacatcccacgatcgctccgtgaaggtgtggaatgtggcagagaactcctacgtggagacgctcttcggacaccaggacgctgtggctgcactggatgccttgagccgggagtgctgtgtgacggctgggggccgggatgggactgtacgtgtgtggaagatccccgaggagtcccagcttgtcttctatggccaccagggctccatcgactgcatccacctaatcaatgaggagcacatggtgtccggcgcggacgatggctctgtggccttgtggggtctctccaagaagcgaccacttgccctgcagcgtgaagctcacgggctgcggggagagccaggcctggagcagcccttctggatatcgtcggtggcagccctcctcaacacagaccttgtggccacaggctcccacagctcctgtgtgcggctttggcagtgtggggaaggcttccggcagcttgaccttctctgtgacatccccctggtgggttttatcaacagcctcaagttctccagctctggggacttcctggtggctggggtagggcaggagcacaggcttggccgatggtggagaatcaaagaggctcggaattctgtctgcatcatcccactccgcagggtccctgtacccccagctgctggttcctgacactcttatcctccttatttaagtccttcccaggctatgccccaccctctttgtattaaaagcctcctcttttgg

SEQ ID NO: 437158 - DNA, 1927 bp, Homo sapiens
gcggctggggagctgggagggttcagctgccacgtgagttatgcggccgctgctacacgcctggtgggcagcatgtcggcaacagcggctgctcgtaagcggggaaagccggcctctggggccggggctggcgcgggggccggcaagcggcggcgaaaggccgactctgcgggggacaggggcaaatccaagggtggcggcaagatgaatgaggagatctccagcgactctgagagcgagagcctagctccaaggaagcctgaggaggaggaggaggaggagctggaggaaactgcacaggaaaagaagctgcgcttggccaagctctacctagagcagctccgtcagcaagaggaggagaaggctgaggcccgtgcatttgaggaggaccaggtggcggggcgcctgaaggaggatgtgcttgagcagaggggcaggctgcagaagttggtggcaaaagagatccaggccccagcctcagctgacattcgcgttttacgggggcaccagctctctatcacatgtttggtcgtcacccccgatgactcagccatcttctctgctgccaaagactgcagcatcattaagtggagcgtggagagtggacggaagctgcatgtgattcctcgagccaagaagggtgccgagggaaagccccctggccacagcagccacgtcctctgcatggccatctcctccgacggcaagtaccttgcctctggtgaccgcagcaagctcattctcatttgggaggcccagagctgccagcacttgtacaccttcacaggacaccgggatgcagtgtcgggtctggcattccgcagaggcacccaccagctctacagcacatcccacgatcgctccgtgaaggtgtggaatgtggcagagaactcctacgtggagacgctcttcggacaccaggacgctgtggctgcactggatgccttgagccgggagtgctgtgtgacggctgggggccgggatgggactgtacgtgtgtggaagatccccgaggagtcccagcttgtcttctatggccaccagggctccatcgactgcatccacctaatcaatgaggagcacatggtgtccggcgcggacgatggctctgtggccttgtggggtctctccaagaagcgaccacttgccctgcagcgtgaagctcacgggctgcggggagagccaggcctggagcagcccttctggatatcgtcggtggcagccctcctcaacacagaccttgtggccacaggctcccacagctcctgtgtgcggctttggcagtgtggggaaggcttccggcagcttgaccttctctgtgacatccccctggtgggttttatcaacagcctcaagttctccagctctggggacttcctggtggctggggtagggcaggagcacaggcttggccgatggtggagaatcaaagaggctcggaattctgtctgcatcatcccactccgcagggtccctgtacccccagctgctggttcctgacactcttatcctccttatttaagtccttcccaggctatgccccaccctctttgtattaaaagcctcctcttttggaaaaaaaaaaaaaaaaaaaaaaaaaaaaaaaaaaaaaaacccggggggctctttttgcggggggggggaaaacgggggtattatggaagtgggcccatggtgtgccaaatcgctgtggctctcctgtgcccccgtttttcttgtgtacacaacgggggagagaactcgcgcgcgcgggctccccctatataaggggaggcgcggataataaatttccgagataacgcccgggtgtacccccggcattaagggtctgcccgcgaaacacaccccccccgagaaccacaccccccccccagtcatcggccgcggcaacatctacagcgaccacagaagacatcttcactcaagc

SEQ ID NO: 437159 - DNA, 1683 bp, Homo sapiens
gcggctggggagctgggagggttcagctgccacgtgagttatgcggccgctgctacacgcctggtgggcagcatgtcggcaacagcggctgctcgtaagcggggaaagccggcctctggggccggggctggcgcgggggccggcaagcggcggcgaaaggccgactctgcgggggacaggggcaaatccaagggtggcggcaagatgaatgaggagatctccagcgactctgagagcgagagcctagctccaaggaagcctgaggaggaggaggaggaggagctggaggaaactgcacaggaaaagaagctgcgcttggccaagctctacctagagcagctccgtcagcaagaggaggagaaggctgaggcccgtgcatttgaggaggaccaggtggcggggcgcctgaaggaggatgtgcttgagcagaggggcaggctgcagaagttggtggcaaaagagatccaggccccagcctcagctgacattcgcgttttacgggggcaccagctctctatcacatgtttggtcgtcacccccgatgactcagccatcttctctgctgccaaagactgcagcatcattaagtggagcgtggagagtggacggaagctgcatgtgattcctcgagccaagaagggtgccgagggaaagccccctggccacagcagccacgtcctctgcatggccatctcctccgacggcaagtaccttgcctctggtgaccgcagcaagctcattctcatttgggaggcccagagctgccagcacttgtacaccttcacaggacaccgggatgcagtgtcgggtctggcattccgcagaggcacccaccagctctacagcacatcccacgatcgctccgtgaaggtgtggaatgtggcagagaactcctacgtggagacgctcttcggacaccaggacgctgtggctgcactggatgccttgagccgggagtgctgtgtgacggctgggggccgggatgggactgtacgtgtgtggaagatccccgaggagtcccagcttgtcttctatggccaccagggctccatcgactgcatccacctaatcaatgaggagcacatggtgtccggcgcggacgatggctctgtggccttgtggggtctctccaagaagcgaccacttgccctgcagcgtgaagctcacgggctgcggggagagccaggcctggagcagcccttctggatatcgtcggtggcagccctcctcaacacagaccttgtggccacaggctcccacagctcctgtgtgcggctttggcagtgtggggaaggcttccggcagcttgaccttctctgtgacatccccctggtgggttttatcaacagcctcaagttctccagctctggggacttcctggtggctggggtagggcaggagcacaggtatgtgtggccctcgagggttcaggtaaggtggtgcaggctggacagctcggtggaaatggggtggagactgggccgagtctcagctgcgtcttgcactccctgcaggcttggccgatggtggagaatcaaagaggctcggaattctgtctgcatcatcccactccgcagggtccctgtacccccagctgctggttcctgacactcttatcctccttatttaagtccttcccaggctatgccccaccctctttgtattaaaagcctcctcttttgg

SEQ ID NO: 437160 - DNA, 974 bp, Homo sapiens
  misc_feature (909)..(909): n is a, c, g, or t
gcggctggggagctgggagggttcagctgccacgtgagttatgcggccgctgctacacgcctggtgggcagcatgtcggcaacagcggctgctcgtaagcggggaaagccggcctctggggccggggctggcgcgggggccggcaagcggcggcgaaaggccgactctgcgggggacaggggcaaatccaagggtggcggcaagatgaatgaggagatctccagcgactctgagagcgagagcctagctccaaggaagcctgaggaggaggaggaggaggagctggaggaaactgcacaggaaaagaagctgcgcttggccaagctctacctagagcagctccgtcagcaagaggaggagaaggctgaggcccgtgcatttgaggaggaccaggtggcggggcgcctgaaggaggatgtgcttgagcagaggggcaggctgcagaagttggtggcaaaagagatccaggccccagcctcagctgacattcgcgttttacgggggcaccagctctctatcacatgtttggtcgtcacccccgatgactcagccatcttctctgctgccaaagactgcagcatcattaagtggagcgtggagagtggacggaagctgcatgtgattcctcgagccaagaagggtgccgagggaaagccccctggccacagcagccacgtcctctgcatggccatctcctccgacggcaagtaccttgcctctggtgaccgcagcaagctcattctcatttgggaggcccagagctgccagcacttgtacaccttcacaggacaccgggatgcagtgtcgggtctggcattccgcagaggcacccaccagctctacagcacatcccacgatcgctccgtgaaggtgtggaatgtggcagagaactcctacgtggagacgctntcggaaccggccggtgtggcgattctgaccgttgttaccgggccctgacggcgctgtaacccggc

SEQ ID NO: 437161 - DNA, 3292 bp, Homo sapiens
  misc_feature (1841)..(1841): n is a, c, g, or t
  misc_feature (1880)..(1880): n is a, c, g, or t
  misc_feature (2014)..(2014): n is a, c, g, or t
ggtttttgtgtagctgctttctctcacagtgtttgtaaacttgaacccaagtgcaccgttcacagtctccagctccagctcttcactaacacctttattccttgctgttggccttgggacccttactgttccccttgctgtgtagaaacagatgcagtcagacccacataagctggactttggactgaaacctgagttcctgagccgccctccaggccccagtctttttggagccatccaccacccccatgacctggcacggccttcaactttgttctctgccgctggtgagtgtgggtttgggtggggggacagagctgagaaatgtagttctcaggtaactaaataaatgaggtttgggctctgagctgccgctcagtcaccacctacaaaaatacagttaatgccagcttgcaaggcaacatcgcagcacatccagggagttgggaatcttcagtgatacactctctttcattaaaggaggaggcagagatcatctttcccttacagggattcacattgcttcggttcattatttgcttctatattaaaccagtataactcacaagcatgtcagttgctattgagaaagatctgaaggcttgcaagggcagatcggaaggaaacaatgccaggaattatagaaggatgcggtcgcccttaatacggtgcccgcagagcactgtaattttgcaccgggatgctcagtcatgccgtgttttaaagtcctgaggataaagaaaggcgattaaggcagttgccaggagtatggtctgtgatagggaggttgggccactcggttgctggttttctctgctacaaaacgtaatactattgcctggttggttatagcggtggaagaaatttaggaaacggtgtaaacacccaagtgacctgctcatcggatctgtaattcatttaacctctgagaatacacactgtcaagtgtgcgtgtggaaggggtgaggtagagagtgacgattatgctcattcctgctccaggtacaaacaaaagacagcggctgtaaggactgtgtgtgtgctggatgagaacagccctcttggtattaagggtttcttgtcattctgtcttctctaaagcttttttaagtgtaatttctggcacacagagctcagctcagttaacacttaaaaatgatggcactgagctcattctgctaataacttcatacccactatgctaagtagaatttattcttctggacgtaagcagtcaaggggctccccatttctgatccttacgagacaagtcttacagccatcctgccagctgccaccccaggcttttatccaagactcactgttggtggacctctggctcttctgttcaggaagagagaagcacccacactgcaagaaatcatcattataatgggccttagctaccaaagcaagtgcgtccccctggagggtagatggaatttgctaaggtctcaggtttttctctgtcagtgctgtctggggacatatttgaaggctctgttaccatggcacctaggctctgagacagggctacatgaagagcaatttttggaaagaatagatttctctctggcttccatttgagccaagtggatgaattggcttcttttgcttcaataattctggaactgcaaggcacccctgggggccctgggctcagcaaagctctggtcttcattgaagcattaattagcttgcactacacagacagtatgtggccaaaattttatttagctgacaacactgctaacggcctgatgaatattctggaatatattcacttggtggaggcggggtatcatttttacacttcccaggtggaaaataagccagtatgnagggctgaatagataactcctcaggtgtcttccaattcngaactactgtgacggggatgatgttcctcctgtactgagtggcttcctctccaaacccaggccacaagacttttgcagcccagggaacagcagtccaaaacataaatcgagttaacagagtgtagacagcaacnacccctacgtttaatccattttcctaagggaatttatatttgtttataggaacttagacaaaatgcaaaggattatggaacagtttttagtaaattctttatccaggccttgtttatacttccattctagaatgtaaccttctttagcataagcagtatgggattctgcccaaaatagttatttggtgaaccttgtaactgatgtgtataacttgtacatacttaagaaatccagccattttcatcttgctattgggtgctaatcccatgaatataaactagagacttcttcagatgaccctggcaaatctctcgtctaggacaaagcctgccttccaggaagctagcctccttagctagtaagtagcctcgtattaacaagcccatttggtgccctaaggcctttagaaatgtccttccctaattcacatttgcacactctctttctctgtctccttccttccttcctttcctggcttccttcaggaacaggaatagaggcatcttcaagaagtacacattaggcaaaatacagagaagaggaggaaatgtggatcaagggacaactgaaggaaaccactaaattagacctgagttccctggcaggcaaagcaaaaacctgtcagagtcagttataagattttcagtgccccaaaacataagaatcaaccagcttttcctggcattgaaagttgagagacatcagaggacttcatctcctaaaacctaattgagctcacaataatgagttttatagagtcgggccttatagtatccttcgatgtgggtgcatgcgaactaacatactcttcaggagaagggattctgcaagtccccagagcagcgtagccaagaaccacagcttcaggaccacccctcctgagccagggatgataacgggctgggtttctggaagtgtttctcaaagtgaaaacttggtcctccgagatgctctatgaggagtggattccatgacgaaatgttcccctcttagagaacgaaggagcctataagcttattaataagcttattaatggctctaagaagcccttcagtaaagaaacttgcttagctttttttaatccagtatttctccaaatttacttggttataaagcctcccctcctcccatgacccagggcagttatctctgtctttgtaatactgtgtgtcatcggcttaaaaaagaaatacctgtttttggtggtggccagccacgctgggaaagagaaagagggatgattgattttctgcttcctaaaaaaaaaaaaaaaaaaa

SEQ ID NO: 437162 - DNA, 520 bp, Homo sapiens
  misc_feature (1)..(1): n is a, c, g, or t
  misc_feature (3)..(3): n is a, c, g, or t
  misc_feature (41)..(41): n is a, c, g, or t
  misc_feature (86)..(86): n is a, c, g, or t
nanacctctccccagataccagttagtagacagctttaaangccagggtctgaaggccattctccctcagacctacccggtgtggnttggagctcaaaacagtgaaactcctggtgtgtgatgtgagcaaatcatgttgccagagggcacattgctattgattaaacttgtacaggggcttgtcagcgtagatgtaccaaggcttgtgaagtgggggaggggacacttggcacttttgatagtgtgaaaatgggttaattattctctaaaagggcttcatttaaaagtaaaattctaacattttaatttcccctcctaatgaagcactacaaatttgttaattagagcaattgtttgagtgacaggcatgtaaccaagttgtcattttctcttcacagttgacagatcctttcagacctatgttaaggaaaccagggaagtggtgtgctatgcatgttcacatcgcctggcagatttaccaccaccaacagaaagtcaaggtcagtccgaccttcgtggt

SEQ ID NO: 437163 - DNA, 4350 bp, Homo sapiens
  misc_feature (1)..(1): n is a, c, g, or t
  misc_feature (3)..(3): n is a, c, g, or t
  misc_feature (41)..(41): n is a, c, g, or t
  misc_feature (86)..(86): n is a, c, g, or t
nanacctctccccagataccagttagtagacagctttaaangccagggtctgaaggccattctccctcagacctacccggtgtggnttggagctcaaaacagtgaaactcctggtgtgtgatgtgagcaaatcatgttgccagagggcacattgctattgattaaacttgtacaggggcttgtcagcgtagatgtaccaaggcttgtgaagtgggggaggggacacttggcacttttgatagtgtgaaaatgggttaattattctctaaaagggcttcatttaaaagtaaaattctaacattttaatttcccctcctaatgaagcactacaaatttgttaattagagcaattgtttgagtgacaggcatgtaaccaagttgtcattttctcttcacagttgacagatcctttcagacctatgttaaggaaaccagggaagtggtgtgctatgcatgttcacatcgcctggcagatttaccaccaccaacagaaagtcaagaaacagatgcagtcagacccacataagctggactttggactgaaacctgagttcctgagccgccctccaggccccagtctttttggagccatccaccacccccatgacctggcacggccttcaactttgttctctgccgctggtgctgcacacccaactgggaccccttttgggccacctcctcatcacagcaacttcctcaaccctgctgcccacctagagccttttaatcggccgtctacattcacaggcctagcagcagttggtggcaatgccttcgggggacttggaaatccttccgttacacccaactcaatgttcggccacaaggatggccccagtgtgcagaactttagcaaccctcacgaaccctggaaccggctgcaccgaacgcctccgtcgttcccgacccctccgccctggctgaagccaggggagctggagcgcagcgcgtccgctgcagctcatgacagagatagagatgtagataaacgagactcatctgttagtaaagatgacaaagaaagggaaagcgtcgagaagagacactccagccacccttcaccagcacctgtcctcccggtgaatgccctgggacatacccgcagctccactgaacagatccgggctcatctgaacactgaggctcgggagaaggacaaacccaaagagagggagagagaccactcggaatcccgcaaggacctggccgccgacgagcacaaggcgaaagagggccacctgcccgagaaggacgggcacggccacgaggggcgcgccgcgggcgaagaggccaagcagctggcccgggtgccgtctccctacgtgcggaccccggtggtggagagtgccaggcccaacagcacctcgagccgggaggccgagccgcgcaagggtgagccggcctacgagaaccccaagaagagctccgaggtcaaggtgaaggaggagcggaaggaagaccatgacctgcctccagaggccccgcagacccaccgggcctcggagccgccgcctcccaactcctcgtccagcgtgcacccggggcccctggcctcgatgcccatgacggtgggggtgacgggcattcaccccatgaacagcatcagcagcctggacaggactcgcatgatgacccccttcatgggcatcagccccctcccgggcggagagcgcttcccgtacccttctttccactgggaccccatccgggaccccttgagggatccttaccgagaacttgacattcaccggagagacccgctgggcagggacttcctgctaaggaacgacccgctccaccggctctcgactccccggctgtacgaagccgaccgctccttcagggaccgggagcctcacgactacagccaccaccaccaccaccaccaccacccgctgtctgtggaccctcggcgggagcacgagcggggaggccacctggacgagcgggagcgcttgcacatgctcagagaagactacgagcacacgcggctccactccgtgcaccccgcctccctcgacggacacctcccccaccccagcctcatcaccccgggactccccagcatgcactatccccgcatcagccccaccgcgggcaaccagaacggactcctcaacaagacccctccgacagcagcgctgagcgcacctcccccgctcatctccacgctggggggccgcccggtctctcccagaaggacgactcctctgtccgcagagataagggagaggcccccttcccacacgctgaaggatatcgaggcccgataagccgagaacaggagcaagaacgaggaagaagaaaccctaggcagacaccaggccaggcttgagagacagaactcctgcatggctcacacagactgggggggaaagccccaccccttccccttgtaaaaaatgtatagactcagtgcacattttgaaatgttttgtatattatatgttgagatttttcagatcttttagcccagtcatatgttctcacgtctcctactttttgtttctcgtataaaactttttgatttgaaccaaaacagtgaagatgacaacacacaccaattggatgataattgtagcgggggcggtgggggggagaagtccacgccatccatcatgcaaaattctttcagatgaggtgggaaggccgtgtacatagttatgtaaaaagagattgcttcatgagctaatggttcatatatgcaaaagggtaagatgaaagctttactttgtacaaatgtaaatagataaagtaacataatacattaatacttcttaaaatgtgctatttgcaaacttacttaatatcagtgaacacagtcggctaaagctgtgttcccatatattgttatagacagctaaacccttcaactatgcaatgaatgttcgggcttttcacaaaagcccgcctaactcaaaggagccttttcaaatccatttacagcatacttaaggtcatattttccctgaacaagcgcttacgtgatatgactctgttttccttgcttgttttttttcaaacggagaaacatcctgttttgcaaattggaccccaggctggaacttagcatctgaagttgccgcttgtgggctctgggggaaagtgtagccccggagaggtaactgaggacatgagcaaccagtgccagggagggtgggatttgccagatgccaaaatcaggggacgggtggtggtgtctgtcagacacacacaggtcgccagtgacttcacacacacctcatgtgagaaccatgccttttttagtgtgtcctatttcatacctgtacacacttcctcgttttgtaatgagatttacttacacccaaacagatcctgaaagaaagcttcaagttttctcagatgatggatatgttttcactgtattcaataactgacggatgtaaggtgcacgtttcctgatgtgacgcactgtattccagctggtgatcaagtctgggaacagccgtaacaggtcaaccttgtggagccatcgcgagttagagggtgaaagatggcagaaaaaaaagtcttgtgtgtgagtgtgttttttgagtttgcatcaatcttaatgtctcttcataatacttttataatacattaagcctcttgtctacatatttggagagaatatgactttactagcagagaaatacaatatatcttgtctactggactgtaaaatatatgtatgaaataaaattagttccatttggtcttctagtatattaaagtgctatctgacgttgttatcctgtttttgcaaaaaaaaaaaaaaaaaaaaagttaactacagaccattgtttctaataagcagagagatctattttagtagtaaactgaaggtttagttgtgagcttcagattttgtgaactccagatgttgtgcggtgtttttttttttttttaagacaacaactaaaaaaatgcaaggaatatgtacactggaactgtagtggtagctttcagtattgtaaagagattgttctatacggacctttttgctgtttatcctgtatgtaataaagtcctttctagatcctatgtgaaaagaaaagtgaagcaactgaatcttcagcatgttctcatcggcggagccttcttgtgtaatgtaaactgtgccatgttattaaaaaatgtgaactaagcttccagctgcttgtttgtgtgaggtgaccatcattaccttagggaagaagccatacctgtacaagaccgggctcttgaaaagaaacacctcgaacccagcccgtgtaagaacagaaggctcacctgcagtggctgaccaccctacccaactcggttagtgtctcaccaatttgttactataaacatttgcaccccaca

SEQ ID NO: 437164 - DNA, 3834 bp, Homo sapiens
gaattaggtcatctcagtacccatttggtcccttttcctttttaacttcccctgtccccacctttgcttttggttttaaaaagaaaaaaaaaagctgtgagctacctctccagtgtaggacaagacttcctctaatgaatttgttaatctcctttccttttccagctcccaataatatgtattcattttaactctgaatgctgttaaaagttttttggtaagtaccttcattacagcagattatataatttctcttaaacctttttgttctccacttcaccatttcagcacccaactcaatgttcggccacaaggatggccccagtgtgcagaactttagcaaccctcacgaaccctggaaccggctgcaccgaacgcctccgtcgttcccgacccctccgccctggctgaagccaggggagctggagcgcagcgcgtccgctgcagctcatgacagagatagagatgtagataaacgagactcatctgttagtaaagatgacaaagaaagggaaagcgtcgagaagagacactccagccacccttcaccagcacctgtcctcccggtgaatgccctgggacatacccgcagctccactgaacagatccgggctcatctgaacactgaggctcgggagaaggacaaacccaaagagagggagagagaccactcggaatcccgcaaggacctggccgccgacgagcacaaggcgaaagagggccacctgcccgagaaggacgggcacggccacgaggggcgcgccgcgggcgaagaggccaagcagctggcccgggtgccgtctccctacgtgcggaccccggtggtggagagtgccaggcccaacagcacctcgagccgggaggccgagccgcgcaagggtgagccggcctacgagaaccccaagaagagctccgaggtcaaggtgaaggaggagcggaaggaagaccatgacctgcctccagaggccccgcagacccaccgggcctcggagccgccgcctcccaactcctcgtccagcgtgcacccggggcccctggcctcgatgcccatgacggtgggggtgacgggcattcaccccatgaacagcatcagcagcctggacaggactcgcatgatgacccccttcatgggcatcagccccctcccgggcggagagcgcttcccgtacccttctttccactgggaccccatccgggaccccttgagggatccttaccgagaacttgacattcaccggagagacccgctgggcagggacttcctgctaaggaacgacccgctccaccggctctcgactccccggctgtacgaagccgaccgctccttcagggaccgggagcctcacgactacagccaccaccaccaccaccaccaccacccgctgtctgtggaccctcggcgggagcacgagcggggaggccacctggacgagcgggagcgcttgcacatgctcagagaagactacgagcacacgcggctccactccgtgcaccccgcctccctcgacggacacctcccccaccccagcctcatcaccccgggactccccagcatgcactatccccgcatcagccccaccgcgggcaaccagaacggactcctcaacaagacccctccgacagcagcgctgagcgcacctcccccgctcatctccacgctggggggccgcccggtctctcccagaaggacgactcctctgtccgcagagataagggagaggcccccttcccacacgctgaaggatatcgaggcccgataagccgagaacaggagcaagaacgaggaagaagaaaccctaggcagacaccaggccaggcttgagagacagaactcctgcatggctcacacagactgggggggaaagccccaccccttccccttgtaaaaaatgtatagactcagtgcacattttgaaatgttttgtatattatatgttgagatttttcagatcttttagcccagtcatatgttctcacgtctcctactttttgtttctcgtataaaactttttgatttgaaccaaaacagtgaagatgacaacacacaccaattggatgataattgtagcgggggcggtgggggggagaagtccacgccatccatcatgcaaaattctttcagatgaggtgggaaggccgtgtacatagttatgtaaaaagagattgcttcatgagctaatggttcatatatgcaaaagggtaagatgaaagctttactttgtacaaatgtaaatagataaagtaacataatacattaatacttcttaaaatgtgctatttgcaaacttacttaatatcagtgaacacagtcggctaaagctgtgttcccatatattgttatagacagctaaacccttcaactatgcaatgaatgttcgggcttttcacaaaagcccgcctaactcaaaggagccttttcaaatccatttacagcatacttaaggtcatattttccctgaacaagcgcttacgtgatatgactctgttttccttgcttgttttttttcaaacggagaaacatcctgttttgcaaattggaccccaggctggaacttagcatctgaagttgccgcttgtgggctctgggggaaagtgtagccccggagaggtaactgaggacatgagcaaccagtgccagggagggtgggatttgccagatgccaaaatcaggggacgggtggtggtgtctgtcagacacacacaggtcgccagtgacttcacacacacctcatgtgagaaccatgccttttttagtgtgtcctatttcatacctgtacacacttcctcgttttgtaatgagatttacttacacccaaacagatcctgaaagaaagcttcaagttttctcagatgatggatatgttttcactgtattcaataactgacggatgtaaggtgcacgtttcctgatgtgacgcactgtattccagctggtgatcaagtctgggaacagccgtaacaggtcaaccttgtggagccatcgcgagttagagggtgaaagatggcagaaaaaaaagtcttgtgtgtgagtgtgttttttgagtttgcatcaatcttaatgtctcttcataatacttttataatacattaagcctcttgtctacatatttggagagaatatgactttactagcagagaaatacaatatatcttgtctactggactgtaaaatatatgtatgaaataaaattagttccatttggtcttctagtatattaaagtgctatctgacgttgttatcctgtttttgcaaaaaaaaaaaaaaaaaaaaagttaactacagaccattgtttctaataagcagagagatctattttagtagtaaactgaaggtttagttgtgagcttcagattttgtgaactccagatgttgtgcggtgtttttttttttttttaagacaacaactaaaaaaatgcaaggaatatgtacactggaactgtagtggtagctttcagtattgtaaagagattgttctatacggacctttttgctgtttatcctgtatgtaataaagtcctttctagatcctatgtgaaaagaaaagtgaagcaactgaatcttcagcatgttctcatcggcggagccttcttgtgtaatgtaaactgtgccatgttattaaaaaatgtgaactaagcttccagctgcttgtttgtgtgaggtgaccatcattaccttagggaagaagccatacctgtacaagaccgggctcttgaaaagaaacacctcgaacccagcccgtgtaagaacagaaggctcacctgcagtggctgaccaccctacccaactcggttagtgtctcaccaatttgttactataaacatttgcaccccaca

SEQ ID NO: 437165 - DNA, 4296 bp, Homo sapiens
  misc_feature (1)..(1): n is a, c, g, or t
  misc_feature (3)..(3): n is a, c, g, or t
  misc_feature (41)..(41): n is a, c, g, or t
  misc_feature (86)..(86): n is a, c, g, or t
nanacctctccccagataccagttagtagacagctttaaangccagggtctgaaggccattctccctcagacctacccggtgtggnttggagctcaaaacagtgaaactcctggtgtgtgatgtgagcaaatcatgttgccagagggcacattgctattgattaaacttgtacaggggcttgtcagcgtagatgtaccaaggcttgtgaagtgggggaggggacacttggcacttttgatagtgtgaaaatgggttaattattctctaaaagggcttcatttaaaagtaaaattctaacattttaatttcccctcctaatgaagcactacaaatttgttaattagagcaattgtttgagtgacaggcatgtaaccaagttgtcattttctcttcacagttgacagatcctttcagacctatgttaaggaaaccagggaagtggtgtgctatgcatgttcacatcgcctggcagatttaccaccaccaacagaaagtcaagaaacagatgcagtcagacccacataagctggactttggactgaaacctgagttcctgagccgccctccaggccccagtctttttggagccatccaccacccccatgacctggcacggccttcaactttgttctctgccgctggtgctgcacacccaactgggaccccttttgggccacctcctcatcacagcaacttcctcaaccctgctgcccacctagagccttttaatcggccgtctacattcacaggcctagcagcagttggtggcaatgccttcgggggacttggaaatccttccgttacacccaactcaatgttcggccacaaggatggccccagtgtgcagaactttagcaaccctcacgaaccctggaaccggctgcaccgaacgcctccgtcgttcccgacccctccgccctggctgaagccaggggagctggagcgcagcgcgtccgctgcagctcatgacagagatagagatgtagataaacgagactcatctgttagtaaagatgacaaagaaagggaaagcgtcgagaagagacactccagccacccttcaccagcacctgtcctcccggtgaatgccctgggacatacccgcagctccactgaacagatccgggctcatctgaacactgaggctcgggagaaggacaaacccaaagagagggagagagaccactcggaatcccgcaaggacctggccgccgacgagcacaaggcgaaagagggccacctgcccgagaaggacgggcacggccacgaggggcgcgccgcgggcgaagaggccaagcagctggcccgggtgccgtctccctacgtgcggaccccggtggtggagagtgccaggcccaacagcacctcgagccgggaggccgagccgcgcaagggtgagccggcctacgagaaccccaagaagagctccgaggtcaaggtgaaggaggagcggaaggaagaccatgacctgcctccagaggccccgcagacccaccgggcctcggagccgccgcctcccaactcctcgtccagcgtgcacccggggcccctggcctcgatgcccatgacggtgggggtgacgggcattcaccccatgaacagcatcagcagcctggacaggactcgcatgatgacccccttcatgggcatcagccccctcccgggcggagagcgcttcccgtacccttctttccactgggaccccatccgggaccccttgagggatccttaccgagaacttgacattcaccggagagacccgctgggcagggacttcctgctaaggaacgacccgctccaccggctctcgactccccggctgtacgaagccgaccgctccttcagggaccgggagcctcacgactacagccaccaccaccaccaccaccaccacccgctgtctgtggaccctcggcgggagcacgagcggggaggccacctggacgagcgggagcgcttgcacatgctcagagaagactacgagcacacgcggctccactccgtgcaccccgcctccctcgacggacacctcccccaccccagcctcatcaccccgggactccccagcatgcactatccccgcatcagccccaccgcgggcaaccagaacggactcctcaacaagacccctccgacagcagcgctgagcgcacctcccccgctcatctccacgctggggggccgcccggtctctcccagaaggacgactcctctgtccgcagagataagggagaggcccccttcccacacgctgaaggatatcgaggcccgataagccgagaacaggagcaagaacgaggaagaagaaaccctaggcagacaccaggccaggcttgagagacagaactcctgcatggctcacacagactgggggggaaagccccaccccttccccttgtaaaaaatgtatagactcagtgcacattttgaaatgttttgtatattatatgttgagatttttcagatcttttagcccagtcatatgttctcacgtctcctactttttgtttctcgtataaaactttttgatttgaaccaaaacagtgaagatgacaacacacaccaattggatgataattgtagcgggggcggtgggggggagaagtccacgccatccatcatgcaaaattctttcagatgaggtgggaaggccgtgtacatagttatgtaaaaagagattgcttcatgagctaatggttcatatatgcaaaagggtaagatgaaagctttactttgtacaaatgtaaatagataaagtaacataatacattaatacttcttaaaatgtgctatttgcaaacttacttaatatcagtgaacacagtcggctaaagctgtgttcccatatattgttatagacagctaaacccttcaactatgcaatgaatgttcgggcttttcacagtcatattttccctgaacaagcgcttacgtgatatgactctgttttccttgcttgttttttttcaaacggagaaacatcctgttttgcaaattggaccccaggctggaacttagcatctgaagttgccgcttgtgggctctgggggaaagtgtagccccggagaggtaactgaggacatgagcaaccagtgccagggagggtgggatttgccagatgccaaaatcaggggacgggtggtggtgtctgtcagacacacacaggtcgccagtgacttcacacacacctcatgtgagaaccatgccttttttagtgtgtcctatttcatacctgtacacacttcctcgttttgtaatgagatttacttacacccaaacagatcctgaaagaaagcttcaagttttctcagatgatggatatgttttcactgtattcaataactgacggatgtaaggtgcacgtttcctgatgtgacgcactgtattccagctggtgatcaagtctgggaacagccgtaacaggtcaaccttgtggagccatcgcgagttagagggtgaaagatggcagaaaaaaaagtcttgtgtgtgagtgtgttttttgagtttgcatcaatcttaatgtctcttcataatacttttataatacattaagcctcttgtctacatatttggagagaatatgactttactagcagagaaatacaatatatcttgtctactggactgtaaaatatatgtatgaaataaaattagttccatttggtcttctagtatattaaagtgctatctgacgttgttatcctgtttttgcaaaaaaaaaaaaaaaaaaaaagttaactacagaccattgtttctaataagcagagagatctattttagtagtaaactgaaggtttagttgtgagcttcagattttgtgaactccagatgttgtgcggtgtttttttttttttttaagacaacaactaaaaaaatgcaaggaatatgtacactggaactgtagtggtagctttcagtattgtaaagagattgttctatacggacctttttgctgtttatcctgtatgtaataaagtcctttctagatcctatgtgaaaagaaaagtgaagcaactgaatcttcagcatgttctcatcggcggagccttcttgtgtaatgtaaactgtgccatgttattaaaaaatgtgaactaagcttccagctgcttgtttgtgtgaggtgaccatcattaccttagggaagaagccatacctgtacaagaccgggctcttgaaaagaaacacctcgaacccagcccgtgtaagaacagaaggctcacctgcagtggctgaccaccctacccaactcggttagtgtctcaccaatttgttactataaacatttgcaccccaca

SEQ ID NO: 437166 - DNA, 3767 bp, Homo sapiens
  misc_feature (1)..(1): n is a, c, g, or t
  misc_feature (3)..(3): n is a, c, g, or t
  misc_feature (41)..(41): n is a, c, g, or t
  misc_feature (86)..(86): n is a, c, g, or t
nanacctctccccagataccagttagtagacagctttaaangccagggtctgaaggccattctccctcagacctacccggtgtggnttggagctcaaaacagtgaaactcctggtgtgtgatgtgagcaaatcatgttgccagagggcacattgctattgattaaacttgtacaggggcttgtcagcgtagatgtaccaaggcttgtgaagtgggggaggggacacttggcacttttgatagtgtgaaaatgggttaattattctctaaaagggcttcatttaaaagtaaaattctaacattttaatttcccctcctaatgaagcactacaaatttgttaattagagcaattgtttgagtgacaggcatgtaaccaagttgtcattttctcttcacagttgacagatcctttcagacctatgttaaggaaaccagggaagtggtgtgctatgcatgttcacatcgcctggcagatttaccaccaccaacagaaagtcaagaaacagatgcagtcagacccacataagctggactttggactgaaacctgagttcctgagccgccctccaggccccagtctttttggagccatccaccacccccatgacctggcacggccttcaactttgttctctgccgctggtgctgcacacccaactgggaccccttttgggccacctcctcatcacagcaacttcctcaaccctgctgcccacctagagccttttaatcggccgtctacattcacaggcctagcagcagttggtggcaatgccttcgggggacttggaaatccttccgttacacccaactcaatgttcggccacaaggatggccccagtgtgcagaactttagcaaccctcacgaaccctggaaccggctgcaccgaacgcctccgtcgttcccgacccctccgccctggctgaagccaggggagctggagcgcagcgcgtccgctgcagctcatgacagagatagagatgtagataaacgagactcatctgttagtaaagatgacaaagaaagggaaagcgtcgagaagagacactccagccacccttcaccagcacctgtcctcccggtgaatgccctgggacatacccgcagctccactgaacagatccgggctcatctgaacactgaggctcgggagaaggacaaacccaaagagagggagagagaccactcggaatcccgcaaggacctggccgccgacgagcacaaggcgaaagagggccacctgcccgagaaggacgggcacggccacgaggggcgcgccgcgggcgaagaggccaagcagctggcccgggtgccgtctccctacgtgcggaccccggtggtggagagtgccaggcccaacagcacctcgagccgggaggccgagccgcgcaagggtgagccggcctacgagaaccccaagaagagctccgaggtcaaggtgaaggaggagcggaaggaagaccatgacctgcctccagaggccccgcagacccaccgggcctcggagccgccgcctcccaactcctcgtccagcgtgcacccggggcccctggcctcgatgcccatgacggtgggggtgacgggcattcaccccatgaacagcatcagcagcctggacaggactcgcatgatgacccccttcatgggcatcagccccctcccgggcggagagcgcttcccgtacccttctttccactgggaccccatccgggaccccttgagggatccttaccgagaacttgacattcaccggagagacccgctgggcagggacttcctgctaaggaacgacccgctccaccggctctcgactccccggctgtacgaagccgaccgctccttcagggaccgggagcctcacgactacagccaccaccaccaccaccaccaccacccgctgtctgtggaccctcggcgggagcacgagcggggaggccacctggacgagcgggagcgcttgcacatgctcagagaagactacgagcacacgcggctccactccgtgcaccccgcctccctcgacggacacctcccccaccccagcctcatcaccccgggactccccagcatgcactatccccgcatcagccccaccgcgggcaaccagaacggactcctcaacaagacccctccgacagcagcgctgagcgcacctcccccgctcatctccacgctggggggccgcccggtctctcccagaaggacgactcctctgtccgcagagataagggagaggcccccttcccacacgctgaaggatatcgaggcccgataagccgagaacaggagcaagaacgaggaagaagaaaccctaggcagacaccaggccaggcttgagagacagaactcctgcatggctcacacagactgggggggaaagccccaccccttccccttgtaaaaaatgtatagactcagtgcacattttgaaatgttttgtatattatatgttgagatttttcagatcttttagcccagtcatatgttctcacgtctcctactttttgtttctcgtataaaactttttgatttgaaccaaaacagtgaagatgacaacacacaccaattggatgataattgtagcgggggcggtgggggggagaagtccacgccatccatcatgcaaaattctttcagatgaggtgggaaggccgtgtacatagttatgtaaaaagagattgcttcatgagctaatggttcatatatgcaaaagggtaagatgaaagctttactttgtacaaatgtaaatagataaagtaacataatacattaatacttcttaaaatgtgctatttgcaaacttacttaatatcagtgaacacagtcggctaaagctgtgttcccatatattgttatagacagctaaacccttcaactatgcaatgaatgttcgggcttttcacaaaagcccgcctaactcaaaggagccttttcaaatccatttacagcatacttaaggtcatattttccctgaacaagcgcttacgtgatatgactctgttttccttgcttgttttttttcaaacggagaaacatcctgttttgcaaattggaccccaggctggaacttagcatctgaagttgccgcttgtgggctctgggggaaagtgtagccccggagaggtaactgaggacatgagcaaccagtgccagggagggtgggatttgccagatgccaaaatcaggggacgggtggtggtgtctgtcagacacacacaggtcgccagtgacttcacacacacctcatgtgagaaccatgccttttttagtgtgtcctatttcatacctgtacacacttcctcgttttgtaatgagatttacttacacccaaacagatcctgaaagaaagcttcaagttttctcagatgatggatatgttttcactgtattcaataactgacggatgtaaggtgcacgtttcctgatgtgacgcactgtattccagctggtgatcaagtctgggaacagccgtaacaggtcaaccttgtggagccatcgcgagttagagggtgaaagatggcagaaaaaaaagtcttgtgtgtgagtgtgttttttgagtttgcatcaatcttaatgtctcttcataatacttttataatacattaagcctcttgtctacatatttggagagaatatgactttactagcagagaaatacaatatatcttgtctactggactgtaaaatatatgtatgaaataaaattagttccatttggtcttctagtatattaaagtgctatctgacgttgttatcctgtttttgc

SEQ ID NO: 437167 - DNA, 4293 bp, Homo sapiens
  misc_feature (1)..(1): n is a, c, g, or t
  misc_feature (3)..(3): n is a, c, g, or t
  misc_feature (41)..(41): n is a, c, g, or t
  misc_feature (86)..(86): n is a, c, g, or t
nanacctctccccagataccagttagtagacagctttaaangccagggtctgaaggccattctccctcagacctacccggtgtggnttggagctcaaaacagtgaaactcctggtgtgtgatgtgagcaaatcatgttgccagagggcacattgctattgattaaacttgtacaggggcttgtcagcgtagatgtaccaaggcttgtgaagtgggggaggggacacttggcacttttgatagtgtgaaaatgggttaattattctctaaaagggcttcatttaaaagtaaaattctaacattttaatttcccctcctaatgaagcactacaaatttgttaattagagcaattgtttgagtgacaggcatgtaaccaagttgtcattttctcttcacagttgacagatcctttcagacctatgttaaggaaaccagggaagtggtgtgctatgcatgttcacatcgcctggcagatttaccaccaccaacagaaagtcaagaaacagatgcagtcagacccacataagctggactttggactgaaacctgagttcctgagccgccctccaggccccagtctttttggagccatccaccacccccatgacctggcacggccttcaactttgttctctgccgctggtgctgcacacccaactgggaccccttttgggccacctcctcatcacagcaacttcctcaaccctgctgcccacctagagccttttaatcggccgtctacattcacaggcctagcagcagttggtggcaatgccttcgggggacttggaaatccttccgttacacccaactcaatgttcggccacaaggatggccccagtgtgcagaactttagcaaccctcacgaaccctggaaccggctgcaccgaacgcctccgtcgttcccgacccctccgccctggctgaagccaggggagctggagcgcagcgcgtccgctgcagctcatgacagagatagagatgtagataaacgagactcatctgttagtaaagatgacaaagaaagggaaagcgtcgagaagagacactccagccacccttcaccagcacctgtcctcccggtgaatgccctgggacatacccgcagctccactgaacagatccgggctcatctgaacactgaggctcgggagaaggacaaacccaaagagagggagagagaccactcggaatcccgcaaggacctggccgccgacgagcacaaggcgaaagagggccacctgcccgagaaggacgggcacggccacgaggggcgcgccgcgggcgaagaggccaagcagctggcccgggtgccgtctccctacgtgcggaccccggtggtggagagtgccaggcccaacagcacctcgagccgggaggccgagccgcgcaagggtgagccggcctacgagaaccccaagaagagctccgaggtcaaggtgaaggaggagcggaaggaagaccatgacctgcctccagaggccccgcagacccaccgggcctcggagccgccgcctcccaactcctcgtccagcgtgcacccggggcccctggcctcgatgcccatgacggtgggggtgacgggcattcaccccatgaacagcatcagcagcctggacaggactcgcatgatgacccccttcatgggcatcagccccctcccgggcggagagcgcttcccgtacccttctttccactgggaccccatccgggaccccttgagggatccttaccgagaacttgacattcaccggagagacccgctgggcagggacttcctgctaaggaacgacccgctccaccggctctcgactccccggctgtacgaagccgaccgctccttcagggaccgggagcctcacgactacagccaccaccaccaccaccaccaccacccgctgtctgtggaccctcggcgggagcacgagcggggaggccacctggacgagcgggagcgcttgcacatgctcagagaagactacgagcacacgcggctccactccgtgcaccccgcctccctcgacggacacctcccccaccccagcctcatcaccccgggactccccagcatgcactatccccgcatcagccccaccgcgggcaaccagaacggactcctcaacaagacccctccgacagcagcgctgagcgcacctcccccgctcatctccacgctggggggccgcccggtctctcccagaaggacgactcctctgtccgcagagataagggagaggcccccttcccacacgctgaaggatatcgaggcccgataagccgagaacaggagcaagaacgaggaagaagaaaccctaggcagacaccaggccaggcttgagagacagaactcctgcatggctcacacagactgggggggaaagccccaccccttccccttgtaaaaaatgtatagactcagtgcacattttgaaatgttttgtatattatatgttgagatttttcagatcttttagcccagtcatatgttctcacgtctcctactttttgtttctcgtataaaactttttgatttgaaccaaaacagtgaagatgacaacacacaccaattggatgataattgtagcgggggcggtgggggggagaagtccacgccatccatcatgcaaaattctttcagatgaggtgggaaggccgtgtacatagttatgtaaaaagagattgcttcatgagctaatggttcatatatgcaaaagggtaagatgaaagctttactttgtacaaatgtaaatagataaagtaacataatacattaatacttcttaaaatgtgctatttgcaaacttacttaatatcagtgaacacagtcggctaaagctgtgttcccatatattgttatagacagctaaacccttcaactatgcaatgaatgttcgggcttttcacaaaagcccgcctaactcaaaggagccttttcaaatccatttacagcatacttaaggtcatattttccctgaacaagcgcttacgtgatatgactctgttttccttgcttgttttttttcaaacggagaaacatcctgttttgcaaattggaccccaggctggaacttagcatctgaagttgccgcttgtgggctctgggggaaagtgtagccccggagaggtaactgaggacatgagcaaccagtgccagggagggtgggatttgccagatgccaaacacacctcatgtgagaaccatgccttttttagtgtgtcctatttcatacctgtacacacttcctcgttttgtaatgagatttacttacacccaaacagatcctgaaagaaagcttcaagttttctcagatgatggatatgttttcactgtattcaataactgacggatgtaaggtgcacgtttcctgatgtgacgcactgtattccagctggtgatcaagtctgggaacagccgtaacaggtcaaccttgtggagccatcgcgagttagagggtgaaagatggcagaaaaaaaagtcttgtgtgtgagtgtgttttttgagtttgcatcaatcttaatgtctcttcataatacttttataatacattaagcctcttgtctacatatttggagagaatatgactttactagcagagaaatacaatatatcttgtctactggactgtaaaatatatgtatgaaataaaattagttccatttggtcttctagtatattaaagtgctatctgacgttgttatcctgtttttgcaaaaaaaaaaaaaaaaaaaaagttaactacagaccattgtttctaataagcagagagatctattttagtagtaaactgaaggtttagttgtgagcttcagattttgtgaactccagatgttgtgcggtgtttttttttttttttaagacaacaactaaaaaaatgcaaggaatatgtacactggaactgtagtggtagctttcagtattgtaaagagattgttctatacggacctttttgctgtttatcctgtatgtaataaagtcctttctagatcctatgtgaaaagaaaagtgaagcaactgaatcttcagcatgttctcatcggcggagccttcttgtgtaatgtaaactgtgccatgttattaaaaaatgtgaactaagcttccagctgcttgtttgtgtgaggtgaccatcattaccttagggaagaagccatacctgtacaagaccgggctcttgaaaagaaacacctcgaacccagcccgtgtaagaacagaaggctcacctgcagtggctgaccaccctacccaactcggttagtgtctcaccaatttgttactataaacatttgcaccccaca

SEQ ID NO: 437168 - DNA, 1728 bp, Homo sapiens
ctttgtacaaatgtaaatagataaagtaacataatacattaatacttcttaaaatgtattatgttactttatctatttacatttgtacaaagtaaagctttcatcttaccctttgtacaaatgtaaatagataaagtaacataatacattaatacttcttaaaatgtgctatttgcaaacttacttaatatcagtgaacacagtcggctaaagctgtgttcccatatattgttatagacagctaaacccttcaactatgcaatgaatgttcgggcttttcacaaaagcccgcctaactcaaaggagccttttcaaatccatttacagcatacttaaggtcatattttccctgaacaagcgcttacgtgatatgactctgttttccttgcttgttttttttcaaacggagaaacatcctgttttgcaaattggaccccaggctggaacttagcatctgaagttgccgcttgtgggctctgggggaaagtgtagccccggagaggtaactgaggacatgagcaaccagtgccagggagggtgggatttgccagatgccaaaatcaggggacgggtggtggtgtctgtcagacacacacaggtcgccagtgacttcacacacacctcatgtgagaaccatgccttttttagtgtgtcctatttcatacctgtacacacttcctcgttttgtaatgagatttacttacacccaaacagatcctgaaagaaagcttcaagttttctcagatgatggatatgttttcactgtattcaataactgacggatgtaaggtgcacgtttcctgatgtgacgcactgtattccagctggtgatcaagtctgggaacagccgtaacaggtcaaccttgtggagccatcgcgagttagagggtgaaagatggcagaaaaaaaagtcttgtgtgtgagtgtgttttttgagtttgcatcaatcttaatgtctcttcataatacttttataatacattaagcctcttgtctacatatttggagagaatatgactttactagcagagaaatacaatatatcttgtctactggactgtaaaatatatgtatgaaataaaattagttccatttggtcttctagtatattaaagtgctatctgacgttgttatcctgtttttgcaaaaaaaaaaaaaaaaaaaaagttaactacagaccattgtttctaataagcagagagatctattttagtagtaaactgaaggtttagttgtgagcttcagattttgtgaactccagatgttgtgcggtgtttttttttttttttaagacaacaactaaaaaaatgcaaggaatatgtacactggaactgtagtggtagctttcagtattgtaaagagattgttctatacggacctttttgctgtttatcctgtatgtaataaagtcctttctagatcctatgtgaaaagaaaagtgaagcaactgaatcttcagcatgttctcatcggcggagccttcttgtgtaatgtaaactgtgccatgttattaaaaaatgtgaactaagcttccagctgcttgtttgtgtgaggtgaccatcattaccttagggaagaagccatacctgtacaagaccgggctcttgaaaagaaacacctcgaacccagcccgtgtaagaacagaaggctcacctgcagtggctgaccaccctacccaactcggttagtgtctcaccaatttgttactataaacatttgcaccccaca

SEQ ID NO: 437169 - DNA, 207 bp, Homo sapiens
aaaaaaaaaaaacacacattttcttttaccctgtgtcttgcctgcaggggcctgggtggacttcagccatgacctcccttgaacatattttctcacggggcccttaagcaagtagaagccggttgcatcttcgaagttggctttttgtaaactctggtttcgttatgtttgacttaacaggtgctgcacacccaactgggacccctt

SEQ ID NO: 437170 - DNA, 417 bp, Homo sapiens
gcccttttggttcactacaaggagcatttcagccgaaggtaagaaacctcacagtgaaaacacacaggcatgtgtctaagtggcgtcccgggccaggcgtgcaggaagttctgcgtcctcttgcctgtgcagtgactcattaatcaggtcctaagtgaccactgggattagagtgagcctatttttcttttttttccaagtccatctagttttaaatggccgtgaaaatttacttttcaaactgtactacccagataatctcagttaagctaagatttcttgtgctcttcaaaatatacacaatatttatttttttactaccaatatcgtggacataacttctggtcaggaattctatgaaatatcagacacatgtgcgccaggttgttccgcaggtgtatgtaattagtaaagaca

SEQ ID NO: 437171 - DNA, 5594 bp, Homo sapiens
cattgatggatttgccatgaccagctttgtcacttttgaagcgctggagaaagatgtagcacttaagcctcaggaacgtgtggagaaacgccagacgcccctgaccaagaagaaacgagaagcacttaccaatggcttgtcctttcattcaaagaagagcagactcagccacccacaccactacagctcagatcgagaaaatgaccgcaatctctgccagcaccttgggaagagaaagaaaatgccgaaggcactcagacagctcaagccaggacagaacagctgcagggacagtgacagtgaaagtgccagtggagaatccaagggcttccaccggagcagctctcgggaaaggctcagtgatagttcagctccttccagcttgggaacaggctacttctgtgacagtgacagtgaccaggaagagaaggcatcagatgccagctctgaaaaactcttcaacactgttattgtaaacaaagatccggagttaggtgttggcacgctaccagaacatgacagccaggatgcagggccgattgtccccaagatatcgggtctagagagaagccaggagaagagccaggactgttgcaaagagccaatctttgagcctgtggtgcttaaagacccctgccctcaggtcgcacagccaataccccagccgcagacggagccccaactccgagctccttctccggaccctgacttggtgcagcgcacagaggccccacctcaacccccacctctgagtacacagccaccacagggccctcctgaggcccagctccagcctgccccgcagcctcaggtgcagaggccacccaggccacagtcccccacccagctgctccatcagaacctcccacctgtgcaggcccacccctctgctcagagcctctcccagccattgtcagcctacaacagcagtagcttaagcctcaacagtttaagcagcagcagaagcagcactccagcgaagactcagcccgccccacctcacatctcccaccacccctctgcctccccgttccccctctccctgcccaaccacagccccctgcacagcttcacacccaccctccagccccccgcacactcacatcaccccaatatgtttgcccctcccactgctctgcctcctccaccaccactgacatcaggaagtctgcaggtggccggacacccggccgggagcacttactcagagcaagacatcttgcgacaggaactgaacactcgttttttggcctctcagagtgctgaccgcggggcttccctgggccctccgccctacctgcggaccgagttccatcagcaccagcaccagcaccagcacacccaccagcacacgcaccagcacaccttcacgccgttcccccacgccatcccacccaccgccatcatgccgacgccagcacctcccatgtttgacaaataccctacaaaagttgacccattctaccggcacagtctcttccattcctatcctcctgcagtgtcgggcatcccccctatgatcccacccactggcccttttggttcactacaaggagcatttcagccgaagacatccaaccctatcgatgtcgctgctcggcctgggacagtcccacacactttactccaaaaggacccgaggttgacagatcctttcagacctatgttaaggaaaccagggaagtggtgtgctatgcatgttcacatcgcctggcagatttaccaccaccaacagaaagtcaagaaacagatgcagtcagacccacataagctggactttggactgaaacctgagttcctgagccgccctccaggccccagtctttttggagccatccaccacccccatgacctggcacggccttcaactttgttctctgccgctggtgctgcacacccaactgggaccccttttgggccacctcctcatcacagcaacttcctcaaccctgctgcccacctagagccttttaatcggccgtctacattcacaggcctagcagcagttggtggcaatgccttcgggggacttggaaatccttccgttacacccaactcaatgttcggccacaaggatggccccagtgtgcagaactttagcaaccctcacgaaccctggaaccggctgcaccgaacgcctccgtcgttcccgacccctccgccctggctgaagccaggggagctggagcgcagcgcgtccgctgcagctcatgacagagatagagatgtagataaacgagactcatctgttagtaaagatgacaaagaaagggaaagcgtcgagaagagacactccagccacccttcaccagcacctgtcctcccggtgaatgccctgggacatacccgcagctccactgaacagatccgggctcatctgaacactgaggctcgggagaaggacaaacccaaagagagggagagagaccactcggaatcccgcaaggacctggccgccgacgagcacaaggcgaaagagggccacctgcccgagaaggacgggcacggccacgaggggcgcgccgcgggcgaagaggccaagcagctggcccgggtgccgtctccctacgtgcggaccccggtggtggagagtgccaggcccaacagcacctcgagccgggaggccgagccgcgcaagggtgagccggcctacgagaaccccaagaagagctccgaggtcaaggtgaaggaggagcggaaggaagaccatgacctgcctccagaggccccgcagacccaccgggcctcggagccgccgcctcccaactcctcgtccagcgtgcacccggggcccctggcctcgatgcccatgacggtgggggtgacgggcattcaccccatgaacagcatcagcagcctggacaggactcgcatgatgacccccttcatgggcatcagccccctcccgggcggagagcgcttcccgtacccttctttccactgggaccccatccgggaccccttgagggatccttaccgagaacttgacattcaccggagagacccgctgggcagggacttcctgctaaggaacgacccgctccaccggctctcgactccccggctgtacgaagccgaccgctccttcagggaccgggagcctcacgactacagccaccaccaccaccaccaccaccacccgctgtctgtggaccctcggcgggagcacgagcggggaggccacctggacgagcgggagcgcttgcacatgctcagagaagactacgagcacacgcggctccactccgtgcaccccgcctccctcgacggacacctcccccaccccagcctcatcaccccgggactccccagcatgcactatccccgcatcagccccaccgcgggcaaccagaacggactcctcaacaagacccctccgacagcagcgctgagcgcacctcccccgctcatctccacgctggggggccgcccggtctctcccagaaggacgactcctctgtccgcagagataagggagaggcccccttcccacacgctgaaggatatcgaggcccgataagccgagaacaggagcaagaacgaggaagaagaaaccctaggcagacaccaggccaggcttgagagacagaactcctgcatggctcacacagactgggggggaaagccccaccccttccccttgtaaaaaatgtatagactcagtgcacattttgaaatgttttgtatattatatgttgagatttttcagatcttttagcccagtcatatgttctcacgtctcctactttttgtttctcgtataaaactttttgatttgaaccaaaacagtgaagatgacaacacacaccaattggatgataattgtagcgggggcggtgggggggagaagtccacgccatccatcatgcaaaattctttcagatgaggtgggaaggccgtgtacatagttatgtaaaaagagattgcttcatgagctaatggttcatatatgcaaaagggtaagatgaaagctttactttgtacaaatgtaaatagataaagtaacataatacattaatacttcttaaaatgtgctatttgcaaacttacttaatatcagtgaacacagtcggctaaagctgtgttcccatatattgttatagacagctaaacccttcaactatgcaatgaatgttcgggcttttcacaaaagcccgcctaactcaaaggagccttttcaaatccatttacagcatacttaaggtcatattttccctgaacaagcgcttacgtgatatgactctgttttccttgcttgttttttttcaaacggagaaacatcctgttttgcaaattggaccccaggctggaacttagcatctgaagttgccgcttgtgggctctgggggaaagtgtagccccggagaggtaactgaggacatgagcaaccagtgccagggagggtgggatttgccagatgccaaaatcaggggacgggtggtggtgtctgtcagacacacacaggtcgccagtgacttcacacacacctcatgtgagaaccatgccttttttagtgtgtcctatttcatacctgtacacacttcctcgttttgtaatgagatttacttacacccaaacagatcctgaaagaaagcttcaagttttctcagatgatggatatgttttcactgtattcaataactgacggatgtaaggtgcacgtttcctgatgtgacgcactgtattccagctggtgatcaagtctgggaacagccgtaacaggtcaaccttgtggagccatcgcgagttagagggtgaaagatggcagaaaaaaaagtcttgtgtgtgagtgtgttttttgagtttgcatcaatcttaatgtctcttcataatacttttataatacattaagcctcttgtctacatatttggagagaatatgactttactagcagagaaatacaatatatcttgtctactggactgtaaaatatatgtatgaaataaaattagttccatttggtcttctagtatattaaagtgctatctgacgttgttatcctgtttttgcaaaaaaaaaaaaaaaaaaaaagttaactacagaccattgtttctaataagcagagagatctattttagtagtaaactgaaggtttagttgtgagcttcagattttgtgaactccagatgttgtgcggtgtttttttttttttttaagacaacaactaaaaaaatgcaaggaatatgtacactggaactgtagtggtagctttcagtattgtaaagagattgttctatacggacctttttgctgtttatcctgtatgtaataaagtcctttctagatcctatgtgaaaagaaaagtgaagcaactgaatcttcagcatgttctcatcggcggagccttcttgtgtaatgtaaactgtgccatgttattaaaaaatgtgaactaagcttccagctgcttgtttgtgtgaggtgaccatcattaccttagggaagaagccatacctgtacaagaccgggctcttgaaaagaaacacctcgaacccagcccgtgtaagaacagaaggctcacctgcagtggctgaccaccctacccaactcggttagtgtctcaccaatttgttactataaacatttgcaccccaca

SEQ ID NO: 437172 - DNA, 5492 bp, Homo sapiens
cattgatggatttgccatgaccagctttgtcacttttgaagcgctggagaaagatgtagcacttaagcctcaggaacgtgtggagaaacgccagacgcccctgaccaagaagaaacgagaagcacttaccaatggcttgtcctttcattcaaagaagagcagactcagccacccacaccactacagctcagatcgagaaaatgaccgcaatctctgccagcaccttgggaagagaaagaaaatgccgaaggcactcagacagctcaagccaggacagaacagctgcagggacagtgacagtgaaagtgccagtggagaatccaagggcttccaccggagcagctctcgggaaaggctcagtgatagttcagctccttccagcttgggaacaggctacttctgtgacagtgacagtgaccaggaagagaaggcatcagatgccagctctgaaaaactcttcaacactgttattgtaaacaaagatccggagttaggtgttggcacgctaccagaacatgacagccaggatgcagggccgattgtccccaagatatcgggtctagagagaagccaggagaagagccaggactgttgcaaagagccaatctttgagcctgtggtgcttaaagacccctgccctcaggtcgcacagccaataccccagccgcagacggagccccaactccgagctccttctccggaccctgacttggtgcagcgcacagaggccccacctcaacccccacctctgagtacacagccaccacagggccctcctgaggcccagctccagcctgccccgcagcctcaggtgcagaggccacccaggccacagtcccccacccagctgctccatcagaacctcccacctgtgcaggcccacccctctgctcagagcctctcccagccattgtcagcctacaacagcagtagcttaagcctcaacagtttaagcagcagcagaagcagcactccagcgaagactcagcccgccccacctcacatctcccaccacccctctgcctccccgttccccctctccctgcccaaccacagccccctgcacagcttcacacccaccctccagccccccgcacactcacatcaccccaatatgtttgcccctcccactgctctgcctcctccaccaccactgacatcaggaagtctgcaggtggccggacacccggccgggagcacttactcagagcaagacatcttgcgacaggaactgaacactcgttttttggcctctcagagtgctgaccgcggggcttccctgggccctccgccctacctgcggaccgagttccatcagcaccagcaccagcaccagcacacccaccagcacacgcaccagcacaccttcacgccgttcccccacgccatcccacccaccgccatcatgccgacgccagcacctcccatgtttgacaaataccctacaaaagttgacccattctaccggcacagtctcttccattcctatcctcctgcagtgtcgggcatcccccctatgatcccacccactggcccttttggttcactacaaggagcatttcagccgaagaaaccagggaagtggtgtgctatgcatgttcacatcgcctggcagatttaccaccaccaacagaaagtcaagaaacagatgcagtcagacccacataagctggactttggactgaaacctgagttcctgagccgccctccaggccccagtctttttggagccatccaccacccccatgacctggcacggccttcaactttgttctctgccgctggtgctgcacacccaactgggaccccttttgggccacctcctcatcacagcaacttcctcaaccctgctgcccacctagagccttttaatcggccgtctacattcacaggcctagcagcagttggtggcaatgccttcgggggacttggaaatccttccgttacacccaactcaatgttcggccacaaggatggccccagtgtgcagaactttagcaaccctcacgaaccctggaaccggctgcaccgaacgcctccgtcgttcccgacccctccgccctggctgaagccaggggagctggagcgcagcgcgtccgctgcagctcatgacagagatagagatgtagataaacgagactcatctgttagtaaagatgacaaagaaagggaaagcgtcgagaagagacactccagccacccttcaccagcacctgtcctcccggtgaatgccctgggacatacccgcagctccactgaacagatccgggctcatctgaacactgaggctcgggagaaggacaaacccaaagagagggagagagaccactcggaatcccgcaaggacctggccgccgacgagcacaaggcgaaagagggccacctgcccgagaaggacgggcacggccacgaggggcgcgccgcgggcgaagaggccaagcagctggcccgggtgccgtctccctacgtgcggaccccggtggtggagagtgccaggcccaacagcacctcgagccgggaggccgagccgcgcaagggtgagccggcctacgagaaccccaagaagagctccgaggtcaaggtgaaggaggagcggaaggaagaccatgacctgcctccagaggccccgcagacccaccgggcctcggagccgccgcctcccaactcctcgtccagcgtgcacccggggcccctggcctcgatgcccatgacggtgggggtgacgggcattcaccccatgaacagcatcagcagcctggacaggactcgcatgatgacccccttcatgggcatcagccccctcccgggcggagagcgcttcccgtacccttctttccactgggaccccatccgggaccccttgagggatccttaccgagaacttgacattcaccggagagacccgctgggcagggacttcctgctaaggaacgacccgctccaccggctctcgactccccggctgtacgaagccgaccgctccttcagggaccgggagcctcacgactacagccaccaccaccaccaccaccaccacccgctgtctgtggaccctcggcgggagcacgagcggggaggccacctggacgagcgggagcgcttgcacatgctcagagaagactacgagcacacgcggctccactccgtgcaccccgcctccctcgacggacacctcccccaccccagcctcatcaccccgggactccccagcatgcactatccccgcatcagccccaccgcgggcaaccagaacggactcctcaacaagacccctccgacagcagcgctgagcgcacctcccccgctcatctccacgctggggggccgcccggtctctcccagaaggacgactcctctgtccgcagagataagggagaggcccccttcccacacgctgaaggatatcgaggcccgataagccgagaacaggagcaagaacgaggaagaagaaaccctaggcagacaccaggccaggcttgagagacagaactcctgcatggctcacacagactgggggggaaagccccaccccttccccttgtaaaaaatgtatagactcagtgcacattttgaaatgttttgtatattatatgttgagatttttcagatcttttagcccagtcatatgttctcacgtctcctactttttgtttctcgtataaaactttttgatttgaaccaaaacagtgaagatgacaacacacaccaattggatgataattgtagcgggggcggtgggggggagaagtccacgccatccatcatgcaaaattctttcagatgaggtgggaaggccgtgtacatagttatgtaaaaagagattgcttcatgagctaatggttcatatatgcaaaagggtaagatgaaagctttactttgtacaaatgtaaatagataaagtaacataatacattaatacttcttaaaatgtgctatttgcaaacttacttaatatcagtgaacacagtcggctaaagctgtgttcccatatattgttatagacagctaaacccttcaactatgcaatgaatgttcgggcttttcacaaaagcccgcctaactcaaaggagccttttcaaatccatttacagcatacttaaggtcatattttccctgaacaagcgcttacgtgatatgactctgttttccttgcttgttttttttcaaacggagaaacatcctgttttgcaaattggaccccaggctggaacttagcatctgaagttgccgcttgtgggctctgggggaaagtgtagccccggagaggtaactgaggacatgagcaaccagtgccagggagggtgggatttgccagatgccaaaatcaggggacgggtggtggtgtctgtcagacacacacaggtcgccagtgacttcacacacacctcatgtgagaaccatgccttttttagtgtgtcctatttcatacctgtacacacttcctcgttttgtaatgagatttacttacacccaaacagatcctgaaagaaagcttcaagttttctcagatgatggatatgttttcactgtattcaataactgacggatgtaaggtgcacgtttcctgatgtgacgcactgtattccagctggtgatcaagtctgggaacagccgtaacaggtcaaccttgtggagccatcgcgagttagagggtgaaagatggcagaaaaaaaagtcttgtgtgtgagtgtgttttttgagtttgcatcaatcttaatgtctcttcataatacttttataatacattaagcctcttgtctacatatttggagagaatatgactttactagcagagaaatacaatatatcttgtctactggactgtaaaatatatgtatgaaataaaattagttccatttggtcttctagtatattaaagtgctatctgacgttgttatcctgtttttgcaaaaaaaaaaaaaaaaaaaaagttaactacagaccattgtttctaataagcagagagatctattttagtagtaaactgaaggtttagttgtgagcttcagattttgtgaactccagatgttgtgcggtgtttttttttttttttaagacaacaactaaaaaaatgcaaggaatatgtacactggaactgtagtggtagctttcagtattgtaaagagattgttctatacggacctttttgctgtttatcctgtatgtaataaagtcctttctagatcctatgtgaaaagaaaagtgaagcaactgaatcttcagcatgttctcatcggcggagccttcttgtgtaatgtaaactgtgccatgttattaaaaaatgtgaactaagcttccagctgcttgtttgtgtgaggtgaccatcattaccttagggaagaagccatacctgtacaagaccgggctcttgaaaagaaacacctcgaacccagcccgtgtaagaacagaaggctcacctgcagtggctgaccaccctacccaactcggttagtgtctcaccaatttgttactataaacatttgcaccccaca

SEQ ID NO: 437173 - DNA, 4296 bp, Homo sapiens
  misc_feature (1)..(1): n is a, c, g, or t
  misc_feature (3)..(3): n is a, c, g, or t
  misc_feature (41)..(41): n is a, c, g, or t
  misc_feature (86)..(86): n is a, c, g, or t
nanacctctccccagataccagttagtagacagctttaaangccagggtctgaaggccattctccctcagacctacccggtgtggnttggagctcaaaacagtgaaactcctggtgtgtgatgtgagcaaatcatgttgccagagggcacattgctattgattaaacttgtacaggggcttgtcagcgtagatgtaccaaggcttgtgaagtgggggaggggacacttggcacttttgatagtgtgaaaatgggttaattattctctaaaagggcttcatttaaaagtaaaattctaacattttaatttcccctcctaatgaagcactacaaatttgttaattagagcaattgtttgagtgacaggcatgtaaccaagttgtcattttctcttcacagttgacagatcctttcagacctatgttaaggaaaccagggaagtggtgtgctatgcatgttcacatcgcctggcagatttaccaccaccaacagaaagtcaagaaacagatgcagtcagacccacataagctggactttggactgaaacctgagttcctgagccgccctccaggccccagtctttttggagccatccaccacccccatgacctggcacggccttcaactttgttctctgccgctggtgctgcacacccaactgggaccccttttgggccacctcctcatcacagcaacttcctcaaccctgctgcccacctagagccttttaatcggccgtctacattcacaggcctagcagcagttggtggcaatgccttcgggggacttggaaatccttccgttacacccaactcaatgttcggccacaaggatggccccagtgtgcagaactttagcaaccctcacgaaccctggaaccggctgcaccgaacgcctccgtcgttcccgacccctccgccctggctgaagccaggggagctggagcgcagcgcgtccgctgcagctcatgacagagatagagatgtagataaacgagactcatctgttagtaaagatgacaaagaaagggaaagcgtcgagaagagacactccagccacccttcaccagcacctgtcctcccggtgaatgccctgggacatacccgcagctccactgaacagatccgggctcatctgaacactgaggctcgggagaaggacaaacccaaagagagggagagagaccactcggaatcccgcaaggacctggccgccgacgagcacaaggcgaaagagggccacctgcccgagaaggacgggcacggccacgaggggcgcgccgcgggcgaagaggccaagcagctggcccgggtgccgtctccctacgtgcggaccccggtggtggagagtgccaggcccaacagcacctcgagccgggaggccgagccgcgcaagggtgagccggcctacgagaaccccaagaagagctccgaggtcaaggtgaaggaggagcggaaggaagaccatgacctgcctccagaggccccgcagacccaccgggcctcggagccgccgcctcccaactcctcgtccagcgtgcacccggggcccctggcctcgatgcccatgacggtgggggtgacgggcattcaccccatgaacagcatcagcagcctggacaggactcgcatgatgacccccttcatgggcatcagccccctcccgggcggagagcgcttcccgtacccttctttccactgggaccccatccgggaccccttgagggatccttaccgagaacttgacattcaccggagagacccgctgggcagggacttcctgctaaggaacgacccgctccaccggctctcgactccccggctgtacgaagccgaccgctccttcagggaccgggagcctcacgactacagccaccaccaccaccaccaccaccacccgctgtctgtggaccctcggcgggagcacgagcggggaggccacctggacgagcgggagcgcttgcacatgctcagagaagactacgagcacacgcggctccactccgtgcaccccgcctccctcgacggacacctcccccaccccagcctcatcaccccgggactccccagcatgcactatccccgcatcagccccaccgcgggcaaccagaacggactcctcaacaagacccctccgacagcagcgctgagcgcacctcccccgctcatctccacgctggggggccgcccggtctctcccagaaggacgactcctctgtccgcagagataagggagaggcccccttcccacacgctgaaggatatcgaggcccgataagccgagaacaggagcaagaacgaggaagaagaaaccctaggcagacaccaggccaggcttgagagacagaactcctgcatggctcacacagactgggggggaaagccccaccccttccccttgtaaaaaatgtatagactcagtgcacattttgaaatgttttgtatattatatgttgagatttttcagatcttttagcccagtcatatgttctcacgtctcctactttttgtttctcgtataaaactttttgatttgaaccaaaacagtgaagatgacaacacacaccaattggatgataattgtagcgggggcggtgggggggagaagtccacgccatccatcatgcaaaattctttcagatgaggtgggaaggccgtgtacatagttatgtaaaaagagattgcttcatgagctaatggttcatatatgcaaaagggtaagatgaaagctttactttgtacaaatgtaaatagataaagtaacataatacattaatacttctttgtgttcccatatattgttatagacagctaaacccttcaactatgcaatgaatgttcgggcttttcacaaaagcccgcctaactcaaaggagccttttcaaatccatttacagcatacttaaggtcatattttccctgaacaagcgcttacgtgatatgactctgttttccttgcttgttttttttcaaacggagaaacatcctgttttgcaaattggaccccaggctggaacttagcatctgaagttgccgcttgtgggctctgggggaaagtgtagccccggagaggtaactgaggacatgagcaaccagtgccagggagggtgggatttgccagatgccaaaatcaggggacgggtggtggtgtctgtcagacacacacaggtcgccagtgacttcacacacacctcatgtgagaaccatgccttttttagtgtgtcctatttcatacctgtacacacttcctcgttttgtaatgagatttacttacacccaaacagatcctgaaagaaagcttcaagttttctcagatgatggatatgttttcactgtattcaataactgacggatgtaaggtgcacgtttcctgatgtgacgcactgtattccagctggtgatcaagtctgggaacagccgtaacaggtcaaccttgtggagccatcgcgagttagagggtgaaagatggcagaaaaaaaagtcttgtgtgtgagtgtgttttttgagtttgcatcaatcttaatgtctcttcataatacttttataatacattaagcctcttgtctacatatttggagagaatatgactttactagcagagaaatacaatatatcttgtctactggactgtaaaatatatgtatgaaataaaattagttccatttggtcttctagtatattaaagtgctatctgacgttgttatcctgtttttgcaaaaaaaaaaaaaaaaaaaaagttaactacagaccattgtttctaataagcagagagatctattttagtagtaaactgaaggtttagttgtgagcttcagattttgtgaactccagatgttgtgcggtgtttttttttttttttaagacaacaactaaaaaaatgcaaggaatatgtacactggaactgtagtggtagctttcagtattgtaaagagattgttctatacggacctttttgctgtttatcctgtatgtaataaagtcctttctagatcctatgtgaaaagaaaagtgaagcaactgaatcttcagcatgttctcatcggcggagccttcttgtgtaatgtaaactgtgccatgttattaaaaaatgtgaactaagcttccagctgcttgtttgtgtgaggtgaccatcattaccttagggaagaagccatacctgtacaagaccgggctcttgaaaagaaacacctcgaacccagcccgtgtaagaacagaaggctcacctgcagtggctgaccaccctacccaactcggttagtgtctcaccaatttgttactataaacatttgcaccccaca

SEQ ID NO: 437174 - DNA, 3730 bp, Homo sapiens
  misc_feature (1)..(1): n is a, c, g, or t
  misc_feature (3)..(3): n is a, c, g, or t
  misc_feature (41)..(41): n is a, c, g, or t
  misc_feature (86)..(86): n is a, c, g, or t
nanacctctccccagataccagttagtagacagctttaaangccagggtctgaaggccattctccctcagacctacccggtgtggnttggagctcaaaacagtgaaactcctggtgtgtgatgtgagcaaatcatgttgccagagggcacattgctattgattaaacttgtacaggggcttgtcagcgtagatgtaccaaggcttgtgaagtgggggaggggacacttggcacttttgatagtgtgaaaatgggttaattattctctaaaagggcttcatttaaaagtaaaattctaacattttaatttcccctcctaatgaagcactacaaatttgttaattagagcaattgtttgagtgacaggcatgtaaccaagttgtcattttctcttcacagttgacagatcctttcagacctatgttaaggaaaccagggaagtggtgtgctatgcatgttcacatcgcctggcagatttaccaccaccaacagaaagtcaagaaacagatgcagtcagacccacataagctggactttggactgaaacctgagttcctgagccgccctccaggccccagtctttttggagccatccaccacccccatgacctggcacggccttcaactttgttctctgccgctggtgctgcacacccaactgggaccccttttgggccacctcctcatcacagcaacttcctcaaccctgctgcccacctagagccttttaatcggccgtctacattcacaggcctagcagcagttggtggcaatgccttcgggggacttggaaatccttccgttacacccaactcaatgttcggccacaaggatggccccagtgtgcagaactttagcaaccctcacgaaccctggaaccggctgcaccgaacgcctccgtcgttcccgacccctccgccctggctgaagccaggggagctggagcgcagcgcgtccgctgcagctcatgacagagatagagatgtagataaacgagactcatctgttagtaaagatgacaaagaaagggaaagcgtcgagaagagacactccagccacccttcaccagcacctgtcctcccggtgaatgccctgggacatacccgcagctccactgaacagatccgggctcatctgaacactgaggctcgggagaaggacaaacccaaagagagggagagagaccactcggaatcccgcaaggacctggccgccgacgagcacaaggcgaaagagggccacctgcccgagaaggacgggcacggccacgaggggcgcgccgcgggcgaagaggccaagcagctggcccgggtgccgtctccctacgtgcggaccccggtggtggagagtgccaggcccaacagcacctcgagccgggaggccgagccgcgcaagggtgagccggcctacgagaaccccaagaagagctccgaggtcaaggtgaaggaggagcggaaggaagaccatgacctgcctccagaggccccgcagacccaccgggcctcggagccgccgcctcccaactcctcgtccagcgtgcacccggggcccctggcctcgatgcccatgacggtgggggtgacgggcattcaccccatgaacagcatcagcagcctggacaggactcgcatgatgacccccttcatgggcatcagccccctcccgggcggagagcgcttcccgtacccttctttccactgggaccccatccgggaccccttgagggatccttaccgagaacttgacattcaccggagagacccgctgggcagggacttcctgctaaggaacgacccgctccaccggctctcgactccccggctgtacgaagccgaccgctccttcagggaccgggagcctcacgactacagccaccaccaccaccaccaccaccacccgctgtctgtggaccctcggcgggagcacgagcggggaggccacctggacgagcgggagcgcttgcacatgctcagagaagactacgagcacacgcggctccactccgtgcaccccgcctccctcgacggacacctcccccaccccagcctcatcaccccgggactccccagcatgcactatccccgcatcagccccaccgcgggcaaccagaacggactcctcaacaagacccctccgacagcagcgctgagcgcacctcccccgctcatctccacgctggggggccgcccggtctctcccagaaggacgactcctctgtccgcagagataagggagaggcccccttcccacacgctgaaggatatcgaggcccgataagccgagaacaggagcaagaacgaggaagaagaaaccctaggcagacaccaggccaggcttgagagacagaactcctgcatggctcacacagactgggggggaaagccccaccccttccccttgtaaaaaatgtatagactcagtgcacattttgaaatgttttgtatattatatgttgagatttttcagatcttttagcccagtcatatgttctcacgtctcctactttttgtttctcgtataaaactttttgatttgaaccaaaacagtgaagatgacaacacacaccaattggatgataattgtagcgggggcggtgggggggagaagtccacgccatccatcatgcaaaattctttcagatgaggtgggaaggccgtgtacatagttatgtaaaaagagattgcttcatgagctaatggttcatatatgcaaaagggtaagatgaaagctttactttgtacaaatgtaaatagataaagtaacataatacattaatacttcttaaaatgtgctatttgcaaacttacttaatatcagtgaacacagtcggctaaagctgtgttcccatatattgttatagacagctaaacccttcaactatgcaatgaatgttcgggcttttcacaaaagcccgcctaactcaaaggagccttttcaaatccatttacagcatacttaaggtcatattttccctgaacaagcgcttacgtgatatgactctgttttccttgcttgttttttttcaaacggagaaacatcctgttttgcaaattggaccccaggctggaacttagcatctgaagttgccgcttgtgggctctgggggaaagtgtagccccggagaggtaactgaggacatgagcaaccagtgccagggagggtgggatttgccagatgccaaaatcaggggacgggtggtggtgtctgtcagacacacacaggtcgccagtgacttcacacacacctcatgtgagaaccatgccttttttagtgtgtcctatttcatacctgtacacacttcctcgttttgtaatgagatttacttacacccaaacagatcctgaaagaaagcttcaagttttctcagatgatggatatgttttcactgtattcaataactgacggatgtaaggtgcacgtttcctgatgtgacgcactgtattccagctggtgatcaagtctgggaacagccgtaacaggtcaaccttgtggagccatcgcgagttagagggtgaaagatggcagaaaaaaaagtcttgtgtgtgagtgtgttttttgagtttgcatcaatcttaatgtctcttcataatacttttataatacattaagcctcttgtctacatatttggagagaatatgactttactagcagagaaatacaatatatcttgtctactggactgtaaaatatatgtatgaaataaaattagttccatttggtcttctagtat

SEQ ID NO: 437175 - DNA, 1780 bp, Homo sapiens
cattgatggatttgccatgaccagctttgtcacttttgaagcgctggagaaagatgtagcacttaagcctcaggaacgtgtggagaaacgccagacgcccctgaccaagaagaaacgagaagcacttaccaatggcttgtcctttcattcaaagaagagcagactcagccacccacaccactacagctcagatcgagaaaatgaccgcaatctctgccagcaccttgggaagagaaagaaaatgccgaaggcactcagacagctcaagccaggacagaacagctgcagggacagtgacagtgaaagtgccagtggagaatccaagggcttccaccggagcagctctcgggaaaggctcagtgatagttcagctccttccagcttgggaacaggctacttctgtgacagtgacagtgaccaggaagagaaggcatcagatgccagctctgaaaaactcttcaacactgttattgtaaacaaagatccggagttaggtgttggcacgctaccagaacatgacagccaggatgcagggccgattgtccccaagatatcgggtctagagagaagccaggagaagagccaggactgttgcaaagagccaatctttgagcctgtggtgcttaaagacccctgccctcaggtcgcacagccaataccccagccgcagacggagccccaactccgagctccttctccggaccctgacttggtgcagcgcacagaggccccacctcaacccccacctctgagtacacagccaccacagggccctcctgaggcccagctccagcctgccccgcagcctcaggtgcagaggccacccaggccacagtcccccacccagctgctccatcagaacctcccacctgtgcaggcccacccctctgctcagagcctctcccagccattgtcagcctacaacagcagtagcttaagcctcaacagtttaagcagcagcagaagcagcactccagcgaagactcagcccgccccacctcacatctcccaccacccctctgcctccccgttccccctctccctgcccaaccacagccccctgcacagcttcacacccaccctccagccccccgcacactcacatcaccccaatatgtttgcccctcccactgctctgcctcctccaccaccactgacatcaggaagtctgcaggtggccggacacccggccgggagcacttactcagagcaagacatcttgcgacaggaactgaacactcgttttttggcctctcagagtgctgaccgcggggcttccctgggccctccgccctacctgcggaccgagttccatcagcaccagcaccagcaccagcacacccaccagcacacgcaccagcacaccttcacgccgttcccccacgccatcccacccaccgccatcatgccgacgccagcacctcccatgtttgacaaataccctacaaaagttgacccattctaccggcacagtgatccctcctgtttttgaaatgcattaaaatctccaatcatttaggacttctatctgatttaacaattaataattagaaaagctccctttctaatgatgccctcacccgggatgtcatttgctggctgattgatcctgaactacttttaactttttaagttacacattcgtggcacgtctgtgtgatcattccatcatggcttcttgactaatggcatcaaactgagattacgtggcttgctcatgtcgatgtctttctatgggacgggaatttgaatatgtcacttgcctcctactaaaatcttt

SEQ ID NO: 437176 - DNA, 6901 bp, Homo sapiens
tcgaccgcccagccaggtgcaaaatgccgtgtcattgggagactccgcagccggagcattagattacagctcgacggagctcgggaagggcggcgggggtggaagatgagcagaagcccctgttctcggaacgccggctgacaagcggggtgagcgcaggcggggcggggacccagcctagcccactggagcagccgggggtggcccgttcccctttaagagcaactgctctaagccaggagccagagattcgagccggcctcgcccagccagccctctccagcgaggggacccacaagcggcgcctcggccctcccgacctttccgagccctctttgcgccctgggcgcacggggccctacacgcgccaagcatgctgagggtcttcatcctctatgccgagaacgtccacacacccgacaccgacatcagcgatgcctactgctccgcggtgtttgcaggggtgaagaagagaaccaaagtcatcaagaacagcgtgaaccctgtatggaatgagggatttgaatgggacctcaagggcatccccctggaccagggctctgagcttcatgtggtggtcaaagaccatgagacgatggggaggaacaggttcctgggggaagccaaggtcccactccgagaggtcctcgccacccctagtctgtccgccagcttcaatgcccccctgctggacaccaagaagcagcccacaggggcctcgctggtcctgcaggtgtcctacacaccgctgcctggagctgtgcccctgttcccgccccctactcctctggagccctccccgactctgcctgacctggatgtagtggcagacacaggaggagaggaagacacagaggaccagggactcactggagatgaggcggagccattcctggatcaaagcggaggcccgggggctcccaccaccccaaggaaactaccttcacgtcctccgccccactaccccgggatcaaaagaaagcgaagtgcgcctacatctagaaagctgctgtcagacaaaccgcaggatttccagatcagggtccaggtgatcgaggggcgccagctgccgggggtgaacatcaagcctgtggtcaaggttaccgctgcagggcagaccaagcggacgcggatccacaagggaaacagcccactcttcaatgagactcttttcttcaacttgtttgactctcctggggagctgtttgatgagcccatctttatcacggtggtagactctcgttctctcaggacagatgctctcctcggggagttccggatggacgtgggcaccatttacagagagccccggcacgcctatctcaggaagtggctgctgctctcagaccctgatgacttctctgctggggccagaggctacctgaaaacaagcctttgtgtgctggggcctggggacgaagcgcctctggagagaaaagacccctctgaagacaaggaggacattgaaagcaacctgctccggcccacaggcgtagccctgcgaggagcccacttctgcctgaaggtcttccgggccgaggacttgccgcagatggacgatgccgtgatggacaacgtgaaacagatctttggcttcgagagtaacaagaagaacttggtggacccctttgtggaggtcagctttgcggggaaaatgctgtgcagcaagatcttggagaagacggccaaccctcagtggaaccagaacatcacactgcctgccatgtttccctccatgtgcgaaaaaatgaggattcgtatcatagactgggaccgcctgactcacaatgacatcgtggctaccacctacctgagtatgtcgaaaatctctgcccctggaggagaaatagaagaggagcctgcaggtgctgtcaagccttcgaaagcctcagacttggatgactacctgggcttcctccccacttttgggccctgctacatcaacctctatggcagtcccagagagttcacaggcttcccagacccctacacagagctcaacacaggcaagggggaaggtgtggcttatcgtggccggcttctgctctccctggagaccaagctggtggagcacagtgaacagaaggtggaggaccttcctgcggatgacatcctccgggtggagaagtaccttaggaggcgcaagtactccctgtttgcggccttctactcagccaccatgctgcaggatgtggatgatgccatccagtttgaggtcagcatcgggaactacgggaacaagttcgacatgacctgcctgccgctggcctccaccactcagtacagccgtgcagtctttgacgggtgccactactactacctaccctggggtaacgtgaaacctgtggtggtgctgtcatcctactgggaggacatcagccatagaatcgagactcagaaccagctgcttgggattgctgaccggctggaagctggcctggagcaggtccacctggccctgaaggcgcagtgctccacggaggacgtggactcgctggtggctcagctgacggatgagctcatcgcaggctgcagccagcctctgggtgacatccatgagacaccctctgccacccacctggaccagtacctgtaccagctgcgcacccatcacctgagccaaatcactgaggctgccctggccctgaagctcggccacagtgagctccctgcagctctggagcaggcggaggactggctcctgcgtctgcgtgccctggcagaggagccccagaacagcctgccggacatcgtcatctggatgctgcagggagacaagcgtgtggcataccagcgggtgcccgcccaccaagtcctcttctcccggcggggtgccaactactgtggcaagaattgtgggaagctacagacaatctttctgaaatatccgatggagaaggtgcctggcgcccggatgccagtgcagatacgggtcaagctgtggtttgggctctctgtggatgagaaggagttcaaccagtttgctgaggggaagctgtctgtctttgctgaaacctatgagaacgagactaagttggcccttgttgggaactggggcacaacgggcctcacctaccccaagttttctgacgtcacgggcaagatcaagctacccaaggacagcttccgcccctcggccggctggacctgggctggagattggttcgtgtgtccggagaagactctgctccatgacatggacgccggtcacctgagcttcgtggaagaggtgtttgagaaccagacccggcttcccggaggccagtggatctacatgagtgacaactacaccgatgtgaacggggagaaggtgcttcccaaggatgacattgagtgcccactgggctggaagtgggaagatgaggaatggtccacagacctcaaccgggctgtcgatgagcaaggctgggagtatagcatcaccatccccccggagcggaagccgaagcactgggtccctgctgagaagatgtactacacacaccgacggcggcgctgggtgcgcctgcgcaggagggatctcagccaaatggaagcactgaaaaggcacaggcaggcggaggcggagggcgagggctgggagtacgcctctctttttggctggaagttccacctcgagtaccgcaagacagatgccttccgccgccgccgctggcgccgtcgcatggagccactggagaagacggggcctgcagctgtgtttgcccttgagggggccctgggcggcgtgatggatgacaagagtgaagattccatgtccgtctccaccttgagcttcggtgtgaacagacccacgatttcctgcatattcgactatgggaaccgctaccatctacgctgctacatgtaccaggcccgggacctggctgcgatggacaaggactctttttctgatccctatgccatcgtctccttcctgcaccagagccagaagacggtggtggtgaagaacacccttaaccccacctgggaccagacgctcatcttctacgagatcgagatctttggcgagccggccacagttgctgagcaaccgcccagcattgtggtggagctgtacgaccatgacacttatggtgcagacgagtttatgggtcgctgcatctgtcaaccgagtctggaacggatgccacggctggcctggttcccactgacgaggggcagccagccgtcgggggagctgctggcctcttttgagctcatccagagagagaagccggccatccaccatattcctggttttgaggtgcaggagacatcaaggatcctggatgagtctgaggacacagacctgccctacccaccaccccagagggaggccaacatctacatggttcctcagaacatcaagccagcgctccagcgtaccgccatcgagatcctggcatggggcctgcggaacatgaagagttaccagctggccaacatctcctcccccagcctcgtggtagagtgtgggggccagacggtgcagtcctgtgtcatcaggaacctccggaagaaccccaactttgacatctgcaccctcttcatggaagtgatgctgcccagggaggagctctactgcccccccatcaccgtcaaggtcatcgataaccgccagtttggccgccggcctgtggtgggccagtgtaccatccgctccctggagagcttcctgtgtgacccctactcggcggagagtccatccccacagggtggcccagacgatgtgagcctactcagtcctggggaagacgtgctcatcgacattgatgacaaggagcccctcatccccatccaggaggaagagttcatcgattggtggagcaaattctttgcctccataggggagagggaaaagtgcggctcctacctggagaaggattttgacaccctgaaggtctatgacacacagctggagaatgtggaggcctttgagggcctgtctgacttttgtaacaccttcaagctgtaccggggcaagacgcaggaggagacagaagatccatctgtgattggtgaatttaagggcctcttcaaaatttatcccctcccagaagacccagccatccccatgcccccaagacagttccaccagctggccgcccagggaccccaggagtgcttggtccgtatctacattgtccgagcatttggcctgcagcccaaggaccccaatggaaagtgtgatccttacatcaagatctccatagggaagaaatcagtgagtgaccaggataactacatcccctgcacgctggagcccgtatttggaaagatgttcgagctgacctgcactctgcctctggagaaggacctaaagatcactctctatgactatgacctcctctccaaggacgaaaagatcggtgagacggtcgtcgacctggagaacaggctgctgtccaagtttggggctcgctgtggactcccacagacctactgtgtctctggaccgaaccagtggcgggaccagctccgcccctcccagctcctccacctcttctgccagcagcatagagtcaaggcacctgtgtaccggacagaccgtgtaatgtttcaggataaagaatattccattgaagagatagaggctggcaggatcccaaacccacacctgggcccagtggaggagcgtctggctctgcatgtgcttcagcagcagggcctggtcccggagcacgtggagtcacggcccctctacagccccctgcagccagacatcgagcaggggaagctgcagatgtgggtcgacctatttccgaaggccctggggcggcctggacctcccttcaacatcaccccacggagagccagaaggtttttcctgcgttgtattatctggaataccagagatgtgatcctggatgacctgagcctcacgggggagaagatgagcgacatttatgtgaaaggttggatgattggctttgaagaacacaagcaaaagacagacgtgcattatcgttccctgggaggtgaaggcaacttcaactggaggttcattttccccttcgactacctgccagctgagcaagtctgtaccattgccaagaaggatgccttctggaggctggacaagactgagagcaaaatcccagcacgagtggtgttccagatctgggacaatgacaagttctcctttgatgattttctgggctccctgcagctcgatctcaaccgcatgcccaagccagccaagacagccaagaagtgctccttggaccagctggatgatgctttccacccagaatggtttgtgtccctttttgagcagaaaacagtgaagggctggtggccctgtgtagcagaagagggtgagaagaaaatactggcgggcaagctggaaatgaccttggagattgtagcagagagtgagcatgaggagcggcctgctggccagggccgggatgagcccaacatgaaccctaagcttgaggacccaaggcgccccgacacctccttcctgtggtttacctccccatacaagaccatgaagttcatcctgtggcggcgtttccggtgggccatcatcctcttcatcatcctcttcatcctgctgctgttcctggccatcttcatctacgccttcccgaactatgctgccatgaagctggtgaagcccttcagctgaggactctcctgccctgtagaaggggccgtggggtcccctccagcatgggactggcctgcctcctccgcccagctcggcgagctcctccagacctcctaggcctgattgtcctgccagggtgggcagacagacagatggaccggcccacactcccagagttgctaacatggagctctgagatcaccccacttccatcatttccttctcccccaacccaacgcttttttggatcagctcagacatatttcagtataaaacagttggaaccacacagcagtgtcagtg

SEQ ID NO: 437177 - DNA, 855 bp, Homo sapiens
ggacgtatgttgtcaagttgcatcttttctgcctccctgctcacatctgtctgtctcctctcattgcttgcctgttcggttttgtccttagaacggggagaaggtgcttcccaaggatgacattgagtgcccactgggctggaagtgggaagatgaggaatggtccacagacctcaaccgggctgtcgatgagcaaggctgggagtatagcatcaccatccccccggagcggaagccgaagcactgggtccctgctgagaagatgtactacacacaccgacggcggcgctgggtgcgcctgcgcaggagggatctcagccaaatggaagcactgaaaagggtgagccagcaggtggtgggtgggagtgaggcctgtggtcacaggtggccagtaggcacagatgcagacctgcatgcccacagacacatgcatgtgtgcacacagcatgcacagacacctgggactcactggaggtgctcacagatcacacccagcatacccaaagatcacacccagcatacacacagatcacacccagcatacccaaagatcacacccagcatacacacagatcacacccagcacacagatcacactgggaacacccacagatcacactcagcacacacacagattacacccagcacacacacagatcacacccagcacacagattacacccagcacacacacagatcacacccagcacacagatcacacccacagatcacacccagcgcatgcacagatcacacccagcacacccaaagatcacacccagcacacacacacagatcacacccaacacacccacagttcacactcagcacacacagatcacacccaacacaccc

SEQ ID NO: 437178 - DNA, 5209 bp, Homo sapiens
tagcaggctggtacggtcggaatttaggatcaggccctctctgctcccttgctctagggaccgcctgactcacaatgacatcgtggctaccacctacctgagtatgtcgaaaatctctgcccctggaggagaaatagaagtggatgactacctgggcttcctccccacttttgggccctgctacatcaacctctatggcagtcccagagagttcacaggcttcccagacccctacacagagctcaacacaggcaagggggaaggtgtggcttatcgtggccggcttctgctctccctggagaccaagctggtggagcacagtgaacagaaggtggaggaccttcctgcggatgacatcctccgggtggagaagtaccttaggaggcgcaagtactccctgtttgcggccttctactcagccaccatgctgcaggatgtggatgatgccatccagtttgaggtcagcatcgggaactacgggaacaagttcgacatgacctgcctgccgctggcctccaccactcagtacagccgtgcagtctttgacgggtgccactactactacctaccctggggtaacgtgaaacctgtggtggtgctgtcatcctactgggaggacatcagccatagaatcgagactcagaaccagctgcttgggattgctgaccggctggaagctggcctggagcaggtccacctggccctgaaggcgcagtgctccacggaggacgtggactcgctggtggctcagctgacggatgagctcatcgcaggctgcagccagcctctgggtgacatccatgagacaccctctgccacccacctggaccagtacctgtaccagctgcgcacccatcacctgagccaaatcactgaggctgccctggccctgaagctcggccacagtgagctccctgcagctctggagcaggcggaggactggctcctgcgtctgcgtgccctggcagaggagccccagaacagcctgccggacatcgtcatctggatgctgcagggagacaagcgtgtggcataccagcgggtgcccgcccaccaagtcctcttctcccggcggggtgccaactactgtggcaagaattgtgggaagctacagacaatctttctgaaatatccgatggagaaggtgcctggcgcccggatgccagtgcagatacgggtcaagctgtggtttgggctctctgtggatgagaaggagttcaaccagtttgctgaggggaagctgtctgtctttgctgaaacctatgagaacgagactaagttggcccttgttgggaactggggcacaacgggcctcacctaccccaagttttctgacgtcacgggcaagatcaagctacccaaggacagcttccgcccctcggccggctggacctgggctggagattggttcgtgtgtccggagaagactctgctccatgacatggacgccggtcacctgagcttcgtggaagaggtgtttgagaaccagacccggcttcccggaggccagtggatctacatgagtgacaactacaccgatgtgaacggggagaaggtgcttcccaaggatgacattgagtgcccactgggctggaagtgggaagatgaggaatggtccacagacctcaaccgggctgtcgatgagcaaggctgggagtatagcatcaccatccccccggagcggaagccgaagcactgggtccctgctgagaagatgtactacacacaccgacggcggcgctgggtgcgcctgcgcaggagggatctcagccaaatggaagcactgaaaaggcacaggcaggcggaggcggagggcgagggctgggagtacgcctctctttttggctggaagttccacctcgagtaccgcaagacagatgccttccgccgccgccgctggcgccgtcgcatggagccactggagaagacggggcctgcagctgtgtttgcccttgagggggccctgggcggcgtgatggatgacaagagtgaagattccatgtccgtctccaccttgagcttcggtgtgaacagacccacgatttcctgcatattcgactatgggaaccgctaccatctacgctgctacatgtaccaggcccgggacctggctgcgatggacaaggactctttttctgatccctatgccatcgtctccttcctgcaccagagccagaagacggtggtggtgaagaacacccttaaccccacctgggaccagacgctcatcttctacgagatcgagatctttggcgagccggccacagttgctgagcaaccgcccagcattgtggtggagctgtacgaccatgacacttatggtgcagacgagtttatgggtcgctgcatctgtcaaccgagtctggaacggatgccacggctggcctggttcccactgacgaggggcagccagccgtcgggggagctgctggcctcttttgagctcatccagagagagaagccggccatccaccatattcctggttttgaggtgcaggagacatcaaggatcctggatgagtctgaggacacagacctgccctacccaccaccccagagggaggccaacatctacatggttcctcagaacatcaagccagcgctccagcgtaccgccatcgagatcctggcatggggcctgcggaacatgaagagttaccagctggccaacatctcctcccccagcctcgtggtagagtgtgggggccagacggtgcagtcctgtgtcatcaggaacctccggaagaaccccaactttgacatctgcaccctcttcatggaagtgatgctgcccagggaggagctctactgcccccccatcaccgtcaaggtcatcgataaccgccagtttggccgccggcctgtggtgggccagtgtaccatccgctccctggagagcttcctgtgtgacccctactcggcggagagtccatccccacagggtggcccagacgatgtgagcctactcagtcctggggaagacgtgctcatcgacattgatgacaaggagcccctcatccccatccagcttgcagacggtctgtcgagcttggcccccactaacacggcttctcctccatccagtcctcatgaggaagagttcatcgattggtggagcaaattctttgcctccataggggagagggaaaagtgcggctcctacctggagaaggattttgacaccctgaaggtctatgacacacagctggagaatgtggaggcctttgagggcctgtctgacttttgtaacaccttcaagctgtaccggggcaagacgcaggaggagacagaagatccatctgtgattggtgaatttaagggcctcttcaaaatttatcccctcccagaagacccagccatccccatgcccccaagacagttccaccagctggccgcccagggaccccaggagtgcttggtccgtatctacattgtccgagcatttggcctgcagcccaaggaccccaatggaaagtgtgatccttacatcaagatctccatagggaagaaatcagtgagtgaccaggataactacatcccctgcacgctggagcccgtatttggaaagatgttcgagctgacctgcactctgcctctggagaaggacctaaagatcactctctatgactatgacctcctctccaaggacgaaaagatcggtgagacggtcgtcgacctggagaacaggctgctgtccaagtttggggctcgctgtggactcccacagacctactgtgtctctggaccgaaccagtggcgggaccagctccgcccctcccagctcctccacctcttctgccagcagcatagagtcaaggcacctgtgtaccggacagaccgtgtaatgtttcaggataaagaatattccattgaagagatagaggctggcaggatcccaaacccacacctgggcccagtggaggagcgtctggctctgcatgtgcttcagcagcagggcctggtcccggagcacgtggagtcacggcccctctacagccccctgcagccagacatcgagcaggggaagctgcagatgtgggtcgacctatttccgaaggccctggggcggcctggacctcccttcaacatcaccccacggagagccagaaggtttttcctgcgttgtattatctggaataccagagatgtgatcctggatgacctgagcctcacgggggagaagatgagcgacatttatgtgaaaggttggatgattggctttgaagaacacaagcaaaagacagacgtgcattatcgttccctgggaggtgaaggcaacttcaactggaggttcattttccccttcgactacctgccagctgagcaagtctgtaccattgccaagaaggatgccttctggaggctggacaagactgagagcaaaatcccagcacgagtggtgttccagatctgggacaatgacaagttctcctttgatgattttctgggctccctgcagctcgatctcaaccgcatgcccaagccagccaagacagccaagaagtgctccttggaccagctggatgatgctttccacccagaatggtttgtgtccctttttgagcagaaaacagtgaagggctggtggccctgtgtagcagaagagggtgagaagaaaatactggcgggcaagctggaaatgaccttggagattgtagcagagagtgagcatgaggagcggcctgctggccagggccgggatgagcccaacatgaaccctaagcttgaggacccaaggcgccccgacacctccttcctgtggtttacctccccatacaagaccatgaagttcatcctgtggcggcgtttccggtgggccatcatcctcttcatcatcctcttcatcctgctgctgttcctggccatcttcatctacgccttcccgaactatgctgccatgaagctggtgaagcccttcagctgaggactctcctgccctgtagaaggggccgtggggtcccctccagcatgggactggcctgcctcctccgcccagctcggcgagctcctccagacctcctaggcctgattgtcctgccagggtgggcagacagacagatggaccggcccacactcccagagttgctaacatggagctctgagatcaccccacttccatcatttccttctcccccaacccaacgcttttttggatcagctcagacatatttcagtataaaacagttggaaccacacagcagtgtcagtg

SEQ ID NO: 437179 - DNA, 3757 bp, Homo sapiens
ggacgtatgttgtcaagttgcatcttttctgcctccctgctcacatctgtctgtctcctctcattgcttgcctgttcggttttgtccttagaacggggagaaggtgcttcccaaggatgacattgagtgcccactgggctggaagtgggaagatgaggaatggtccacagacctcaaccgggctgtcgatgagcaaggctgggagtatagcatcaccatccccccggagcggaagccgaagcactgggtccctgctgagaagatgtactacacacaccgacggcggcgctgggtgcgcctgcgcaggagggatctcagccaaatggaagcactgaaaaggcacaggcaggcggaggcggagggcgagggctgggagtacgcctctctttttggctggaagttccacctcgagtaccgcaagacagatgccttccgccgccgccgctggcgccgtcgcatggagccactggagaagacggggcctgcagctgtgtttgcccttgagggggccctgggcggcgtgatggatgacaagagtgaagattccatgtccgtctccaccttgagcttcggtgtgaacagacccacgatttcctgcatattcgactatgggaaccgctaccatctacgctgctacatgtaccaggcccgggacctggctgcgatggacaaggactctttttctgatccctatgccatcgtctccttcctgcaccagagccagaagacggtggtggtgaagaacacccttaaccccacctgggaccagacgctcatcttctacgagatcgagatctttggcgagccggccacagttgctgagcaaccgcccagcattgtggtggagctgtacgaccatgacacttatggtgcagacgagtttatgggtcgctgcatctgtcaaccgagtctggaacggatgccacggctggcctggttcccactgacgaggggcagccagccgtcgggggagctgctggcctcttttgagctcatccagagagagaagccggccatccaccatattcctggttttgaggtgcaggagacatcaaggatcctggatgagtctgaggacacagacctgccctacccaccaccccagagggaggccaacatctacatggttcctcagaacatcaagccagcgctccagcgtaccgccatcgagatcctggcatggggcctgcggaacatgaagagttaccagctggccaacatctcctcccccagcctcgtggtagagtgtgggggccagacggtgcagtcctgtgtcatcaggaacctccggaagaaccccaactttgacatctgcaccctcttcatggaagtgatgctgcccagggaggagctctactgcccccccatcaccgtcaaggtcatcgataaccgccagtttggccgccggcctgtggtgggccagtgtaccatccgctccctggagagcttcctgtgtgacccctactcggcggagagtccatccccacagggtggcccagacgatgtgagcctactcagtcctggggaagacgtgctcatcgacattgatgacaaggagcccctcatccccatccagcttgcagacggtctgtcgagcttggcccccactaacacggcttctcctccatccagtcctcatgaggaagagttcatcgattggtggagcaaattctttgcctccataggggagagggaaaagtgcggctcctacctggagaaggattttgacaccctgaaggtctatgacacacagctggagaatgtggaggcctttgagggcctgtctgacttttgtaacaccttcaagctgtaccggggcaagacgcaggaggagacagaagatccatctgtgattggtgaatttaagggcctcttcaaaatttatcccctcccagaagacccagccatccccatgcccccaagacagttccaccagctggccgcccagggaccccaggagtgcttggtccgtatctacattgtccgagcatttggcctgcagcccaaggaccccaatggaaagtgtgatccttacatcaagatctccatagggaagaaatcagtgagtgaccaggataactacatcccctgcacgctggagcccgtatttggaaagatgttcgagctgacctgcactctgcctctggagaaggacctaaagatcactctctatgactatgacctcctctccaaggacgaaaagatcggtgagacggtcgtcgacctggagaacaggctgctgtccaagtttggggctcgctgtggactcccacagacctactgtgtctctggaccgaaccagtggcgggaccagctccgcccctcccagctcctccacctcttctgccagcagcatagagtcaaggcacctgtgtaccggacagaccgtgtaatgtttcaggataaagaatattccattgaagagatagaggctggcaggatcccaaacccacacctgggcccagtggaggagcgtctggctctgcatgtgcttcagcagcagggcctggtcccggagcacgtggagtcacggcccctctacagccccctgcagccagacatcgagcaggggaagctgcagatgtgggtcgacctatttccgaaggccctggggcggcctggacctcccttcaacatcaccccacggagagccagaaggtttttcctgcgttgtattatctggaataccagagatgtgatcctggatgacctgagcctcacgggggagaagatgagcgacatttatgtgaaaggttggatgattggctttgaagaacacaagcaaaagacagacgtgcattatcgttccctgggaggtgaaggcaacttcaactggaggttcattttccccttcgactacctgccagctgagcaagtctgtaccattgccaagaaggatgccttctggaggctggacaagactgagagcaaaatcccagcacgagtggtgttccagatctgggacaatgacaagttctcctttgatgattttctgggctccctgcagctcgatctcaaccgcatgcccaagccagccaagacagccaagaagtgctccttggaccagctggatgatgctttccacccagaatggtttgtgtccctttttgagcagaaaacagtgaagggctggtggccctgtgtagcagaagagggtgagaagaaaatactggcgggcaagctggaaatgaccttggagattgtagcagagagtgagcatgaggagcggcctgctggccagggccgggatgagcccaacatgaaccctaagcttgaggacccaaggcgccccgacacctccttcctgtggtttacctccccatacaagaccatgaagttcatcctgtggcggcgtttccggtgggccatcatcctcttcatcatcctcttcatcctgctgctgttcctggccatcttcatctacgccttcccgaactatgctgccatgaagctggtgaagcccttcagctgaggactctcctgccctgtagaaggggccgtggggtcccctccagcatgggactggcctgcctcctccgcccagctcggcgagctcctccagacctcctaggcctgattgtcctgccagggtgggcagacagacagatggaccggcccacactcccagagttgctaacatggagctctgagatcaccccacttccatcatttccttctcccccaacccaacgcttttttggatcagctcagacatatttcagtataaaacagttggaaccacacagcagtgtcagtg

SEQ ID NO: 437180 - DNA, 2832 bp, Homo sapiens
aggacagatgataacccggaagggtctgagccaggaggcaggagaaccaggctggcgggcaggcacatggtcctctctgggactgagaggggctgaagtggatctgccaggatggaataggcagtgtgtgcacgcatatgctgttctgaggacacagacctgccctacccaccaccccagagggaggccaacatctacatggttcctcagaacatcaagccagcgctccagcgtaccgccatcgagatcctggcatggggcctgcggaacatgaagagttaccagctggccaacatctcctcccccagcctcgtggtagagtgtgggggccagacggtgcagtcctgtgtcatcaggaacctccggaagaaccccaactttgacatctgcaccctcttcatggaagtgatgctgcccagggaggagctctactgcccccccatcaccgtcaaggtcatcgataaccgccagtttggccgccggcctgtggtgggccagtgtaccatccgctccctggagagcttcctgtgtgacccctactcggcggagagtccatccccacagggtggcccagacgatgtgagcctactcagtcctggggaagacgtgctcatcgacattgatgacaaggagcccctcatccccatccagcttgcagacggtctgtcgagcttggcccccactaacacggcttctcctccatccagtcctcatgaggaagagttcatcgattggtggagcaaattctttgcctccataggggagagggaaaagtgcggctcctacctggagaaggattttgacaccctgaaggtctatgacacacagctggagaatgtggaggcctttgagggcctgtctgacttttgtaacaccttcaagctgtaccggggcaagacgcaggaggagacagaagatccatctgtgattggtgaatttaagggcctcttcaaaatttatcccctcccagaagacccagccatccccatgcccccaagacagttccaccagctggccgcccagggaccccaggagtgcttggtccgtatctacattgtccgagcatttggcctgcagcccaaggaccccaatggaaagtgtgatccttacatcaagatctccatagggaagaaatcagtgagtgaccaggataactacatcccctgcacgctggagcccgtatttggaaagatgttcgagctgacctgcactctgcctctggagaaggacctaaagatcactctctatgactatgacctcctctccaaggacgaaaagatcggtgagacggtcgtcgacctggagaacaggctgctgtccaagtttggggctcgctgtggactcccacagacctactgtgtctctggaccgaaccagtggcgggaccagctccgcccctcccagctcctccacctcttctgccagcagcatagagtcaaggcacctgtgtaccggacagaccgtgtaatgtttcaggataaagaatattccattgaagagatagaggctggcaggatcccaaacccacacctgggcccagtggaggagcgtctggctctgcatgtgcttcagcagcagggcctggtcccggagcacgtggagtcacggcccctctacagccccctgcagccagacatcgagcaggggaagctgcagatgtgggtcgacctatttccgaaggccctggggcggcctggacctcccttcaacatcaccccacggagagccagaaggtttttcctgcgttgtattatctggaataccagagatgtgatcctggatgacctgagcctcacgggggagaagatgagcgacatttatgtgaaaggttggatgattggctttgaagaacacaagcaaaagacagacgtgcattatcgttccctgggaggtgaaggcaacttcaactggaggttcattttccccttcgactacctgccagctgagcaagtctgtaccattgccaagaaggatgccttctggaggctggacaagactgagagcaaaatcccagcacgagtggtgttccagatctgggacaatgacaagttctcctttgatgattttctgggctccctgcagctcgatctcaaccgcatgcccaagccagccaagacagccaagaagtgctccttggaccagctggatgatgctttccacccagaatggtttgtgtccctttttgagcagaaaacagtgaagggctggtggccctgtgtagcagaagagggtgagaagaaaatactggcgggcaagctggaaatgaccttggagattgtagcagagagtgagcatgaggagcggcctgctggccagggccgggatgagcccaacatgaaccctaagcttgaggacccaaggcgccccgacacctccttcctgtggtttacctccccatacaagaccatgaagttcatcctgtggcggcgtttccggtgggccatcatcctcttcatcatcctcttcatcctgctgctgttcctggccatcttcatctacgccttcccgaactatgctgccatgaagctggtgaagcccttcagctgaggactctcctgccctgtagaaggggccgtggggtcccctccagcatgggactggcctgcctcctccgcccagctcggcgagctcctccagacctcctaggcctgattgtcctgccagggtgggcagacagacagatggaccggcccacactcccagagttgctaacatggagctctgagatcaccccacttccatcatttccttctcccccaacccaacgcttttttggatcagctcagacatatttcagtataaaacagttggaaccacacagcagtgtcagtg

SEQ ID NO: 437181 - DNA, 2061 bp, Homo sapiens
gtcgcgtaccttgcttgatatggatttcgacaccctgtgtgtctctgacatcacatgattcggaatgtggaggcctttgagggcctgtctgacttttgtaacaccttcaagctgtaccggggcaagacgcaggaggagacagaagatccatctgtgattggtgaatttaagggcctcttcaaaatttatcccctcccagaagacccagccatccccatgcccccaagacagttccaccagctggccgcccagggaccccaggagtgcttggtccgtatctacattgtccgagcatttggcctgcagcccaaggaccccaatggaaagtgtgatccttacatcaagatctccatagggaagaaatcagtgagtgaccaggataactacatcccctgcacgctggagcccgtatttggaaagatgttcgagctgacctgcactctgcctctggagaaggacctaaagatcactctctatgactatgacctcctctccaaggacgaaaagatcggtgagacggtcgtcgacctggagaacaggctgctgtccaagtttggggctcgctgtggactcccacagacctactgtgtctctggaccgaaccagtggcgggaccagctccgcccctcccagctcctccacctcttctgccagcagcatagagtcaaggcacctgtgtaccggacagaccgtgtaatgtttcaggataaagaatattccattgaagagatagaggctggcaggatcccaaacccacacctgggcccagtggaggagcgtctggctctgcatgtgcttcagcagcagggcctggtcccggagcacgtggagtcacggcccctctacagccccctgcagccagacatcgagcaggggaagctgcagatgtgggtcgacctatttccgaaggccctggggcggcctggacctcccttcaacatcaccccacggagagccagaaggtttttcctgcgttgtattatctggaataccagagatgtgatcctggatgacctgagcctcacgggggagaagatgagcgacatttatgtgaaaggttggatgattggctttgaagaacacaagcaaaagacagacgtgcattatcgttccctgggaggtgaaggcaacttcaactggaggttcattttccccttcgactacctgccagctgagcaagtctgtaccattgccaagaaggatgccttctggaggctggacaagactgagagcaaaatcccagcacgagtggtgttccagatctgggacaatgacaagttctcctttgatgattttctgggctccctgcagctcgatctcaaccgcatgcccaagccagccaagacagccaagaagtgctccttggaccagctggatgatgctttccacccagaatggtttgtgtccctttttgagcagaaaacagtgaagggctggtggccctgtgtagcagaagagggtgagaagaaaatactggcgggcaagctggaaatgaccttggagattgtagcagagagtgagcatgaggagcggcctgctggccagggccgggatgagcccaacatgaaccctaagcttgaggacccaaggcgccccgacacctccttcctgtggtttacctccccatacaagaccatgaagttcatcctgtggcggcgtttccggtgggccatcatcctcttcatcatcctcttcatcctgctgctgttcctggccatcttcatctacgccttcccgaactatgctgccatgaagctggtgaagcccttcagctgaggactctcctgccctgtagaaggggccgtggggtcccctccagcatgggactggcctgcctcctccgcccagctcggcgagctcctccagacctcctaggcctgattgtcctgccagggtgggcagacagacagatggaccggcccacactcccagagttgctaacatggagctctgagatcaccccacttccatcatttccttctcccccaacccaacgcttttttggatcagctcagacatatttcagtataaaacagttggaaccacacagcagtgtcagtg

SEQ ID NO: 437182 - DNA, 1641 bp, Homo sapiens
tagcaggctggtacggtcggaatttaggatcaggccctctctgctcccttgctctagggaccgcctgactcacaatgacatcgtggctaccacctacctgagtatgtcgaaaatctctgcccctggaggagaaatagaagtggatgactacctgggcttcctccccacttttgggccctgctacatcaacctctatggcagtcccagagagttcacaggcttcccagacccctacacagagctcaacacaggcaagggggaaggtgtggcttatcgtggccggcttctgctctccctggagaccaagctggtggagcacagtgaacagaaggtggaggaccttcctgcggatgacatcctccgggtggagaagtaccttaggaggcgcaagtactccctgtttgcggccttctactcagccaccatgctgcaggatgtggatgatgccatccagtttgaggtcagcatcgggaactacgggaacaagttcgacatgacctgcctgccgctggcctccaccactcagtacagccgtgcagtctttgacgggtgccactactactacctaccctggggtaacgtgaaacctgtggtggtgctgtcatcctactgggaggacatcagccatagaatcgagactcagaaccagctgcttgggattgctgaccggctggaagctggcctggagcaggtccacctggccctgaaggcgcagtgctccacggaggacgtggactcgctggtggctcagctgacggatgagctcatcgcaggctgcaggatgccttctggaggctggacaagactgagagcaaaatcccagcacgagtggtgttccagatctgggacaatgacaagttctcctttgatgattttctgggctccctgcagctcgatctcaaccgcatgcccaagccagccaagacagccaagaagtgctccttggaccagctggatgatgctttccacccagaatggtttgtgtccctttttgagcagaaaacagtgaagggctggtggccctgtgtagcagaagagggtgagaagaaaatactggcgggcaagctggaaatgaccttggagattgtagcagagagtgagcatgaggagcggcctgctggccagggccgggatgagcccaacatgaaccctaagcttgaggacccaaggcgccccgacacctccttcctgtggtttacctccccatacaagaccatgaagttcatcctgtggcggcgtttccggtgggccatcatcctcttcatcatcctcttcatcctgctgctgttcctggccatcttcatctacgccttcccgaactatgctgccatgaagctggtgaagcccttcagctgaggactctcctgccctgtagaaggggccgtggggtcccctccagcatgggactggcctgcctcctccgcccagctcggcgagctcctccagacctcctaggcctgattgtcctgccagggtgggcagacagacagatggaccggcccacactcccagagttgctaacatggagctctgagatcaccccacttccatcatttccttctcccccaacccaacgcttttttggatcagctcagacatatttcagtataaaacagttggaaccacacagcagtgtcagtg

SEQ ID NO: 437183 - DNA, 4020 bp, Homo sapiens
tcgaccgcccagccaggtgcaaaatgccgtgtcattgggagactccgcagccggagcattagattacagctcgacggagctcgggaagggcggcgggggtggaagatgagcagaagcccctgttctcggaacgccggctgacaagcggggtgagcgcaggcggggcggggacccagcctagcccactggagcagccgggggtggcccgttcccctttaagagcaactgctctaagccaggagccagagattcgagccggcctcgcccagccagccctctccagcgaggggacccacaagcggcgcctcggccctcccgacctttccgagccctctttgcgccctgggcgcacggggccctacacgcgccaagcatgctgagggtcttcatcctctatgccgagaacgtccacacacccgacaccgacatcagcgatgcctactgctccgcggtgtttgcaggggtgaagaagagaaccaaagtcatcaagaacagcgtgaaccctgtatggaatgagggatttgaatgggacctcaagggcatccccctggaccagggctctgagcttcatgtggtggtcaaagaccatgagacgatggggaggaacaggttcctgggggaagccaaggtcccactccgagaggtcctcgccacccctagtctgtccgccagcttcaatgcccccctgctggacaccaagaagcagcccacaggggcctcgctggtcctgcaggtgtcctacacaccgctgcctggagctgtgcccctgttcccgccccctactcctctggagccctccccgactctgcctgacctggatgtagtggcagacacaggaggagaggaagacacagaggaccagggactcactggagatgaggcggagccattcctggatcaaagcggaggcccgggggctcccaccaccccaaggaaactaccttcacgtcctccgccccactaccccgggatcaaaagaaagcgaagtgcgcctacatctagaaagctgctgtcagacaaaccgcaggatttccagatcagggtccaggtgatcgaggggcgccagctgccgggggtgaacatcaagcctgtggtcaaggttaccgctgcagggcagaccaagcggacgcggatccacaagggaaacagcccactcttcaatgagactcttttcttcaacttgtttgactctcctggggagctgtttgatgagcccatctttatcacggtggtagactctcgttctctcaggacagatgctctcctcggggagttccggatggacgtgggcaccatttacagagagccccggcacgcctatctcaggaagtggctgctgctctcagaccctgatgacttctctgctggggccagaggctacctgaaaacaagcctttgtgtgctggggcctggggacgaagcgcctctggagagaaaagacccctctgaagacaaggaggacattgaaagcaacctgctccggcccacaggcgtagccctgcgaggagcccacttctgcctgaaggtcttccgggccgaggacttgccgcagatggacgatgccgtgatggacaacgtgaaacagatctttggcttcgagagtaacaagaagaacttggtggacccctttgtggaggtcagctttgcggggaaaatgctgtgcagcaagatcttggagaagacggccaaccctcagtggaaccagaacatcacactgcctgccatgtttccctccatgtgcgaaaaaatgaggattcgtatcatagactgggaccgcctgactcacaatgacatcgtggctaccacctacctgagtatgtcgaaaatctctgcccctggaggagaaatagaagtggatgactacctgggcttcctccccacttttgggccctgctacatcaacctctatggcagtcccagagagttcacaggcttcccagacccctacacagagctcaacacaggcaagggggaaggtgtggcttatcgtggccggcttctgctctccctggagaccaagctggtggagcacagtgaacagaaggtggaggaccttcctgcggatgacatcctccgggtggagaagtaccttaggaggcgcaagtactccctgtttgcggccttctactcagccaccatgctgcaggatgtggatgatgccatccagtttgaggtcagcatcgggaactacgggaacaagttcgacatgacctgcctgccgctggcctccaccactcagtacagccgtgcagtctttgacgggtgccactactactacctaccctggggtaacgtgaaacctgtggtggtgctgtcatcctactgggaggacatcagccatagaatcgagactcagaaccagctgcttgggattgctgaccggctggaagctggcctggagcaggtccacctggccctgaaggcgcagtgctccacggaggacgtggactcgctggtggctcagctgacggatgagctcatcgcaggctgcagccagcctctgggtgacatccatgagacaccctctgccacccacctggaccagtacctgtaccagctgcgcacccatcacctgagccaaatcactgaggctgccctggccctgaagctcggccacagtgagctccctgcagctctggagcaggcggaggactggctcctgcgtctgcgtgccctggcagaggagccccagaacagcctgccggacatcgtcatctggatgctgcagggagacaagcgtgtggcataccagcgggtgcccgcccaccaagtcctcttctcccggcggggtgccaactactgtggcaagaattgtgggaagctacagacaatctttctgaaatatccgatggagaaggtgcctggcgcccggatgccagtgcagatacgggtcaagctgtggtttgggctctctgtggatgagaaggagttcaaccagtttgctgaggggaagctgtctgtctttgctgaaacctatgagaacgagactaagttggcccttgttgggaactggggcacaacgggcctcacctaccccaagttttctgacgtcacgggcaagatcaagctacccaaggacagcttccgcccctcggccggctggacctgggctggagattggttcgtgtgtccggagaagactctgctccatgacatggacgccggtcacctgagcttcgtggaagaggtgtttgagaaccagacccggcttcccggaggccagtggatctacatgagtgacaactacaccgatgtgaacggggagaaggtgcttcccaaggatgacattgagtgcccactgggctggaagtgggaagatgaggaatggtccacagacctcaaccgggctgtcgatgagcaaggctgggagtatagcatcaccatccccccggagcggaagccgaagcactgggtccctgctgagaagatgtactacacacaccgacggcggcgctgggtgcgcctgcgcaggagggatctcagccaaatggaagcactgaaaagggtgagccagcaggtggtgggtgggagtgaggcctgtggtcacaggtggccagtaggcacagatgcagacctgcatgcccacagacacatgcatgtgtgcacacagcatgcacagacacctgggactcactggaggtgctcacagatcacacccagcatacccaaagatcacacccagcatacacacagatcacacccagcatacccaaagatcacacccagcatacacacagatcacacccagcacacagatcacactgggaacacccacagatcacactcagcacacacacagattacacccagcacacacacagatcacacccagcacacagattacacccagcacacacacagatcacacccagcacacagatcacacccacagatcacacccagcgcatgcacagatcacacccagcacacccaaagatcacacccagcacacacacacagatcacacccaacacacccacagttcacactcagcacacacagatcacacccaacacaccc

SEQ ID NO: 437184 - DNA, 349 bp, Homo sapiens
ccttgcatccttctctgttcctcttccgggtcaggatgatgccttctggaggctggacaagactgagagcaaaatcccagcacgagtggtgttccagatctgggacaatgacaagttctcctttgatgattttctgggtaagcgctattgctagaatcccattctgcacatgggggctgccccagaacccacactgtgtgtttatgccactgttggacccttggggaagcctagcaggaggagtgatcccactttctgctttcagggagctcagggtcatgtgtccccagtgttaagtgaggtgtatgacacacagcagtgtcagagtgattggtggccactgagggtg

SEQ ID NO: 437185 - DNA, 445 bp, Homo sapiens
tttgtacatcgtgccgatttcctgggaattctttttgcgataagctcatttaccttcttaactccttgtctgcctaagttgacgatgtatatactgtgttggaaatcttaatgagaactattctctaaaaacatgtatgtctagttggatgattggctttgaagaacacaagcaaaagacagacgtgcattatcgttccctgggaggtgaaggcaacttcaactggaggttcattttccccttcgactacctgccagctgagcaagtctgtaccattgccaagaaggtcagtgtccttccgattccctgtggtgccagcaccagggcttctaaagttagcctgacctgaccaccacgtccctgcctggcaactgtcacaatctcactgctgccccaccatgttggagctaccactgccatctccacatggccaccacctccactg

SEQ ID NO: 437186 - DNA, 2118 bp, Homo sapiens
tcgaccgcccagccaggtgcaaaatgccgtgtcattgggagactccgcagccggagcattagattacagctcgacggagctcgggaagggcggcgggggtggaagatgagcagaagcccctgttctcggaacgccggctgacaagcggggtgagcgcaggcggggcggggacccagcctagcccactggagcagccgggggtggcccgttcccctttaagagcaactgctctaagccaggagccagagattcgagccggcctcgcccagccagccctctccagcgaggggacccacaagcggcgcctcggccctcccgacctttccgagccctctttgcgccctgggcgcacggggccctacacgcgccaagcatgctgagggtcttcatcctctatgccgagaacgtccacacacccgacaccgacatcagcgatgcctactgctccgcggtgtttgcaggggtgaagaagagaaccaaagtcatcaagaacagcgtgaaccctgtatggaatgagggatttgaatgggacctcaagggcatccccctggaccagggctctgagcttcatgtggtggtcaaagaccatgagacgatggggaggaacaggttcctgggggaagccaaggtcccactccgagaggtcctcgccacccctagtctgtccgccagcttcaatgcccccctgctggacaccaagaagcagcccacaggggcctcgctggtcctgcaggtgtcctacacaccgctgcctggagctgtgcccctgttcccgccccctactcctctggagccctccccgactctgcctgacctggatgtagtggcagacacaggaggagaggaagacacagaggaccagggactcactggagatgaggcggagccattcctggatcaaagcggaggcccgggggctcccaccaccccaaggaaactaccttcacgtcctccgccccactaccccgggatcaaaagaaagcgaagtgcgcctacatctagaaagctgctgtcagacaaaccgcaggatttccagatcagggtccaggtgatcgaggggcgccagctgccgggggtgaacatcaagcctgtggtcaaggttaccgctgcagggcagaccaagcggacgcggatccacaagggaaacagcccactcttcaatgagactcttttcttcaacttgtttgactctcctggggagctgtttgatgagcccatctttatcacggtggtagactctcgttctctcaggacagatgctctcctcggggagttccggatggacgtgggcaccatttacagagagccccggcacgcctatctcaggaagtggctgctgctctcagaccctgatgacttctctgctggggccagaggctacctgaaaacaagccagccaagacagccaagaagtgctccttggaccagctggatgatgctttccacccagaatggtttgtgtccctttttgagcagaaaacagtgaagggctggtggccctgtgtagcagaagagggtgagaagaaaatactggcgggcaagctggaaatgaccttggagattgtagcagagagtgagcatgaggagcggcctgctggccagggccgggatgagcccaacatgaaccctaagcttgaggacccaaggcgccccgacacctccttcctgtggtttacctccccatacaagaccatgaagttcatcctgtggcggcgtttccggtgggccatcatcctcttcatcatcctcttcatcctgctgctgttcctggccatcttcatctacgccttcccgaactatgctgccatgaagctggtgaagcccttcagctgaggactctcctgccctgtagaaggggccgtggggtcccctccagcatgggactggcctgcctcctccgcccagctcggcgagctcctccagacctcctaggcctgattgtcctgccagggtgggcagacagacagatggaccggcccacactcccagagttgctaacatggagctctgagatcaccccacttccatcatttccttctcccccaacccaacgcttttttggatcagctcagacatatttcagtataaaacagttggaaccacacagcagtgtcagtg

SEQ ID NO: 437187 - DNA, 6922 bp, Homo sapiens
tcgaccgcccagccaggtgcaaaatgccgtgtcattgggagactccgcagccggagcattagattacagctcgacggagctcgggaagggcggcgggggtggaagatgagcagaagcccctgttctcggaacgccggctgacaagcggggtgagcgcaggcggggcggggacccagcctagcccactggagcagccgggggtggcccgttcccctttaagagcaactgctctaagccaggagccagagattcgagccggcctcgcccagccagccctctccagcgaggggacccacaagcggcgcctcggccctcccgacctttccgagccctctttgcgccctgggcgcacggggccctacacgcgccaagcatgctgagggtcttcatcctctatgccgagaacgtccacacacccgacaccgacatcagcgatgcctactgctccgcggtgtttgcaggggtgaagaagagaaccaaagtcatcaagaacagcgtgaaccctgtatggaatgagggatttgaatgggacctcaagggcatccccctggaccagggctctgagcttcatgtggtggtcaaagaccatgagacgatggggaggaacaggttcctgggggaagccaaggtcccactccgagaggtcctcgccacccctagtctgtccgccagcttcaatgcccccctgctggacaccaagaagcagcccacaggggcctcgctggtcctgcaggtgtcctacacaccgctgcctggagctgtgcccctgttcccgccccctactcctctggagccctccccgactctgcctgacctggatgtagtggcagacacaggaggagaggaagacacagaggaccagggactcactggagatgaggcggagccattcctggatcaaagcggaggcccgggggctcccaccaccccaaggaaactaccttcacgtcctccgccccactaccccgggatcaaaagaaagcgaagtgcgcctacatctagaaagctgctgtcagacaaaccgcaggatttccagatcagggtccaggtgatcgaggggcgccagctgccgggggtgaacatcaagcctgtggtcaaggttaccgctgcagggcagaccaagcggacgcggatccacaagggaaacagcccactcttcaatgagactcttttcttcaacttgtttgactctcctggggagctgtttgatgagcccatctttatcacggtggtagactctcgttctctcaggacagatgctctcctcggggagttccggatggacgtgggcaccatttacagagagccccggcacgcctatctcaggaagtggctgctgctctcagaccctgatgacttctctgctggggccagaggctacctgaaaacaagcctttgtgtgctggggcctggggacgaagcgcctctggagagaaaagacccctctgaagacaaggaggacattgaaagcaacctgctccggcccacaggcgtagccctgcgaggagcccacttctgcctgaaggtcttccgggccgaggacttgccgcagatggacgatgccgtgatggacaacgtgaaacagatctttggcttcgagagtaacaagaagaacttggtggacccctttgtggaggtcagctttgcggggaaaatgctgtgcagcaagatcttggagaagacggccaaccctcagtggaaccagaacatcacactgcctgccatgtttccctccatgtgcgaaaaaatgaggattcgtatcatagactgggaccgcctgactcacaatgacatcgtggctaccacctacctgagtatgtcgaaaatctctgcccctggaggagaaatagaagtggatgactacctgggcttcctccccacttttgggccctgctacatcaacctctatggcagtcccagagagttcacaggcttcccagacccctacacagagctcaacacaggcaagggggaaggtgtggcttatcgtggccggcttctgctctccctggagaccaagctggtggagcacagtgaacagaaggtggaggaccttcctgcggatgacatcctccgggtggagaagtaccttaggaggcgcaagtactccctgtttgcggccttctactcagccaccatgctgcaggatgtggatgatgccatccagtttgaggtcagcatcgggaactacgggaacaagttcgacatgacctgcctgccgctggcctccaccactcagtacagccgtgcagtctttgacgggtgccactactactacctaccctggggtaacgtgaaacctgtggtggtgctgtcatcctactgggaggacatcagccatagaatcgagactcagaaccagctgcttgggattgctgaccggctggaagctggcctggagcaggtccacctggccctgaaggcgcagtgctccacggaggacgtggactcgctggtggctcagctgacggatgagctcatcgcaggctgcagccagcctctgggtgacatccatgagacaccctctgccacccacctggaccagtacctgtaccagctgcgcacccatcacctgagccaaatcactgaggctgccctggccctgaagctcggccacagtgagctccctgcagctctggagcaggcggaggactggctcctgcgtctgcgtgccctggcagaggagccccagaacagcctgccggacatcgtcatctggatgctgcagggagacaagcgtgtggcataccagcgggtgcccgcccaccaagtcctcttctcccggcggggtgccaactactgtggcaagaattgtgggaagctacagacaatctttctgaaatatccgatggagaaggtgcctggcgcccggatgccagtgcagatacgggtcaagctgtggtttgggctctctgtggatgagaaggagttcaaccagtttgctgaggggaagctgtctgtctttgctgaaacctatgagaacgagactaagttggcccttgttgggaactggggcacaacgggcctcacctaccccaagttttctgacgtcacgggcaagatcaagctacccaaggacagcttccgcccctcggccggctggacctgggctggagattggttcgtgtgtccggagaagactctgctccatgacatggacgccggtcacctgagcttcgtggaagaggtgtttgagaaccagacccggcttcccggaggccagtggatctacatgagtgacaactacaccgatgtgaacggggagaaggtgcttcccaaggatgacattgagtgcccactgggctggaagtgggaagatgaggaatggtccacagacctcaaccgggctgtcgatgagcaaggctgggagtatagcatcaccatccccccggagcggaagccgaagcactgggtccctgctgagaagatgtactacacacaccgacggcggcgctgggtgcgcctgcgcaggagggatctcagccaaatggaagcactgaaaaggcacaggcaggcggaggcggagggcgagggctgggagtacgcctctctttttggctggaagttccacctcgagtaccgcaagacagatgccttccgccgccgccgctggcgccgtcgcatggagccactggagaagacggggcctgcagctgtgtttgcccttgagggggccctgggcggcgtgatggatgacaagagtgaagattccatgtccgtctccaccttgagcttcggtgtgaacagacccacgatttcctgcatattcgactatgggaaccgctaccatctacgctgctacatgtaccaggcccgggacctggctgcgatggacaaggactctttttctgatccctatgccatcgtctccttcctgcaccagagccagaagacggtggtggtgaagaacacccttaaccccacctgggaccagacgctcatcttctacgagatcgagatctttggcgagccggccacagttgctgagcaaccgcccagcattgtggtggagctgtacgaccatgacacttatggtgcagacgagtttatgggtcgctgcatctgtcaaccgagtctggaacggatgccacggctggcctggttcccactgacgaggggcagccagccgtcgggggagctgctggcctcttttgagctcatccagagagagaagccggccatccaccatattcctggttttgaggtgcaggagacatcaaggatcctggatgagtctgaggacacagacctgccctacccaccaccccagagggaggccaacatctacatggttcctcagaacatcaagccagcgctccagcgtaccgccatcgagatcctggcatggggcctgcggaacatgaagagttaccagctggccaacatctcctcccccagcctcgtggtagagtgtgggggccagacggtgcagtcctgtgtcatcaggaacctccggaagaaccccaactttgacatctgcaccctcttcatggaagtgatgctgcccagggaggagctctactgcccccccatcaccgtcaaggtcatcgataaccgccagtttggccgccggcctgtggtgggccagtgtaccatccgctccctggagagcttcctgtgtgacccctactcggcggagagtccatccccacagggtggcccagacgatgtgagcctactcagtcctggggaagacgtgctcatcgacattgatgacaaggagcccctcatccccatccagcttgcagacggtctgtcgagcttggcccccactaacacggcttctcctccatccagtcctcatgaggaagagttcatcgattggtggagcaaattctttgcctccataggggagagggaaaagtgcggctcctacctggagaaggattttgacaccctgaaggtctatgacacacagctggagaatgtggaggcctttgagggcctgtctgacttttgtaacaccttcaagctgtaccggggcaagacgcaggaggagacagaagatccatctgtgattggtgaatttaagggcctcttcaaaatttatcccctcccagaagacccagccatccccatgcccccaagacagttccaccagctggccgcccagggaccccaggagtgcttggtccgtatctacattgtccgagcatttggcctgcagcccaaggaccccaatggaaagtgtgatccttacatcaagatctccatagggaagaaatcagtgagtgaccaggataactacatcccctgcacgctggagcccgtatttggaaagatgttcgagctgacctgcactctgcctctggagaaggacctaaagatcactctctatgactatgacctcctctccaaggacgaaaagatcggtgagacggtcgtcgacctggagaacaggctgctgtccaagtttggggctcgctgtggactcccacagacctactgtgtctctggaccgaaccagtggcgggaccagctccgcccctcccagctcctccacctcttctgccagcagcatagagtcaaggcacctgtgtaccggacagaccgtgtaatgtttcaggataaagaatattccattgaagagatagaggctggcaggatcccaaacccacacctgggcccagtggaggagcgtctggctctgcatgtgcttcagcagcagggcctggtcccggagcacgtggagtcacggcccctctacagccccctgcagccagacatcgagcaggggaagctgcagatgtgggtcgacctatttccgaaggccctggggcggcctggacctcccttcaacatcaccccacggagagccagaaggtttttcctgcgttgtattatctggaataccagagatgtgatcctggatgacctgagcctcacgggggagaagatgagcgacatttatgtgaaaggttggatgattggctttgaagaacacaagcaaaagacagacgtgcattatcgttccctgggaggtgaaggcaacttcaactggaggttcattttccccttcgactacctgccagctgagcaagtctgtaccattgccaagaaggatgccttctggaggctggacaagactgagagcaaaatcccagcacgagtggtgttccagatctgggacaatgacaagttctcctttgatgattttctgggctccctgcagctcgatctcaaccgcatgcccaagccagccaagacagccaagaagtgctccttggaccagctggatgatgctttccacccagaatggtttgtgtccctttttgagcagaaaacagtgaagggctggtggccctgtgtagcagaagagggtgagaagaaaatactggcgggcaagctggaaatgaccttggagattgtagcagagagtgagcatgaggagcggcctgctggccagggccgggatgagcccaacatgaaccctaagcttgaggacccaaggcgccccgacacctccttcctgtggtttacctccccatacaagaccatgaagttcatcctgtggcggcgtttccggtgggccatcatcctcttcatcatcctcttcatcctgctgctgttcctggccatcttcatctacgccttcccgaactatgctgccatgaagctggtgaagcccttcagctgaggactctcctgccctgtagaaggggccgtggggtcccctccagcatgggactggcctgcctcctccgcccagctcggcgagctcctccagacctcctaggcctgattgtcctgccagggtgggcagacagacagatggaccggcccacactcccagagttgctaacatggagctctgagatcaccccacttccatcatttccttctcccccaacccaacgcttttttggatcagctcagacatatttcagtataaaacagttggaaccacacagcagtgtcagtg

SEQ ID NO: 437188 - DNA, 3312 bp, Homo sapiens
gaaatggagcaggcgacagtttgggtagtgggcaggagggagaggagagaggcacatggagaaatttgaggcggcgtgatggatgacaagagtgaagattccatgtccgtctccaccttgagcttcggtgtgaacagacccacgatttcctgcatattcgactatgggaaccgctaccatctacgctgctacatgtaccaggcccgggacctggctgcgatggacaaggactctttttctgatccctatgccatcgtctccttcctgcaccagagccagaagacggtggtggtgaagaacacccttaaccccacctgggaccagacgctcatcttctacgagatcgagatctttggcgagccggccacagttgctgagcaaccgcccagcattgtggtggagctgtacgaccatgacacttatggtgcagacgagtttatgggtcgctgcatctgtcaaccgagtctggaacggatgccacggctggcctggttcccactgacgaggggcagccagccgtcgggggagctgctggcctcttttgagctcatccagagagagaagccggccatccaccatattcctggttttgaggtgcaggagacatcaaggatcctggatgagtctgaggacacagacctgccctacccaccaccccagagggaggccaacatctacatggttcctcagaacatcaagccagcgctccagcgtaccgccatcgagatcctggcatggggcctgcggaacatgaagagttaccagctggccaacatctcctcccccagcctcgtggtagagtgtgggggccagacggtgcagtcctgtgtcatcaggaacctccggaagaaccccaactttgacatctgcaccctcttcatggaagtgatgctgcccagggaggagctctactgcccccccatcaccgtcaaggtcatcgataaccgccagtttggccgccggcctgtggtgggccagtgtaccatccgctccctggagagcttcctgtgtgacccctactcggcggagagtccatccccacagggtggcccagacgatgtgagcctactcagtcctggggaagacgtgctcatcgacattgatgacaaggagcccctcatccccatccagcttgcagacggtctgtcgagcttggcccccactaacacggcttctcctccatccagtcctcatgaggaagagttcatcgattggtggagcaaattctttgcctccataggggagagggaaaagtgcggctcctacctggagaaggattttgacaccctgaaggtctatgacacacagctggagaatgtggaggcctttgagggcctgtctgacttttgtaacaccttcaagctgtaccggggcaagacgcaggaggagacagaagatccatctgtgattggtgaatttaagggcctcttcaaaatttatcccctcccagaagacccagccatccccatgcccccaagacagttccaccagctggccgcccagggaccccaggagtgcttggtccgtatctacattgtccgagcatttggcctgcagcccaaggaccccaatggaaagtgtgatccttacatcaagatctccatagggaagaaatcagtgagtgaccaggataactacatcccctgcacgctggagcccgtatttggaaagatgttcgagctgacctgcactctgcctctggagaaggacctaaagatcactctctatgactatgacctcctctccaaggacgaaaagatcggtgagacggtcgtcgacctggagaacaggctgctgtccaagtttggggctcgctgtggactcccacagacctactgtgtctctggaccgaaccagtggcgggaccagctccgcccctcccagctcctccacctcttctgccagcagcatagagtcaaggcacctgtgtaccggacagaccgtgtaatgtttcaggataaagaatattccattgaagagatagaggctggcaggatcccaaacccacacctgggcccagtggaggagcgtctggctctgcatgtgcttcagcagcagggcctggtcccggagcacgtggagtcacggcccctctacagccccctgcagccagacatcgagcaggggaagctgcagatgtgggtcgacctatttccgaaggccctggggcggcctggacctcccttcaacatcaccccacggagagccagaaggtttttcctgcgttgtattatctggaataccagagatgtgatcctggatgacctgagcctcacgggggagaagatgagcgacatttatgtgaaaggttggatgattggctttgaagaacacaagcaaaagacagacgtgcattatcgttccctgggaggtgaaggcaacttcaactggaggttcattttccccttcgactacctgccagctgagcaagtctgtaccattgccaagaaggatgccttctggaggctggacaagactgagagcaaaatcccagcacgagtggtgttccagatctgggacaatgacaagttctcctttgatgattttctgggctccctgcagctcgatctcaaccgcatgcccaagccagccaagacagccaagaagtgctccttggaccagctggatgatgctttccacccagaatggtttgtgtccctttttgagcagaaaacagtgaagggctggtggccctgtgtagcagaagagggtgagaagaaaatactggcgggcaagctggaaatgaccttggagattgtagcagagagtgagcatgaggagcggcctgctggccagggccgggatgagcccaacatgaaccctaagcttgaggacccaaggcgccccgacacctccttcctgtggtttacctccccatacaagaccatgaagttcatcctgtggcggcgtttccggtgggccatcatcctcttcatcatcctcttcatcctgctgctgttcctggccatcttcatctacgccttcccgaactatgctgccatgaagctggtgaagcccttcagctgaggactctcctgccctgtagaaggggccgtggggtcccctccagcatgggactggcctgcctcctccgcccagctcggcgagctcctccagacctcctaggcctgattgtcctgccagggtgggcagacagacagatggaccggcccacactcccagagttgctaacatggagctctgagatcaccccacttccatcatttccttctcccccaacccaacgcttttttggatcagctcagacatatttcagtataaaacagttggaaccacacagcagtgtcagtg

SEQ ID NO: 437189 - DNA, 3198 bp, Homo sapiens
ccgagtctctgggggcagcacccagcagcctgaatgaaccttccagatgatcctgcagcatgctcacattttcagaaccactgccctagagtctgctctagtgacaccaacttgcctttgggacaagatccctatgccatcgtctccttcctgcaccagagccagaagacggtggtggtgaagaacacccttaaccccacctgggaccagacgctcatcttctacgagatcgagatctttggcgagccggccacagttgctgagcaaccgcccagcattgtggtggagctgtacgaccatgacacttatggtgcagacgagtttatgggtcgctgcatctgtcaaccgagtctggaacggatgccacggctggcctggttcccactgacgaggggcagccagccgtcgggggagctgctggcctcttttgagctcatccagagagagaagccggccatccaccatattcctggttttgaggtgcaggagacatcaaggatcctggatgagtctgaggacacagacctgccctacccaccaccccagagggaggccaacatctacatggttcctcagaacatcaagccagcgctccagcgtaccgccatcgagatcctggcatggggcctgcggaacatgaagagttaccagctggccaacatctcctcccccagcctcgtggtagagtgtgggggccagacggtgcagtcctgtgtcatcaggaacctccggaagaaccccaactttgacatctgcaccctcttcatggaagtgatgctgcccagggaggagctctactgcccccccatcaccgtcaaggtcatcgataaccgccagtttggccgccggcctgtggtgggccagtgtaccatccgctccctggagagcttcctgtgtgacccctactcggcggagagtccatccccacagggtggcccagacgatgtgagcctactcagtcctggggaagacgtgctcatcgacattgatgacaaggagcccctcatccccatccagcttgcagacggtctgtcgagcttggcccccactaacacggcttctcctccatccagtcctcatgaggaagagttcatcgattggtggagcaaattctttgcctccataggggagagggaaaagtgcggctcctacctggagaaggattttgacaccctgaaggtctatgacacacagctggagaatgtggaggcctttgagggcctgtctgacttttgtaacaccttcaagctgtaccggggcaagacgcaggaggagacagaagatccatctgtgattggtgaatttaagggcctcttcaaaatttatcccctcccagaagacccagccatccccatgcccccaagacagttccaccagctggccgcccagggaccccaggagtgcttggtccgtatctacattgtccgagcatttggcctgcagcccaaggaccccaatggaaagtgtgatccttacatcaagatctccatagggaagaaatcagtgagtgaccaggataactacatcccctgcacgctggagcccgtatttggaaagatgttcgagctgacctgcactctgcctctggagaaggacctaaagatcactctctatgactatgacctcctctccaaggacgaaaagatcggtgagacggtcgtcgacctggagaacaggctgctgtccaagtttggggctcgctgtggactcccacagacctactgtgtctctggaccgaaccagtggcgggaccagctccgcccctcccagctcctccacctcttctgccagcagcatagagtcaaggcacctgtgtaccggacagaccgtgtaatgtttcaggataaagaatattccattgaagagatagaggctggcaggatcccaaacccacacctgggcccagtggaggagcgtctggctctgcatgtgcttcagcagcagggcctggtcccggagcacgtggagtcacggcccctctacagccccctgcagccagacatcgagcaggggaagctgcagatgtgggtcgacctatttccgaaggccctggggcggcctggacctcccttcaacatcaccccacggagagccagaaggtttttcctgcgttgtattatctggaataccagagatgtgatcctggatgacctgagcctcacgggggagaagatgagcgacatttatgtgaaaggttggatgattggctttgaagaacacaagcaaaagacagacgtgcattatcgttccctgggaggtgaaggcaacttcaactggaggttcattttccccttcgactacctgccagctgagcaagtctgtaccattgccaagaaggatgccttctggaggctggacaagactgagagcaaaatcccagcacgagtggtgttccagatctgggacaatgacaagttctcctttgatgattttctgggctccctgcagctcgatctcaaccgcatgcccaagccagccaagacagccaagaagtgctccttggaccagctggatgatgctttccacccagaatggtttgtgtccctttttgagcagaaaacagtgaagggctggtggccctgtgtagcagaagagggtgagaagaaaatactggcgggcaagctggaaatgaccttggagattgtagcagagagtgagcatgaggagcggcctgctggccagggccgggatgagcccaacatgaaccctaagcttgaggacccaaggcgccccgacacctccttcctgtggtttacctccccatacaagaccatgaagttcatcctgtggcggcgtttccggtgggccatcatcctcttcatcatcctcttcatcctgctgctgttcctggccatcttcatctacgccttcccgaactatgctgccatgaagctggtgaagcccttcagctgaggactctcctgccctgtagaaggggccgtggggtcccctccagcatgggactggcctgcctcctccgcccagctcggcgagctcctccagacctcctaggcctgattgtcctgccagggtgggcagacagacagatggaccggcccacactcccagagttgctaacatggagctctgagatcaccccacttccatcatttccttctcccccaacccaacgcttttttggatcagctcagacatatttcagtataaaacagttggaaccacacagcagtgtcagtg

SEQ ID NO: 437190 - DNA, 6880 bp, Homo sapiens
tcgaccgcccagccaggtgcaaaatgccgtgtcattgggagactccgcagccggagcattagattacagctcgacggagctcgggaagggcggcgggggtggaagatgagcagaagcccctgttctcggaacgccggctgacaagcggggtgagcgcaggcggggcggggacccagcctagcccactggagcagccgggggtggcccgttcccctttaagagcaactgctctaagccaggagccagagattcgagccggcctcgcccagccagccctctccagcgaggggacccacaagcggcgcctcggccctcccgacctttccgagccctctttgcgccctgggcgcacggggccctacacgcgccaagcatgctgagggtcttcatcctctatgccgagaacgtccacacacccgacaccgacatcagcgatgcctactgctccgcggtgtttgcaggggtgaagaagagaaccaaagtcatcaagaacagcgtgaaccctgtatggaatgagggatttgaatgggacctcaagggcatccccctggaccagggctctgagcttcatgtggtggtcaaagaccatgagacgatggggaggaacaggttcctgggggaagccaaggtcccactccgagaggtcctcgccacccctagtctgtccgccagcttcaatgcccccctgctggacaccaagaagcagcccacaggggcctcgctggtcctgcaggtgtcctacacaccgctgcctggagctgtgcccctgttcccgccccctactcctctggagccctccccgactctgcctgacctggatgtagtggcagacacaggaggagaggaagacacagaggaccagggactcactggagatgaggcggagccattcctggatcaaagcggaggcccgggggctcccaccaccccaaggaaactaccttcacgtcctccgccccactaccccgggatcaaaagaaagcgaagtgcgcctacatctagaaagctgctgtcagacaaaccgcaggatttccagatcagggtccaggtgatcgaggggcgccagctgccgggggtgaacatcaagcctgtggtcaaggttaccgctgcagggcagaccaagcggacgcggatccacaagggaaacagcccactcttcaatgagactcttttcttcaacttgtttgactctcctggggagctgtttgatgagcccatctttatcacggtggtagactctcgttctctcaggacagatgctctcctcggggagttccggatggacgtgggcaccatttacagagagccccggcacgcctatctcaggaagtggctgctgctctcagaccctgatgacttctctgctggggccagaggctacctgaaaacaagcctttgtgtgctggggcctggggacgaagcgcctctggagagaaaagacccctctgaagacaaggaggacattgaaagcaacctgctccggcccacaggcgtagccctgcgaggagcccacttctgcctgaaggtcttccgggccgaggacttgccgcagatggacgatgccgtgatggacaacgtgaaacagatctttggcttcgagagtaacaagaagaacttggtggacccctttgtggaggtcagctttgcggggaaaatgctgtgcagcaagatcttggagaagacggccaaccctcagtggaaccagaacatcacactgcctgccatgtttccctccatgtgcgaaaaaatgaggattcgtatcatagactgggaccgcctgactcacaatgacatcgtggctaccacctacctgagtatgtcgaaaatctctgcccctggaggagaaatagaagtggatgactacctgggcttcctccccacttttgggccctgctacatcaacctctatggcagtcccagagagttcacaggcttcccagacccctacacagagctcaacacaggcaagggggaaggtgtggcttatcgtggccggcttctgctctccctggagaccaagctggtggagcacagtgaacagaaggtggaggaccttcctgcggatgacatcctccgggtggagaagtaccttaggaggcgcaagtactccctgtttgcggccttctactcagccaccatgctgcaggatgtggatgatgccatccagtttgaggtcagcatcgggaactacgggaacaagttcgacatgacctgcctgccgctggcctccaccactcagtacagccgtgcagtctttgacgggtgccactactactacctaccctggggtaacgtgaaacctgtggtggtgctgtcatcctactgggaggacatcagccatagaatcgagactcagaaccagctgcttgggattgctgaccggctggaagctggcctggagcaggtccacctggccctgaaggcgcagtgctccacggaggacgtggactcgctggtggctcagctgacggatgagctcatcgcaggctgcagccagcctctgggtgacatccatgagacaccctctgccacccacctggaccagtacctgtaccagctgcgcacccatcacctgagccaaatcactgaggctgccctggccctgaagctcggccacagtgagctccctgcagctctggagcaggcggaggactggctcctgcgtctgcgtgccctggcagaggagccccagaacagcctgccggacatcgtcatctggatgctgcagggagacaagcgtgtggcataccagcgggtgcccgcccaccaagtcctcttctcccggcggggtgccaactactgtggcaagaattgtgggaagctacagacaatctttctgaaatatccgatggagaaggtgcctggcgcccggatgccagtgcagatacgggtcaagctgtggtttgggctctctgtggatgagaaggagttcaaccagtttgctgaggggaagctgtctgtctttgctgaaacctatgagaacgagactaagttggcccttgttgggaactggggcacaacgggcctcacctaccccaagttttctgacgtcacgggcaagatcaagctacccaaggacagcttccgcccctcggccggctggacctgggctggagattggttcgtgtgtccggagaagactctgctccatgacatggacgccggtcacctgagcttcgtggaagaggtgtttgagaaccagacccggcttcccggaggccagtggatctacatgagtgacaactacaccgatgtgaacggggagaaggtgcttcccaaggatgacattgagtgcccactgggctggaagtgggaagatgaggaatggtccacagacctcaaccgggctgtcgatgagcaaggctgggagtatagcatcaccatccccccggagcggaagccgaagcactgggtccctgctgagaagatgtactacacacaccgacggcggcgctgggtgcgcctgcgcaggagggatctcagccaaatggaagcactgaaaaggcacaggcaggcggaggcggagggcgagggctgggagtacgcctctctttttggctggaagttccacctcgagtaccgcaagacagatgccttccgccgccgccgctggcgccgtcgcatggagccactggagaagacggggcctgcagctgtgtttgcccttgagggggccctgggcggcgtgatggatgacaagagtgaagattccatgtccgtctccaccttgagcttcggtgtgaacagacccacgatttcctgcatattcgactatgggaaccgctaccatctacgctgctacatgtaccaggcccgggacctggctgcgatggacaaggactctttttctgatccctatgccatcgtctccttcctgcaccagagccagaagacggtggtggtgaagaacacccttaaccccacctgggaccagacgctcatcttctacgagatcgagatctttggcgagccggccacagttgctgagcaaccgcccagcattgtggtggagctgtacgaccatgacacttatggtgcagacgagtttatgggtcgctgcatctgtcaaccgagtctggaacggatgccacggctggcctggttcccactgacgaggggcagccagccgtcgggggagctgctggcctcttttgagctcatccagagagagaagccggccatccaccatattcctggttttgaggtgcaggagacatcaaggatcctggatgagtctgaggacacagacctgccctacccaccaccccagagggaggccaacatctacatggttcctcagaacatcaagccagcgctccagcgtaccgccatcgagatcctggcatggggcctgcggaacatgaagagttaccagctggccaacatctcctcccccagcctcgtggtagagtgtgggggccagacggtgcagtcctgtgtcatcaggaacctccggaagaaccccaactttgacatctgcaccctcttcatggaagtgatgctgcccagggaggagctctactgcccccccatcaccgtcaaggtcatcgataaccgccagtttggccgccggcctgtggtgggccagtgtaccatccgctccctggagagcttcctgtgtgacccctactcggcggagagtccatccccacagggtggcccagacgatgtgagcctactcagtcctggggaagacgtgctcatcgacattgatgacaaggagcccctcatccccatccagcttgcagacggtctgtcgagcttggcccccactaacacggcttctcctccatccagtcctcatgaggaagagttcatcgattggtggagcaaattctttgcctccataggggagagggaaaagtgcggctcctacctggagaaggattttgacaccctgaaggtctatgacacacagctggagaatgtggaggcctttgagggcctgtctgacttttgtaacaccttcaagctgtaccggggcaagacgcaggaggagacagaagatccatctgtgattggtgaatttaagggcctcttcaaaatttatcccctcccagaagacccagccatccccatgcccccaagacagttccaccagctggccgcccagggaccccaggagtgcttggtccgtatctacattgtccgagcatttggcctgcagcccaaggaccccaatggaaagtgtgatccttacatcaagatctccatagggaagaaatcagtgagtgaccaggataactacatcccctgcacgctggagcccgtatttggaaagatgttcgagctgacctgcactctgcctctggagaaggacctaaagatcactctctatgactatgacctcctctccaaggacgaaaagatcggtgagacggtcgtcgacctggagaacaggctgctgtccaagtttggggctcgctgtggactcccacagacctactgtgtctctggaccgaaccagtggcgggaccagctccgcccctcccagctcctccacctcttctgccagcagcatagagtcaaggcacctgtgtaccggacagaccgtgtaatgtttcaggataaagaatattccattgaagagatagaggctggcaggatcccaaacccacacctgggcccagtggaggagcgtctggctctgcatgtgcttcagcagcagggcctggtcccggagcacgtggagtcacggcccctctacagccccctgcagccagacatcgagcaggggaagctgcagatgtgggtcgacctatttccgaaggccctggggcggcctggacctcccttcaacatcaccccacggagagccagaaggtttttcctgcgttgtattatctggaataccagagatgtgatcctggatgacctgagcctcacgggggagaagatgagcgacatttatgtgaaaggttggatgattggctttgaagaacacaagcaaaagacagacgtgcattatcgttccctgggaggtgaaggcaacttcaactggaggttcattttccccttcgactacctgccagctgagcaagtctgtaccattgccaagaaggatgccttctggaggctggacaagactgagagcaaaatcccagcacgagtggtgttccagatctgggacaatgacaagttctcctttgatgattttctgggctccctgcagctcgatctcaaccgcatgcccaagccagccaagacagccaagaagtgctccttggaccagctggatgatgctttccacccagaatggtttgtgtccctttttgagcagaaaacagtgaagggctggtggccctgtgtagcagaagagggtgagaagaaaatactggcgcatgaggagcggcctgctggccagggccgggatgagcccaacatgaaccctaagcttgaggacccaaggcgccccgacacctccttcctgtggtttacctccccatacaagaccatgaagttcatcctgtggcggcgtttccggtgggccatcatcctcttcatcatcctcttcatcctgctgctgttcctggccatcttcatctacgccttcccgaactatgctgccatgaagctggtgaagcccttcagctgaggactctcctgccctgtagaaggggccgtggggtcccctccagcatgggactggcctgcctcctccgcccagctcggcgagctcctccagacctcctaggcctgattgtcctgccagggtgggcagacagacagatggaccggcccacactcccagagttgctaacatggagctctgagatcaccccacttccatcatttccttctcccccaacccaacgcttttttggatcagctcagacatatttcagtataaaacagttggaaccacacagcagtgtcagtg

SEQ ID NO: 437191 - DNA, 6186 bp, Homo sapiens
tcgaccgcccagccaggtgcaaaatgccgtgtcattgggagactccgcagccggagcattagattacagctcgacggagctcgggaagggcggcgggggtggaagatgagcagaagcccctgttctcggaacgccggctgacaagcggggtgagcgcaggcggggcggggacccagcctagcccactggagcagccgggggtggcccgttcccctttaagagcaactgctctaagccaggagccagagattcgagccggcctcgcccagccagccctctccagcgaggggacccacaagcggcgcctcggccctcccgacctttccgagccctctttgcgccctgggcgcacggggccctacacgcgccaagcatgctgagggtcttcatcctctatgccgagaacgtccacacacccgacaccgacatcagcgatgcctactgctccgcggtgtttgcaggggtgaagaagagaaccaaagtcatcaagaacagcgtgaaccctgtatggaatgagggatttgaatgggacctcaagggcatccccctggaccagggctctgagcttcatgtggtggtcaaagaccatgagacgatggggaggaacaggttcctgggggaagccaaggtcccactccgagaggtcctcgccacccctagtctgtccgccagcttcaatgcccccctgctggacaccaagaagcagcccacaggggcctcgctggtcctgcaggtgtcctacacaccgctgcctggagctgtgcccctgttcccgccccctactcctctggagccctccccgactctgcctgacctggatgtagtggcagacacaggaggagaggaagacacagaggaccagggactcactggagatgaggcggagccattcctggatcaaagcggaggcccgggggctcccaccaccccaaggaaactaccttcacgtcctccgccccactaccccgggatcaaaagaaagcgaagtgcgcctacatctagaaagctgctgtcagacaaaccgcaggatttccagatcagggtccaggtgatcgaggggcgccagctgccgggggtgaacatcaagcctgtggtcaaggttaccgctgcagggcagaccaagcggacgcggatccacaagggaaacagcccactcttcaatgagactcttttcttcaacttgtttgactctcctggggagctgtttgatgagcccatctttatcacggtggtagactctcgttctctcaggacagatgctctcctcggggagttccggatggacgtgggcaccatttacagagagccccggcacgcctatctcaggaagtggctgctgctctcagaccctgatgacttctctgctggggccagaggctacctgaaaacaagcctttgtgtgctggggcctggggacgaagcgcctctggagagaaaagacccctctgaagacaaggaggacattgaaagcaacctgctccggcccacaggcgtagccctgcgaggagcccacttctgcctgaaggtcttccgggccgaggacttgccgcagatggacgatgccgtgatggacaacgtgaaacagatctttggcttcgagagtaacaagaagaacttggtggacccctttgtggaggtcagctttgcggggaaaatgctgtgcagcaagatcttggagaagacggccaaccctcagtggaaccagaacatcacactgcctgccatgtttccctccatgtgcgaaaaaatgaggattcgtatcatagactgggaccgcctgactcacaatgacatcgtggctaccacctacctgagtatgtcgaaaatctctgcccctggaggagaaatagaagtggatgactacctgggcttcctccccacttttgggccctgctacatcaacctctatggcagtcccagagagttcacaggcttcccagacccctacacagagctcaacacaggcaagggggaaggtgtggcttatcgtggccggcttctgctctccctggagaccaagctggtggagcacagtgaacagaaggtggaggaccttcctgcggatgacatcctccgggtggagaagtaccttaggaggcgcaagtactccctgtttgcggccttctactcagccaccatgctgcaggatgtggatgatgccatccagtttgaggtcagcatcgggaactacgggaacaagttcgacatgacctgcctgccgctggcctccaccactcagtacagccgtgcagtctttgacgggtgccactactactacctaccctggggtaacgtgaaacctgtggtggtgctgtcatcctactgggaggacatcagccatagaatcgagactcagaaccagctgcttgggattgctgaccggctggaagctggcctggagcaggtccacctggccctgaaggcgcagtgctccacggaggacgtggactcgctggtggctcagctgacggatgagctcatcgcaggctgcagccagcctctgggtgacatccatgagacaccctctgccacccacctggaccagtacctgtaccagctgcgcacccatcacctgagccaaatcactgaggctgccctggccctgaagctcggccacagtgagctccctgcagctctggagcaggcggaggactggctcctgcgtctgcgtgccctggcagaggagccccagaacagcctgccggacatcgtcatctggatgctgcagggagacaagcgtgtggcataccagcgggtgcccgcccaccaagtcctcttctcccggcggggtgccaactactgtggcaagaattgtgggaagctacagacaatctttctgaaatatccgatggagaaggtgcctggcgcccggatgccagtgcagatacgggtcaagctgtggtttgggctctctgtggatgagaaggagttcaaccagtttgctgaggggaagctgtctgtctttgctgaaacctatgagaacgagactaagttggcccttgttgggaactggggcacaacgggcctcacctaccccaagttttctgacgtcacgggcaagatcaagctacccaaggacagcttccgcccctcggccggctggacctgggctggagattggttcgtgtgtccggagaagactctgctccatgacatggacgccggtcacctgagcttcgtggaagaggtgtttgagaaccagacccggcttcccggaggccagtggatctacatgagtgacaactacaccgatgtgaacggggagaaggtgcttcccaaggatgacattgagtgcccactgggctggaagtgggaagatgaggaatggtccacagacctcaaccgggctgtcgatgagcaaggctgggagtatagcatcaccatccccccggagcggaagccgaagcactgggtccctgctgagaagatgtactacacacaccgacggcggcgctgggtgcgcctgcgcaggagggatctcagccaaatggaagcactgaaaaggcacaggcaggcggaggcggagggcgagggctgggagtacgcctctctttttggctggaagttccacctcgagtaccgcaagacagatgccttccgccgccgccgctggcgccgtcgcatggagccactggagaagacggggcctgcagctgtgtttgcccttgagggggccctgggcggcgtgatggatgacaagagtgaagattccatgtccgtctccaccttgagcttcggtgtgaacagacccacgatttcctgcatattcgactatgggaaccgctaccatctacgctgctacatgtaccaggcccgggacctggctgcgatggacaaggactctttttctgatccctatgccatcgtctccttcctgcaccagagccagaagacggtggtggtgaagaacacccttaaccccacctgggaccagacgctcatcttctacgagatcgagatctttggcgagccggccacagttgctgagcaaccgcccagcattgtggtggagctgtacgaccatgacacttatggtgcagacgagtttatgggtcgctgcatctgtcaaccgagtctggaacggatgccacggctggcctggttcccactgacgaggggcagccagccgtcgggggagctgctggcctcttttgagctcatccagagagagaagccggccatccaccatattcctggttttgaggtgcaggagacatcaaggatcctggatgagtctgaggacacagacctgccctacccaccaccccagagggaggccaacatctacatggttcctcagaacatcaagccagcgctccagcgtaccgccatcgagatcctggcatggggcctgcggaacatgaagagttaccagctggccaacatctcctcccccagcctcgtggtagagtgtgggggccagacggtgcagtcctgtgtcatcaggaacctccggaagaaccccaactttgacatctgcaccctcttcatggaagtgatgctgcccagggaggagctctactgcccccccatcaccgtcaaggtcatcgataaccgccagtttggccgccggcctgtggtgggccagtgtaccatccgctccctggagagcttcctgtgtgacccctactcggcggagagtccatccccacagggtggcccagacgatgtgagcctactcagtcctggggaagacgtgctcatcgacattgatgacaaggagcccctcatccccatccagcttgcagacggtctgtcgagcttggcccccactaacacggcttctcctccatccagtcctcatgaggaagagttcatcgattggtggagcaaattctttgcctccataggggagagggaaaagtgcggctcctacctggagaaggattttgacaccctgaaggtctatgacacacagctggagaatgtggaggcctttgagggcctgtctgacttttgtaacaccttcaagctgtaccggggcaagacgcaggaggagacagaagatccatctgtgattggtgaatttaagggcctcttcaaaatttatcccctcccagaagacccagccatccccatgcccccaagacagttccaccagctggccgcccagggaccccaggagtgcttggtccgtatctacattgtccgagcatttggcctgcagcccaaggaccccaatggaaagtgtgatccttacatcaagatctccatagggaagaaatcagtgagtgaccaggataactacatcccctgcacgctggagcccgtatttggaaagatgttcgagctgacctgcactctgcctctggagaaggacctaaagatcactctctatgactatgacctcctctccaaggacgaaaagatcggtgagacggtcgtcgacctggagaacaggctgctgtccaagtttggggctcgctgtggactcccacagacctactgtgtctctggaccgaaccagtggcgggaccagctccgcccctcccagctcctccacctcttctgccagcagcatagagtcaaggcacctgtgtaccggacagaccgtgtaatgtttcaggataaagaatattccattgaagagatagaggctggcaggatcccaaacccacacctgggcccagtggaggagcgtctggctctgcatgtgcttcagcagcagggcctggtcccggagcacgtggagtcacggcccctctacagccccctgcagccagacatcgagcaggggaagctgcagatgtgggtcgacctatttccgaaggccctggggcggcctggacctcccttcaacatcaccccacggagagccagaaggtttttcctgcgttgtattatctggaataccagagatgtgatcctggatgacctgagcctcacgggggagaagatgagcgacatttatgtgaaaggttggatgattggctttgaagaacacaagcaaaagacagacgtgcattatcgttccctgggaggtgaaggcaacttcaactggaggttcattttccccttcgactacctgccagctgagcaagtctgtaccattgccaagaaggtcagtgtccttccgattccctgtggtgccagcaccagggcttctaaagttagcctgacctgaccaccacgtccctgcctggcaactgtcacaatctcactgctgccccaccatgttggagctac

SEQ ID NO: 437192 - DNA, 405 bp, Homo sapiens
gccccatccccggcaagctctcaagccatgctggtggggacgactgaatgccagggcccttcactgggctatttcacccagggacgcttcttgaaggcaccccccactccaagctgcaaattaggaccgagagtcagtggccgctcaagagtctgtgaccatgccccaaattcagagatggtcccaggagagatggggggaactgccaagcaatgagtgaccggttccccctcccccaggctgggagtatagcatcaccatccccccggagcggaagccgaagcactgggtccctgctgagaagatgtactacacacaccgacggcggcgctgggtgcgcctgcgcaggagggatctcagccaaatggaagcactgaaaagggtgagccagcaggtggtgggtgg

SEQ ID NO: 437193 - DNA, 1166 bp, Homo sapiens
cgctcgaggggtcgagcctgggcagtacaggcggcggtgcgcactctgcggcggcctctgcgcctcgggcgggcgggagagagaggccgcggccgccagcgtggggatgtctaggagctcgaaggtggtgctgggcctctcggtgctgctgacggcggccacagtggccggcgtacatgtgaagcagcagtgggaccagcagaggcttcgtgacggagttatcagagacattgagaggcaaattcggaaaaaagaaaacattcgtcttttgggagaacagattattttgactgagcaacttgaagcagaaagagagaagatgttattggcaaaaggatctcaaaaatcatgacttgaatgtgaaatatctgttggacagacaacacgagtttgtgtgtgtgtgttgatggagagtagcttagtagtatcttcatctttttttttggtcactgtccttttaaacttgatcaaataaaggacagtgggtcatataagttactgctttcagggtcccttatatctgaataaaggagtgtgggcagacactttttggaagagtctgtctgggtgatcctggtagaagccccattagggtcactgtccagtgcttagggttgttactgagaagcactgccgagcttgtgagaaggaagggatggatagtagcatccacctgagtagtctgatcagtcggcatgatgacgaagccacgagaacatcgacctcagaaggactggaggaaggtgaagtggagggagagacgctcctgatcgtcgaatccgaggatcaggcatcagtggacttatcgcacgaccagagtggggattccctcaacagtgatgaaggagacgtgtcttggatggaggagcagctgtcctacttctgtgacaagtgccaaaaatggataccagccagtaaggagcttctcaattcctttgatttgtcaattcctgtgtgaaggtttgtttttccaacctgtgaaagaaacgtgaatgtaaaagagacctaaataaaaggataattatatttattctctagttgatcagctataaatttatataaaacataggcatgtttgtactaatgaaacgtactgtcaacctctatcacattgttaaattaacacttttggtggtaactcaataaaattgagaaaattggaaaaa

SEQ ID NO: 437194 - DNA, 3936 bp, Homo sapiens
cgctcgaggggtcgagcctgggcagtacaggcggcggtgcgcactctgcggcggcctctgcgcctcgggcgggcgggagagagaggccgcggccgccagcgtggggatgtctaggagctcgaaggtggtgctgggcctctcggtgctgctgacggcggccacagtggccggcgtacatgtgaagcagcagtgggaccagcagaggcttcgtgacggagttatcagagacattgagaggcaaattcggaaaaaagaaaacattcgtcttttgggagaacagattattttgactgagcaacttgaagcagaaagagagaagatgttattggcaaaaggatctcaaaaatcatgacttgaatgtgaaatatctgttggacagacaacacgagtttgtgtgtgtgtgttgatggagagtagcttagtagtatcttcatctttttttttggtcactgtccttttaaacttgatcaaataaaggacagtgggtcatataagttactgctttcagggtcccttatatctgaataaaggagtgtgggcagacactttttggaagagtctgtctgggtgatcctggtagaagccccattagggtcactgtccagtgcttagggttgttactgagaagcactgccgagcttgtgagaaggaagggatggatagtagcatccacctgagtagtctgatcagtcggcatgatgacgaagccacgagaacatcgacctcagaaggactggaggaaggtgaagtggagggagagacgctcctgatcgtcgaatccgaggatcaggcatcagtggacttatcgcacgaccagagtggggattccctcaacagtgatgaaggagacgtgtcttggatggaggagcagctgtcctacttctgtgacaagtgccaaaaatggataccagccagtcagctgagggaacagctcagttaccttaagggtgataatttttttaggtttacttgttcggattgctcagcagatggcaaggagcagtatgaaaggctgaagctgacatggcagcaagtcgtcatgttggcaatgtacaacttgtctctggaaggaagtggacgtcaaggttatttcaggtggaaagaagatatctgtgcttttattgagaaacattggacttttttactagggaataggaaaaagacgtctacctggtggagcaccgtggcaggttgcctcagcgtgggaagtcccatgtacttccgttcaggtgctcaggaatttggagagccaggatggtggaaacttgttcataacaagcccccaacgatgaaacctgaaggagagaagttgtctgcctctactttgaaaataaaagcagcctcaaaaccaactttagatcccatcattactgttgagggacttagaaaacgagcaagtcggaatcctgtggaatctgccatggaattaaaagagaaaaggtctcgaactcaggaagcaaaagacattagaagagcccagaaggaggccgctggctttcttgacaggagcacatcttctacccctgtaaaattcataagccgaggccgcaggccagatgtgattctggaaaaaggcgaagtgattgacttttcctccttgagctcctctgaccgcaccccgctgacaagcccatctccttctccttctctggatttctctgcccctggtacacctgcctctcattctgccacacctagcttgctttcagaagcagatctgattccagatgtgatgcccccacaagccttgtttcatgatgacgatgagatggaaggcgatggagtcatagacccagggatggagtacgtcccaccccctgctgggtcagtagcttctgggccagtggttgggggcagaaagaaggtcagaggccctgaacagataaagcaggaggtagagagtgaggaggaaaaacccgacaggatggatattgacagtgaagacacagattcaaacacatctttgcaaacaagggctagagaaaagaggaagcctcagctggagaaggacacaaagccgaaagagcccaggtatactcccgtgagcatctacgaggaaaagctgctgctcaagaggctggaagcttgtcccggtgctgttgccatgactccggaagctcggagactgaaacgcaaactgattgtcagacaagcgaaaagggataggggattaccactttttgacttggatcaagttgttaatgctgctcttttgttagttgacgggatttatggagccaaagaaggaggaatttccagacttccagctggacaagccacgtacagaaccacctgtcaggacttcagaatccttgaccgataccagacttccttgccgtccaggaagggatttcgacaccagaccaccaagtttttgtatcgcttggtaggatcagaagatatggctgtggaccagagtattgtcagcccttatacctctcggatcttgaaaccttatatcaggcgtgattatgaaacaaagccacccaaactgcagctcctgtcacagattcgttcccacctgcacaggagcgaccctcactggacgccggagcccgacgcacctctcgattactgttatgtgcggccaaatcacatcccaacgatcaactccatgtgtcaggagtttttttggcctggcattgacctgtctgagtgtctgcagtacccagacttcagtgttgttgttctttataaaaaagtcatcattgcctttggcttcatggttcctgatgtgaaatacaatgaagcttacatttcatttctgttcgtccaccctgaatggagaagagcagggattgcaactttcatgatctatcatctgattcagacctgcatgggcaaggacgtaacccttcacgtctcagcaagcaaccccgctatgctactgtaccagaagtttggattcaagactgaagaatatgtattagatttctatgataaatattacccattggagagtacagagtgtaaacacgcattctttctgaggctccggcgctgatgcgaatacagctcacagagaaacgcatgtgctattggagaacaggtctttgtggagatctaaaggcagtgattgatttcacagggagctctaatctctgtgattacatggtccttcaaactcccaaccaaagtgagaaaagcggcatgcagtgaaatgagcagtgagcagccctttagcaaaatcgccctccagtccttcctggagatgccttcagccagcatcccagactccacagttatttatgaatgatgtcgtgattctccctccacctgacagtttgtaagagtgaaagagcatctaacctgatgctcttggagagagataacctgtctgtcataacttaaaggatgagaaaatgtggtgtagctattaaagattcatgcagtcccaaaaggcactgtcctgggatgatgagagattataaggtgatttcataaaaggaatccaaccctgtgcccggccattgatgtgttgtcattgaatccaggaggatttctagggcactgaagttttgttgtttcttttgctgactttggttacagtcagaaaaaataaactagatgtttgtgtctacatgttctacctgttgtacctattagcatcttcctgcagggacttgggcccatggcctgggaggttggtttgggattggggttgttgggcagcctgccattcacctggcctatcctggcccttctcatgcccaagacagttgtttcacaggagtggaagtgtgggtgatgcaagtagaaccctctagatgtaccctgtgtggtctgcaggactggactgtttgctgtgtttgtggatgttggcgatagactgtcaattaggttgtttgtgatccaacaagaacatttccaaaagtatctaggtgttctcaaataaaaagctttctttgcacaacccatggccagagcgtcaaaaaa

SEQ ID NO: 437195 - DNA, 4061 bp, Homo sapiens
ctctgcccgctcggttcctcagctcctcttcgtgtctttcccccgcggtggcgcggccctgcaccccacgcgtttgcggctgcggccggcggccgctctgctgggctccgggcgctgcagctcccggcgggcgtgtgcagcccgcagattcaggacgacccggctgcccggcttagcgcctttggagctccgcgctgaaggggccttgctccgcacaggcacggcacgcaagcttttggggtgcccagtggctctgttttcaagtcacagccggcccgcagggtgcggacctttccacatctcacttgggccgctagaaaatagaagaggcttcgtgacggagttatcagagacattgagaggcaaattcggaaaaaagaaaacattcgtcttttgggagaacagattattttgactgagcaacttgaagcagaaagagagaagatgttattggcaaaaggatctcaaaaatcatgacttgaatgtgaaatatctgttggacagacaacacgagtttgtgtgtgtgtgttgatggagagtagcttagtagtatcttcatctttttttttggtcactgtccttttaaacttgatcaaataaaggacagtgggtcatataagttactgctttcagggtcccttatatctgaataaaggagtgtgggcagacactttttggaagagtctgtctgggtgatcctggtagaagccccattagggtcactgtccagtgcttagggttgttactgagaagcactgccgagcttgtgagaaggaagggatggatagtagcatccacctgagtagtctgatcagtcggcatgatgacgaagccacgagaacatcgacctcagaaggactggaggaaggtgaagtggagggagagacgctcctgatcgtcgaatccgaggatcaggcatcagtggacttatcgcacgaccagagtggggattccctcaacagtgatgaaggagacgtgtcttggatggaggagcagctgtcctacttctgtgacaagtgccaaaaatggataccagccagtcagctgagggaacagctcagttaccttaagggtgataatttttttaggtttacttgttcggattgctcagcagatggcaaggagcagtatgaaaggctgaagctgacatggcagcaagtcgtcatgttggcaatgtacaacttgtctctggaaggaagtggacgtcaaggttatttcaggtggaaagaagatatctgtgcttttattgagaaacattggacttttttactagggaataggaaaaagacgtctacctggtggagcaccgtggcaggttgcctcagcgtgggaagtcccatgtacttccgttcaggtgctcaggaatttggagagccaggatggtggaaacttgttcataacaagcccccaacgatgaaacctgaaggagagaagttgtctgcctctactttgaaaataaaagcagcctcaaaaccaactttagatcccatcattactgttgagggacttagaaaacgagcaagtcggaatcctgtggaatctgccatggaattaaaagagaaaaggtctcgaactcaggaagcaaaagacattagaagagcccagaaggaggccgctggctttcttgacaggagcacatcttctacccctgtaaaattcataagccgaggccgcaggccagatgtgattctggaaaaaggcgaagtgattgacttttcctccttgagctcctctgaccgcaccccgctgacaagcccatctccttctccttctctggatttctctgcccctggtacacctgcctctcattctgccacacctagcttgctttcagaagcagatctgattccagatgtgatgcccccacaagccttgtttcatgatgacgatgagatggaaggcgatggagtcatagacccagggatggagtacgtcccaccccctgctgggtcagtagcttctgggccagtggttgggggcagaaagaaggtcagaggccctgaacagataaagcaggaggtagagagtgaggaggaaaaacccgacaggatggatattgacagtgaagacacagattcaaacacatctttgcaaacaagggctagagaaaagaggaagcctcagctggagaaggacacaaagccgaaagagcccaggtatactcccgtgagcatctacgaggaaaagctgctgctcaagaggctggaagcttgtcccggtgctgttgccatgactccggaagctcggagactgaaacgcaaactgattgtcagacaagcgaaaagggataggggattaccactttttgacttggatcaagttgttaatgctgctcttttgttagttgacgggatttatggagccaaagaaggaggaatttccagacttccagctggacaagccacgtacagaaccacctgtcaggacttcagaatccttgaccgataccagacttccttgccgtccaggaagggatttcgacaccagaccaccaagtttttgtatcgcttggtaggatcagaagatatggctgtggaccagagtattgtcagcccttatacctctcggatcttgaaaccttatatcaggcgtgattatgaaacaaagccacccaaactgcagctcctgtcacagattcgttcccacctgcacaggagcgaccctcactggacgccggagcccgacgcacctctcgattactgttatgtgcggccaaatcacatcccaacgatcaactccatgtgtcaggagtttttttggcctggcattgacctgtctgagtgtctgcagtacccagacttcagtgttgttgttctttataaaaaagtcatcattgcctttggcttcatggttcctgatgtgaaatacaatgaagcttacatttcatttctgttcgtccaccctgaatggagaagagcagggattgcaactttcatgatctatcatctgattcagacctgcatgggcaaggacgtaacccttcacgtctcagcaagcaaccccgctatgctactgtaccagaagtttggattcaagactgaagaatatgtattagatttctatgataaatattacccattggagagtacagagtgtaaacacgcattctttctgaggctccggcgctgatgcgaatacagctcacagagaaacgcatgtgctattggagaacaggtctttgtggagatctaaaggcagtgattgatttcacagggagctctaatctctgtgattacatggtccttcaaactcccaaccaaagtgagaaaagcggcatgcagtgaaatgagcagtgagcagccctttagcaaaatcgccctccagtccttcctggagatgccttcagccagcatcccagactccacagttatttatgaatgatgtcgtgattctccctccacctgacagtttgtaagagtgaaagagcatctaacctgatgctcttggagagagataacctgtctgtcataacttaaaggatgagaaaatgtggtgtagctattaaagattcatgcagtcccaaaaggcactgtcctgggatgatgagagattataaggtgatttcataaaaggaatccaaccctgtgcccggccattgatgtgttgtcattgaatccaggaggatttctagggcactgaagttttgttgtttcttttgctgactttggttacagtcagaaaaaataaactagatgtttgtgtctacatgttctacctgttgtacctattagcatcttcctgcagggacttgggcccatggcctgggaggttggtttgggattggggttgttgggcagcctgccattcacctggcctatcctggcccttctcatgcccaagacagttgtttcacaggagtggaagtgtgggtgatgcaagtagaaccctctagatgtaccctgtgtggtctgcaggactggactgtttgctgtgtttgtggatgttggcgatagactgtcaattaggttgtttgtgatccaacaagaacatttccaaaagtatctaggtgttctcaaataaaaagctttctttgcacaacccatggccagagcgtcaaaaaa

SEQ ID NO: 437196 - DNA, 4121 bp, Homo sapiens
ctctgcccgctcggttcctcagctcctcttcgtgtctttcccccgcggtggcgcggccctgcaccccacgcgtttgcggctgcggccggcggccgctctgctgggctccgggcgctgcagctcccggcgggcgtgtgcagcccgcagattcaggacgacccggctgcccggcttagcgcctttggagctccgcgctgaaggggccttgctccgcacaggcacggcacgcaagcttttggggtgcccagtggctctgttttcaagtcacagccggcccgcagggtgcggacctttccacatctcacttgggccgctagaaaatagaaggtggggaaggagtttcttggggtgcattctgcaagctaccagcctccctcctggcccaagaggcttcgtgacggagttatcagagacattgagaggcaaattcggaaaaaagaaaacattcgtcttttgggagaacagattattttgactgagcaacttgaagcagaaagagagaagatgttattggcaaaaggatctcaaaaatcatgacttgaatgtgaaatatctgttggacagacaacacgagtttgtgtgtgtgtgttgatggagagtagcttagtagtatcttcatctttttttttggtcactgtccttttaaacttgatcaaataaaggacagtgggtcatataagttactgctttcagggtcccttatatctgaataaaggagtgtgggcagacactttttggaagagtctgtctgggtgatcctggtagaagccccattagggtcactgtccagtgcttagggttgttactgagaagcactgccgagcttgtgagaaggaagggatggatagtagcatccacctgagtagtctgatcagtcggcatgatgacgaagccacgagaacatcgacctcagaaggactggaggaaggtgaagtggagggagagacgctcctgatcgtcgaatccgaggatcaggcatcagtggacttatcgcacgaccagagtggggattccctcaacagtgatgaaggagacgtgtcttggatggaggagcagctgtcctacttctgtgacaagtgccaaaaatggataccagccagtcagctgagggaacagctcagttaccttaagggtgataatttttttaggtttacttgttcggattgctcagcagatggcaaggagcagtatgaaaggctgaagctgacatggcagcaagtcgtcatgttggcaatgtacaacttgtctctggaaggaagtggacgtcaaggttatttcaggtggaaagaagatatctgtgcttttattgagaaacattggacttttttactagggaataggaaaaagacgtctacctggtggagcaccgtggcaggttgcctcagcgtgggaagtcccatgtacttccgttcaggtgctcaggaatttggagagccaggatggtggaaacttgttcataacaagcccccaacgatgaaacctgaaggagagaagttgtctgcctctactttgaaaataaaagcagcctcaaaaccaactttagatcccatcattactgttgagggacttagaaaacgagcaagtcggaatcctgtggaatctgccatggaattaaaagagaaaaggtctcgaactcaggaagcaaaagacattagaagagcccagaaggaggccgctggctttcttgacaggagcacatcttctacccctgtaaaattcataagccgaggccgcaggccagatgtgattctggaaaaaggcgaagtgattgacttttcctccttgagctcctctgaccgcaccccgctgacaagcccatctccttctccttctctggatttctctgcccctggtacacctgcctctcattctgccacacctagcttgctttcagaagcagatctgattccagatgtgatgcccccacaagccttgtttcatgatgacgatgagatggaaggcgatggagtcatagacccagggatggagtacgtcccaccccctgctgggtcagtagcttctgggccagtggttgggggcagaaagaaggtcagaggccctgaacagataaagcaggaggtagagagtgaggaggaaaaacccgacaggatggatattgacagtgaagacacagattcaaacacatctttgcaaacaagggctagagaaaagaggaagcctcagctggagaaggacacaaagccgaaagagcccaggtatactcccgtgagcatctacgaggaaaagctgctgctcaagaggctggaagcttgtcccggtgctgttgccatgactccggaagctcggagactgaaacgcaaactgattgtcagacaagcgaaaagggataggggattaccactttttgacttggatcaagttgttaatgctgctcttttgttagttgacgggatttatggagccaaagaaggaggaatttccagacttccagctggacaagccacgtacagaaccacctgtcaggacttcagaatccttgaccgataccagacttccttgccgtccaggaagggatttcgacaccagaccaccaagtttttgtatcgcttggtaggatcagaagatatggctgtggaccagagtattgtcagcccttatacctctcggatcttgaaaccttatatcaggcgtgattatgaaacaaagccacccaaactgcagctcctgtcacagattcgttcccacctgcacaggagcgaccctcactggacgccggagcccgacgcacctctcgattactgttatgtgcggccaaatcacatcccaacgatcaactccatgtgtcaggagtttttttggcctggcattgacctgtctgagtgtctgcagtacccagacttcagtgttgttgttctttataaaaaagtcatcattgcctttggcttcatggttcctgatgtgaaatacaatgaagcttacatttcatttctgttcgtccaccctgaatggagaagagcagggattgcaactttcatgatctatcatctgattcagacctgcatgggcaaggacgtaacccttcacgtctcagcaagcaaccccgctatgctactgtaccagaagtttggattcaagactgaagaatatgtattagatttctatgataaatattacccattggagagtacagagtgtaaacacgcattctttctgaggctccggcgctgatgcgaatacagctcacagagaaacgcatgtgctattggagaacaggtctttgtggagatctaaaggcagtgattgatttcacagggagctctaatctctgtgattacatggtccttcaaactcccaaccaaagtgagaaaagcggcatgcagtgaaatgagcagtgagcagccctttagcaaaatcgccctccagtccttcctggagatgccttcagccagcatcccagactccacagttatttatgaatgatgtcgtgattctccctccacctgacagtttgtaagagtgaaagagcatctaacctgatgctcttggagagagataacctgtctgtcataacttaaaggatgagaaaatgtggtgtagctattaaagattcatgcagtcccaaaaggcactgtcctgggatgatgagagattataaggtgatttcataaaaggaatccaaccctgtgcccggccattgatgtgttgtcattgaatccaggaggatttctagggcactgaagttttgttgtttcttttgctgactttggttacagtcagaaaaaataaactagatgtttgtgtctacatgttctacctgttgtacctattagcatcttcctgcagggacttgggcccatggcctgggaggttggtttgggattggggttgttgggcagcctgccattcacctggcctatcctggcccttctcatgcccaagacagttgtttcacaggagtggaagtgtgggtgatgcaagtagaaccctctagatgtaccctgtgtggtctgcaggactggactgtttgctgtgtttgtggatgttggcgatagactgtcaattaggttgtttgtgatccaacaagaacatttccaaaagtatctaggtgttctcaaataaaaagctttctttgcacaacccatggccagagcgtcaaaaaa

SEQ ID NO: 437197 - DNA, 3883 bp, Homo sapiens
cgctcgaggggtcgagcctgggcagtacaggcggcggtgcgcactctgcggcggcctctgcgcctcgggcgggcgggagagagaggccgcggccgccagcgtggggatgtctaggagctcgaaggtggtgctgggcctctcggtgctgctgacggcggccacagtggccggcgtacatgtgaagcagcagtgggaccagcagaggcttcgtgacggagttatcagagacattgagaggcaaattcggaaaaaagaaaacattcgtcttttgggagaacagattattttgactgagcaacttgaagcagaaagagagaagatgttattggcaaaaggatctcaaaaatcatgacttgaatgtgaaatatctgttggacagacaacacgagtttgtgtgtgtgtgttgatggagagtagcttagtagtatcttcatctttttttttggtcactgtccttttaaacttgatcaaataaaggacagtgggtcatataagttactgctttcagggtcccttatatctgaataaaggagtgtgggcagacactttttggaagagtctgtctgggtgatcctggtagaagccccattagggtcactgtccagtgcttagggttgttactgagaagcactgccgagcttgtgagaaggaagggatggatagtagcatccacctgagtagtctgatcagtcggcatgatgacgaagccacgagaacatcgacctcagaaggactggaggaaggtgaagtggagggagagacgctcctgatcgtcgaatccgaggatcaggcatcagtggacttatcgcacgaccagagtggggattccctcaacagtgatgaaggagacgtgtcttggatggaggagcagctgtcctacttctgtgacaagtgccaaaaatggataccagccagtcagctgagggaacagctcagttaccttaagggtgataatttttttaggtttacttgttcggattgctcagcagatggcaaggagcagtatgaaaggctgaagctgacatggcagcaagtcgtcatgttggcaatgtacaacttgtctctggaaggaagtggacgtcaaggttatttcaggtggaaagaagatatctgtgcttttattgagaaacattggacttttttactagggaataggaaaaagacgtctacctggtggagcaccgtggcaggttgcctcagcgtgggaagtcccatgtacttccgttcaggtgctcaggaatttggagagccaggatggtggaaacttgttcataacaagcccccaacgatgaaacctgaaggagagaagttgtctgcctctactttgaaaataaaagcagcctcaaaaccaactttagatcccatcattactgttgagggacttagaaaacgagcaagtcggaatcctgtggaatctgccatggaattaaaagagaaaaggtctcgaactcaggaagcaaaagacattagaagagcccagaaggaggccgctggctttcttgacaggagcacatcttctacccctgtaaaattcataagccgaggccgcaggccagatgtgattctggaaaaaggcgaagtgattgacttttcctccttgagctcctctgaccgcaccccgctgacaagcccatctccttctccttctctggatttctctgcccctggtacacctgcctctcattctgccacacctagcttgctttcagaagcagatctgattccagatgtgatgcccccacaagccttgtttcatgatgacgatgagatggaaggcgatggagtcatagacccagggatggagtacgtcccaccccctgctgggtcagtagcttctgggccagtggttgggggcagaaagaaggtcagaggccctgaacagataaagcaggaggtagagagtgaggaggaaaaacccgacaggatggatattgacagtgaagacacagattcaaacacatctttgcaaacaagggctagagaaaagaggaagcctcagctggagaaggacacaaagccgaaagagcccaggtatactcccgtgagcatctacgaggaaaagctgctgctcaagaggctggaagcttgtcccggtgctgttgccatgactccggaagctcggagactgaaacgcaaactgattgtcagacaagcgaaaagggataggggattaccactttttgacttggatcaagttgttaatgctgctcttttgttagttgacgggatttatggagccaaagaaggaggaatttccagacttccagctggacaagccacgtacagaaccacctgtcaggacttcagaatccttgaccgataccagacttccttgccgtccaggaagggatttcgacaccagaccaccaagtttttgtatcgcttggtaggatcagaagatatggctgtggaccagagtattgtcagcccttatacctctcggatcttgaaaccttatatcaggcgtgattatgaaacaaagccacccaaactgcagctcctgtcacagattcgttcccacctgcacaggagcgaccctcactggacgccggagcccgacgcacctctcgattactgttatgtgcggccaaatcacatcccaacgatcaactccatgtgtcaggagtttttttggcctggcattgacctgtctgagtgtctgcagtacccagacttcagtgttgttgttctttataaaaaagtcatcattgcctttggcttcatggttcctgatgtgaaatacaatgaagcttacatttcatttctgttcgtccaccctgaatggagaagagcagggattgcaactttcatgatctatcatctgattcagacctgcatgggcaaggacgtaacccttcacgtctcagcaagcaaccccgctatgctactgtaccagaagtttggattcaagactgaagaatatgtattagatttctatgataaatattacccattggagagtacagagtgtaaacacgcattctttctgaggctccggcgctgatgcgaatacagctcacagagaaacgcatgtgctattggagaacaggtctttgtggagatctaaaggcagtgattgatttcacagggagctctaatctctgtgattacatggtccttcaaactcccaaccaaagtgagaaaagcggcatgcagtgaaatgagcagtgagcagccctttagcaaaatcgccctccagtccttcctggagatgccttcagccagcatcccagactccacagttatttatgaatgatgtcgtgattctccctccacctgacagtttgtaagagtgaaagagcatctaacctgatgctcttggagagagataacctgtctgtcataacttaaaggatgagaaaatgtggtgtagctattaaagattcatgcagtcccaaaaggcactgtcctgggatgatgagagattataaggtgatttcataaaaggaatccaaccctgtgcccggccattgatgtgttgtcattgaatccaggaggatttctagggcactgaagttttgttgtttcttttgctgactttggttacagtcagaaacttcctgcagggacttgggcccatggcctgggaggttggtttgggattggggttgttgggcagcctgccattcacctggcctatcctggcccttctcatgcccaagacagttgtttcacaggagtggaagtgtgggtgatgcaagtagaaccctctagatgtaccctgtgtggtctgcaggactggactgtttgctgtgtttgtggatgttggcgatagactgtcaattaggttgtttgtgatccaacaagaacatttccaaaagtatctaggtgttctcaaataaaaagctttctttgcacaacccatggccagagcgtcaaaaaa

SEQ ID NO: 437198 - DNA, 2480 bp, Homo sapiens
gtaattaatatgtgctactttgggtggtggttttctcttgagagcttctcagttatttctacaacactccctttctctgccccatcccaaccaagagttgatctctcagtatgcgtctttttaacctaggagagcacttagaggatttgctgccgtatctgtcactggtaagggcctgaagacagggcacgaatagtactctgtccttgtgtgtgtgtgtccttggtgcccaacatgagggctggtacagagtcagtccctgctgagtgtttgcgaggccactggaggagtggttcatctttgcaggtgggcaccttcccctccagccagaccatacccctgagggcccaaacataggtggcgcacagtcgctggcactcaatgatggccacagtgagatcacgtatatttgcaatctagcaaacaccaatatgaccccacagaatttactttaaaaactcacaaagtgctcttgtccctggcatactggtaagtgctctcttgtcctaaaaatgcctatggatacacatggaagttaagcagagaaagcaggtagctatcagatgactgtcaacagaggagttcttagaggcctgagagaaccatgggttataaatctcaaggactctatcaacttcagtatttcagtgccttctttattaaaaagtaagttcttaaatgatatgacttttgggacaccttactctgtgtagctgattaaagaatctaaggacttgccttgtgttgatagaatgattgttactcttttcccctaagattaggtcaaagctgaatgtagaaatctcagttctaagaagctaattctgtcagttttagagagacagaaggtggactttgggattcagaaggtctatacaagggcctcaggttttataattacattcttaatatttcatgtttgtgcatgtaatttagcaggcctagtaaaggaatttttacaggttttggggaggtacaagataacatctagttttaaaaagcaaaacttattttgttttgtatttattcaaggttatcatagtgttaggtattgaaatgtttgacatatttaaaggtaattgagttgtaaataataaagctgacaataacaatatccccattgaccctttgcttcaaagaaaaataaaaaacacccagaatactatcagtttccttggtcttgtgaatgttttgatcagcagcaaaatgtcattctgtttccagctgttgctaggtgttgcaatgtctcagcctcagtctctgatttctccggtttccataactaactgcctacacttaaaagcgtttctttacctactcattttccctcaggcctttccatttttatcttgtatttttccactcttttggcagacctgcatgggcaaggacgtaacccttcacgtctcagcaagcaaccccgctatgctactgtaccagaagtttggattcaagactgaagaatatgtattagatttctatgataaatattacccattggagagtacagagtgtaaacacgcattctttctgaggctccggcgctgatgcgaatacagctcacagagaaacgcatgtgctattggagaacaggtctttgtggagatctaaaggcagtgattgatttcacagggagctctaatctctgtgattacatggtccttcaaactcccaaccaaagtgagaaaagcggcatgcagtgaaatgagcagtgagcagccctttagcaaaatcgccctccagtccttcctggagatgccttcagccagcatcccagactccacagttatttatgaatgatgtcgtgattctccctccacctgacagtttgtaagagtgaaagagcatctaacctgatgctcttggagagagataacctgtctgtcataacttaaaggatgagaaaatgtggtgtagctattaaagattcatgcagtcccaaaaggcactgtcctgggatgatgagagattataaggtgatttcataaaaggaatccaaccctgtgcccggccattgatgtgttgtcattgaatccaggaggatttctagggcactgaagttttgttgtttcttttgctgactttggttacagtcagaaaaaataaactagatgtttgtgtctacatgttctacctgttgtacctattagcatcttcctgcagggacttgggcccatggcctgggaggttggtttgggattggggttgttgggcagcctgccattcacctggcctatcctggcccttctcatgcccaagacagttgtttcacaggagtggaagtgtgggtgatgcaagtagaaccctctagatgtaccctgtgtggtctgcaggactggactgtttgctgtgtttgtggatgttggcgatagactgtcaattaggttgtttgtgatccaacaagaacatttccaaaagtatctaggtgttctcaaataaaaagctttctttgcacaacccatggccagagcgtcaaaaaa

SEQ ID NO: 437199 - DNA, 339 bp, Homo sapiens
ccatctccttctccttctctggatttctctgcccctggtacacctgcctctcattctgccacacctagcttgctttcagaagcagatctgattccagatgtgatgcccccacaagccttgtttcatggtaagagtttgtttgctttgctcttttattttgggtatgggccatggtataaatgtacaagttttcaccccgtgggctgtgtgctctgcatttcttccttcctatgtcttgatgacactgttttgtactctgcacagatgacgatgagatggaaggcgatggagtcatagacccagggatggagtacgtcccaccccctgctgggtcagtag

SEQ ID NO: 437200 - DNA, 3156 bp, Homo sapiens
attttgcaattgtgggttggctgaagaaaagaagacaacatgggaaaggaaaatctgggtgataaacggattaaacctttaggttaccgctgctctagataaacccatgatgtgactttttgtttttctcctaggtcagctgagggaacagctcagttaccttaagggtgataatttttttaggtttacttgttcggattgctcagcagatggcaaggagcagtatgaaaggctgaagctgacatggcagcaagtcgtcatgttggcaatgtacaacttgtctctggaaggaagtggacgtcaaggttatttcaggtggaaagaagatatctgtgcttttattgagaaacattggacttttttactagggaataggaaaaagacgtctacctggtggagcaccgtggcaggttgcctcagcgtgggaagtcccatgtacttccgttcaggtgctcaggaatttggagagccaggatggtggaaacttgttcataacaagcccccaacgatgaaacctgaaggagagaagttgtctgcctctactttgaaaataaaagcagcctcaaaaccaactttagatcccatcattactgttgagggacttagaaaacgagcaagtcggaatcctgtggaatctgccatggaattaaaagagaaaaggtctcgaactcaggaagcaaaagacattagaagagcccagaaggaggccgctggctttcttgacaggagcacatcttctacccctgtaaaattcataagccgaggccgcaggccagatgtgattctggaaaaaggcgaagtgattgacttttcctccttgagctcctctgaccgcaccccgctgacaagcccatctccttctccttctctggatttctctgcccctggtacacctgcctctcattctgccacacctagcttgctttcagaagcagatctgattccagatgtgatgcccccacaagccttgtttcatgatgacgatgagatggaaggcgatggagtcatagacccagggatggagtacgtcccaccccctgctgggtcagtagcttctgggccagtggttgggggcagaaagaaggtcagaggccctgaacagataaagcaggaggtagagagtgaggaggaaaaacccgacaggatggatattgacagtgaagacacagattcaaacacatctttgcaaacaagggctagagaaaagaggaagcctcagctggagaaggacacaaagccgaaagagcccaggtatactcccgtgagcatctacgaggaaaagctgctgctcaagaggctggaagcttgtcccggtgctgttgccatgactccggaagctcggagactgaaacgcaaactgattgtcagacaagcgaaaagggataggggattaccactttttgacttggatcaagttgttaatgctgctcttttgttagttgacgggatttatggagccaaagaaggaggaatttccagacttccagctggacaagccacgtacagaaccacctgtcaggacttcagaatccttgaccgataccagacttccttgccgtccaggaagggatttcgacaccagaccaccaagtttttgtatcgcttggtaggatcagaagatatggctgtggaccagagtattgtcagcccttatacctctcggatcttgaaaccttatatcaggcgtgattatgaaacaaagccacccaaactgcagctcctgtcacagattcgttcccacctgcacaggagcgaccctcactggacgccggagcccgacgcacctctcgattactgttatgtgcggccaaatcacatcccaacgatcaactccatgtgtcaggagtttttttggcctggcattgacctgtctgagtgtctgcagtacccagacttcagtgttgttgttctttataaaaaagtcatcattgcctttggcttcatggttcctgatgtgaaatacaatgaagcttacatttcatttctgttcgtccaccctgaatggagaagagcagggattgcaactttcatgatctatcatctgattcagacctgcatgggcaaggacgtaacccttcacgtctcagcaagcaaccccgctatgctactgtaccagaagtttggattcaagactgaagaatatgtattagatttctatgataaatattacccattggagagtacagagtgtaaacacgcattctttctgaggctccggcgctgatgcgaatacagctcacagagaaacgcatgtgctattggagaacaggtctttgtggagatctaaaggcagtgattgatttcacagggagctctaatctctgtgattacatggtccttcaaactcccaaccaaagtgagaaaagcggcatgcagtgaaatgagcagtgagcagccctttagcaaaatcgccctccagtccttcctggagatgccttcagccagcatcccagactccacagttatttatgaatgatgtcgtgattctccctccacctgacagtttgtaagagtgaaagagcatctaacctgatgctcttggagagagataacctgtctgtcataacttaaaggatgagaaaatgtggtgtagctattaaagattcatgcagtcccaaaaggcactgtcctgggatgatgagagattataaggtgatttcataaaaggaatccaaccctgtgcccggccattgatgtgttgtcattgaatccaggaggatttctagggcactgaagttttgttgtttcttttgctgactttggttacagtcagaaaaaataaactagatgtttgtgtctacatgttctacctgttgtacctattagcatcttcctgcagggacttgggcccatggcctgggaggttggtttgggattggggttgttgggcagcctgccattcacctggcctatcctggcccttctcatgcccaagacagttgtttcacaggagtggaagtgtgggtgatgcaagtagaaccctctagatgtaccctgtgtggtctgcaggactggactgtttgctgtgtttgtggatgttggcgatagactgtcaattaggttgtttgtgatccaacaagaacatttccaaaagtatctaggtgttctcaaataaaaagctttctttgcacaacccatggccagagcgtcaaaaaa

SEQ ID NO: 437201 - DNA, 4016 bp, Homo sapiens
ctctgcccgctcggttcctcagctcctcttcgtgtctttcccccgcggtggcgcggccctgcaccccacgcgtttgcggctgcggccggcggccgctctgctgggctccgggcgctgcagctcccggcgggcgtgtgcagcccgcagattcaggacgacccggctgcccggcttagcgcctttggagctccgcgctgaaggggccttgctccgcacaggcacggcacgcaagcttttggggtgcccagtggctctgttttcaagtcacagccggcccgcaggaggcttcgtgacggagttatcagagacattgagaggcaaattcggaaaaaagaaaacattcgtcttttgggagaacagattattttgactgagcaacttgaagcagaaagagagaagatgttattggcaaaaggatctcaaaaatcatgacttgaatgtgaaatatctgttggacagacaacacgagtttgtgtgtgtgtgttgatggagagtagcttagtagtatcttcatctttttttttggtcactgtccttttaaacttgatcaaataaaggacagtgggtcatataagttactgctttcagggtcccttatatctgaataaaggagtgtgggcagacactttttggaagagtctgtctgggtgatcctggtagaagccccattagggtcactgtccagtgcttagggttgttactgagaagcactgccgagcttgtgagaaggaagggatggatagtagcatccacctgagtagtctgatcagtcggcatgatgacgaagccacgagaacatcgacctcagaaggactggaggaaggtgaagtggagggagagacgctcctgatcgtcgaatccgaggatcaggcatcagtggacttatcgcacgaccagagtggggattccctcaacagtgatgaaggagacgtgtcttggatggaggagcagctgtcctacttctgtgacaagtgccaaaaatggataccagccagtcagctgagggaacagctcagttaccttaagggtgataatttttttaggtttacttgttcggattgctcagcagatggcaaggagcagtatgaaaggctgaagctgacatggcagcaagtcgtcatgttggcaatgtacaacttgtctctggaaggaagtggacgtcaaggttatttcaggtggaaagaagatatctgtgcttttattgagaaacattggacttttttactagggaataggaaaaagacgtctacctggtggagcaccgtggcaggttgcctcagcgtgggaagtcccatgtacttccgttcaggtgctcaggaatttggagagccaggatggtggaaacttgttcataacaagcccccaacgatgaaacctgaaggagagaagttgtctgcctctactttgaaaataaaagcagcctcaaaaccaactttagatcccatcattactgttgagggacttagaaaacgagcaagtcggaatcctgtggaatctgccatggaattaaaagagaaaaggtctcgaactcaggaagcaaaagacattagaagagcccagaaggaggccgctggctttcttgacaggagcacatcttctacccctgtaaaattcataagccgaggccgcaggccagatgtgattctggaaaaaggcgaagtgattgacttttcctccttgagctcctctgaccgcaccccgctgacaagcccatctccttctccttctctggatttctctgcccctggtacacctgcctctcattctgccacacctagcttgctttcagaagcagatctgattccagatgtgatgcccccacaagccttgtttcatgatgacgatgagatggaaggcgatggagtcatagacccagggatggagtacgtcccaccccctgctgggtcagtagcttctgggccagtggttgggggcagaaagaaggtcagaggccctgaacagataaagcaggaggtagagagtgaggaggaaaaacccgacaggatggatattgacagtgaagacacagattcaaacacatctttgcaaacaagggctagagaaaagaggaagcctcagctggagaaggacacaaagccgaaagagcccaggtatactcccgtgagcatctacgaggaaaagctgctgctcaagaggctggaagcttgtcccggtgctgttgccatgactccggaagctcggagactgaaacgcaaactgattgtcagacaagcgaaaagggataggggattaccactttttgacttggatcaagttgttaatgctgctcttttgttagttgacgggatttatggagccaaagaaggaggaatttccagacttccagctggacaagccacgtacagaaccacctgtcaggacttcagaatccttgaccgataccagacttccttgccgtccaggaagggatttcgacaccagaccaccaagtttttgtatcgcttggtaggatcagaagatatggctgtggaccagagtattgtcagcccttatacctctcggatcttgaaaccttatatcaggcgtgattatgaaacaaagccacccaaactgcagctcctgtcacagattcgttcccacctgcacaggagcgaccctcactggacgccggagcccgacgcacctctcgattactgttatgtgcggccaaatcacatcccaacgatcaactccatgtgtcaggagtttttttggcctggcattgacctgtctgagtgtctgcagtacccagacttcagtgttgttgttctttataaaaaagtcatcattgcctttggcttcatggttcctgatgtgaaatacaatgaagcttacatttcatttctgttcgtccaccctgaatggagaagagcagggattgcaactttcatgatctatcatctgattcagacctgcatgggcaaggacgtaacccttcacgtctcagcaagcaaccccgctatgctactgtaccagaagtttggattcaagactgaagaatatgtattagatttctatgataaatattacccattggagagtacagagtgtaaacacgcattctttctgaggctccggcgctgatgcgaatacagctcacagagaaacgcatgtgctattggagaacaggtctttgtggagatctaaaggcagtgattgatttcacagggagctctaatctctgtgattacatggtccttcaaactcccaaccaaagtgagaaaagcggcatgcagtgaaatgagcagtgagcagccctttagcaaaatcgccctccagtccttcctggagatgccttcagccagcatcccagactccacagttatttatgaatgatgtcgtgattctccctccacctgacagtttgtaagagtgaaagagcatctaacctgatgctcttggagagagataacctgtctgtcataacttaaaggatgagaaaatgtggtgtagctattaaagattcatgcagtcccaaaaggcactgtcctgggatgatgagagattataaggtgatttcataaaaggaatccaaccctgtgcccggccattgatgtgttgtcattgaatccaggaggatttctagggcactgaagttttgttgtttcttttgctgactttggttacagtcagaaaaaataaactagatgtttgtgtctacatgttctacctgttgtacctattagcatcttcctgcagggacttgggcccatggcctgggaggttggtttgggattggggttgttgggcagcctgccattcacctggcctatcctggcccttctcatgcccaagacagttgtttcacaggagtggaagtgtgggtgatgcaagtagaaccctctagatgtaccctgtgtggtctgcaggactggactgtttgctgtgtttgtggatgttggcgatagactgtcaattaggttgtttgtgatccaacaagaacatttccaaaagtatctaggtgttctcaaataaaaagctttctttgcacaacccatggccagagcgtcaaaaaa

SEQ ID NO: 437202 - DNA, 3952 bp, Homo sapiens
ctctgcccgctcggttcctcagctcctcttcgtgtctttcccccgcggtggcgcggccctgcaccccacgcgtttgcggctgcggccggcggccgctctgctgggctccgggcgctgcagctcccggcgggcgtgtgcagcccgcagattcaggacgacccggctgcccggcttagcgcctttggagctccgcgctgaaggggccttgctccgcacagaggcttcgtgacggagttatcagagacattgagaggcaaattcggaaaaaagaaaacattcgtcttttgggagaacagattattttgactgagcaacttgaagcagaaagagagaagatgttattggcaaaaggatctcaaaaatcatgacttgaatgtgaaatatctgttggacagacaacacgagtttgtgtgtgtgtgttgatggagagtagcttagtagtatcttcatctttttttttggtcactgtccttttaaacttgatcaaataaaggacagtgggtcatataagttactgctttcagggtcccttatatctgaataaaggagtgtgggcagacactttttggaagagtctgtctgggtgatcctggtagaagccccattagggtcactgtccagtgcttagggttgttactgagaagcactgccgagcttgtgagaaggaagggatggatagtagcatccacctgagtagtctgatcagtcggcatgatgacgaagccacgagaacatcgacctcagaaggactggaggaaggtgaagtggagggagagacgctcctgatcgtcgaatccgaggatcaggcatcagtggacttatcgcacgaccagagtggggattccctcaacagtgatgaaggagacgtgtcttggatggaggagcagctgtcctacttctgtgacaagtgccaaaaatggataccagccagtcagctgagggaacagctcagttaccttaagggtgataatttttttaggtttacttgttcggattgctcagcagatggcaaggagcagtatgaaaggctgaagctgacatggcagcaagtcgtcatgttggcaatgtacaacttgtctctggaaggaagtggacgtcaaggttatttcaggtggaaagaagatatctgtgcttttattgagaaacattggacttttttactagggaataggaaaaagacgtctacctggtggagcaccgtggcaggttgcctcagcgtgggaagtcccatgtacttccgttcaggtgctcaggaatttggagagccaggatggtggaaacttgttcataacaagcccccaacgatgaaacctgaaggagagaagttgtctgcctctactttgaaaataaaagcagcctcaaaaccaactttagatcccatcattactgttgagggacttagaaaacgagcaagtcggaatcctgtggaatctgccatggaattaaaagagaaaaggtctcgaactcaggaagcaaaagacattagaagagcccagaaggaggccgctggctttcttgacaggagcacatcttctacccctgtaaaattcataagccgaggccgcaggccagatgtgattctggaaaaaggcgaagtgattgacttttcctccttgagctcctctgaccgcaccccgctgacaagcccatctccttctccttctctggatttctctgcccctggtacacctgcctctcattctgccacacctagcttgctttcagaagcagatctgattccagatgtgatgcccccacaagccttgtttcatgatgacgatgagatggaaggcgatggagtcatagacccagggatggagtacgtcccaccccctgctgggtcagtagcttctgggccagtggttgggggcagaaagaaggtcagaggccctgaacagataaagcaggaggtagagagtgaggaggaaaaacccgacaggatggatattgacagtgaagacacagattcaaacacatctttgcaaacaagggctagagaaaagaggaagcctcagctggagaaggacacaaagccgaaagagcccaggtatactcccgtgagcatctacgaggaaaagctgctgctcaagaggctggaagcttgtcccggtgctgttgccatgactccggaagctcggagactgaaacgcaaactgattgtcagacaagcgaaaagggataggggattaccactttttgacttggatcaagttgttaatgctgctcttttgttagttgacgggatttatggagccaaagaaggaggaatttccagacttccagctggacaagccacgtacagaaccacctgtcaggacttcagaatccttgaccgataccagacttccttgccgtccaggaagggatttcgacaccagaccaccaagtttttgtatcgcttggtaggatcagaagatatggctgtggaccagagtattgtcagcccttatacctctcggatcttgaaaccttatatcaggcgtgattatgaaacaaagccacccaaactgcagctcctgtcacagattcgttcccacctgcacaggagcgaccctcactggacgccggagcccgacgcacctctcgattactgttatgtgcggccaaatcacatcccaacgatcaactccatgtgtcaggagtttttttggcctggcattgacctgtctgagtgtctgcagtacccagacttcagtgttgttgttctttataaaaaagtcatcattgcctttggcttcatggttcctgatgtgaaatacaatgaagcttacatttcatttctgttcgtccaccctgaatggagaagagcagggattgcaactttcatgatctatcatctgattcagacctgcatgggcaaggacgtaacccttcacgtctcagcaagcaaccccgctatgctactgtaccagaagtttggattcaagactgaagaatatgtattagatttctatgataaatattacccattggagagtacagagtgtaaacacgcattctttctgaggctccggcgctgatgcgaatacagctcacagagaaacgcatgtgctattggagaacaggtctttgtggagatctaaaggcagtgattgatttcacagggagctctaatctctgtgattacatggtccttcaaactcccaaccaaagtgagaaaagcggcatgcagtgaaatgagcagtgagcagccctttagcaaaatcgccctccagtccttcctggagatgccttcagccagcatcccagactccacagttatttatgaatgatgtcgtgattctccctccacctgacagtttgtaagagtgaaagagcatctaacctgatgctcttggagagagataacctgtctgtcataacttaaaggatgagaaaatgtggtgtagctattaaagattcatgcagtcccaaaaggcactgtcctgggatgatgagagattataaggtgatttcataaaaggaatccaaccctgtgcccggccattgatgtgttgtcattgaatccaggaggatttctagggcactgaagttttgttgtttcttttgctgactttggttacagtcagaaaaaataaactagatgtttgtgtctacatgttctacctgttgtacctattagcatcttcctgcagggacttgggcccatggcctgggaggttggtttgggattggggttgttgggcagcctgccattcacctggcctatcctggcccttctcatgcccaagacagttgtttcacaggagtggaagtgtgggtgatgcaagtagaaccctctagatgtaccctgtgtggtctgcaggactggactgtttgctgtgtttgtggatgttggcgatagactgtcaattaggttgtttgtgatccaacaagaacatttccaaaagtatctaggtgttctcaaataaaaagctttctttgcacaacccatggccagagcgtcaaaaaa

SEQ ID NO: 437203 - DNA, 1509 bp, Homo sapiens
aacgcccgcctgcaaggtcctctgcgccctggcagccaggagtcgccgccacgaccgccgggtctcagtgggtgcctgcgccttctccccgcccgcctgccccgggccatccagaaacttgctctacccgccgcgggtgctcggcagtgctgcccatggcccagcccaggagcctatttagggcgccggacgggctggacagaggcgcggctcagtaattgaaggcctgaaacgcccatgtgccactgactaggaggcttccctgctgcggcacttcatgacccagcggcgcgcggcccagtgaagccaccgtggtgtccagcatggccgcgctgctcctgggcgcggtgctgctggtggcccagccccagctagtgccttcccgccccgccgagctaggccagcaggagcttctgcggaaagcggggaccctccaggatgacgtccgcgatggcgtggccccaaacggctctgcccagcagttgccgcagaccatcatcatcggcgtgcgcaagggcggcacgcgcgcactgctggagatgctcagcctgcaccccgacgtggcggccgcggagaacgaggtccacttcttcgactgggaggagcattacagccacggcttgggctggtacctcagccagatgcccttctcctggccacaccagctcacagtggagaagacccccgcgtatttcacgtcgcccaaagtgcctgagcgagtctacagcatgaacccgtccatccggctgctgctcatcctgcgagacccgtcggagcgcgtgctatctgactacacccaagtgttctacaaccacatgcagaagcacaagccctacccgtccatcgaggagttcctggtgcgcgatggcaggctcaatgtggactacaaggccctcaaccgcagcctctaccacgtgcacatgcagaactggctgcgctttttcccgctgcgccacatccacattgtggacggcgaccgcctcatcagggaccccttccctgagatccaaaaggtcgagaggttcctaaagctgtcgccgcagatcaatgcttcgaacttctactttaacaaaaccaagggcttttactgcctgcgggacagcggccgggaccgctgcttacatgagtccaaaggccgggcgcacccccaagtcgatcccaaactactcaataaactgcacgaatattttcatgagccaaataagaagttcttcgagcttgttggcagaacatttgactggcactgatttgcaataagctaagctcagaaactttcctactgtaagttctggtgtacatctgaggggaaaaagaattttaaaaaagcatttaaggtataatttatttgtaaaatccataaagtacttctgtacagtattagattcacaattgccatatatactagttatatttttctacttgttaaatggagggcattttgtattgtttttcatggttgttaacattgtgtaatatgtctctatatgaaggaactaaactatttcactg

SEQ ID NO: 437204 - DNA, 2368 bp, Homo sapiens
aacgcccgcctgcaaggtcctctgcgccctggcagccaggagtcgccgccacgaccgccgggtctcagtgggtgcctgcgccttctccccgcccgcctgccccgggccatccagaaacttgctctacccgccgcgggtgctcggcagtgctgcccatggcccagcccaggagcctatttagggcgccggacgggctggacagaggcgcggctcagtaattgaaggcctgaaacgcccatgtgccactgactaggaggcttccctgctgcggcacttcatgacccagcggcgcgcggcccagtgaagccaccgtggtgtccagcatggccgcgctgctcctgggcgcggtgctgctggtggcccagccccagctagtgccttcccgccccgccgagctaggccagcaggagcttctgcggaaagcggggaccctccaggatgacgtccgcgatggcgtggccccaaacggctctgcccagcagttgccgcagaccatcatcatcggcgtgcgcaagggcggcacgcgcgcactgctggagatgctcagcctgcaccccgacgtggcggccgcggagaacgaggtccacttcttcgactgggaggagcattacagccacggcttgggctggtacctcagccagatgcccttctcctggccacaccagctcacagtggagaagacccccgcgtatttcacgtcgcccaaagtgcctgagcgagtctacagcatgaacccgtccatccggctgctgctcatcctgcgagacccgtcggagcgcgtgctatctgactacacccaagtgttctacaaccacatgcagaagcacaagccctacccgtccatcgaggagttcctggtgcgcgatggcaggctcaatgtggactacaaggccctcaaccgcagcctctaccacgtgcacatgcagaactggctgcgctttttcccgctgcgccacatccacattgtggacggcgaccgcctcatcagggaccccttccctgagatccaaaaggtcgagaggttcctaaagctgtcgccgcagatcaatgcttcgaacttctactttaacaaaaccaagggcttttactgcctgcgggacagcggccgggaccgctgcttacatgagtccaaaggccgggcgcacccccaagtcgatcccaaactactcaataaactgcacgaatattttcatgagccaaataagaagttcttcgagcttgttggcagaacatttgactggcactgatttgcaataagctaagctcagaaactttcctactgtaagttctggtgtacatctgaggggaaaaagaattttaaaaaagcatttaaggtataatttatttgtaaaatccataaagtacttctgtacagtattagattcacaattgccatatatactagttatatttttctacttgttaaatggagggcattttgtattgtttttcatggttgttaacattgtgtaatatgtctctatatgaaggaactaaactatttcactgaaaaaaaaaaaaagattttttctggagacgctatgtttttttgaatataattaacttgcccccaactcaaaatagctgtctgtgttgcaatcattgcaaaatctaaattcttttgttacttaaaaaaacatgtttttcatggctattacaatcctctctctcccctctcctttctgcattgctctttttaatttttaatgtctcattgtgatcatcagatttatttttacttggattgtaagatttatctcctcggcgattccttgtcatttttggaggtcacagttttactcattcccatgtgtaaacttcaagtaaacaaagcaatattcaggatggagaagcagttagtgactggctagaggtctcttgggatccatcttgacctcaaagaatatttgcacatgcttctgatctcagcagttataataaagaggattaaacccttggccttcagaatgatcttggacctggatactttgccccaggtggcagctggcctccagaaagccaattagaatagaaaagagaaactgcgaaatctatgcgtgtcttcatcctgtcggttctgtgaaaggctgactaaaagggtagtagtcttttgcttagtctgaaagtctgcttacttcctgaaagacacattggcattatagacatatattccatatgcactgagacataaatatgtgtatgtttcaaaatcaactctaaatttggagtcctgaatgtgaaagaaaaagtaagttcccaagtgttgaagttaaaaagagaaaagggcagagttgaaggtagcacctaagagaaccactgtacctgcccccagaggagtggctggagttcagttttacttctgcccctg

SEQ ID NO: 437205 - DNA, 2293 bp, Homo sapiens
gacagggcgctctttgaagccggctcctcacgcggattctggcccaggccgccgctccggtcccagtccggctgcagagcgaattggagaggatggcacctcctgcttcccggggggcggaaggagcgccagcgcctaagtaattgaaggcctgaaacgcccatgtgccactgactaggaggcttccctgctgcggcacttcatgacccagcggcgcgcggcccagtgaagccaccgtggtgtccagcatggccgcgctgctcctgggcgcggtgctgctggtggcccagccccagctagtgccttcccgccccgccgagctaggccagcaggagcttctgcggaaagcggggaccctccaggatgacgtccgcgatggcgtggccccaaacggctctgcccagcagttgccgcagaccatcatcatcggcgtgcgcaagggcggcacgcgcgcactgctggagatgctcagcctgcaccccgacgtggcggccgcggagaacgaggtccacttcttcgactgggaggagcattacagccacggcttgggctggtacctcagccagatgcccttctcctggccacaccagctcacagtggagaagacccccgcgtatttcacgtcgcccaaagtgcctgagcgagtctacagcatgaacccgtccatccggctgctgctcatcctgcgagacccgtcggagcgcgtgctatctgactacacccaagtgttctacaaccacatgcagaagcacaagccctacccgtccatcgaggagttcctggtgcgcgatggcaggctcaatgtggactacaaggccctcaaccgcagcctctaccacgtgcacatgcagaactggctgcgctttttcccgctgcgccacatccacattgtggacggcgaccgcctcatcagggaccccttccctgagatccaaaaggtcgagaggttcctaaagctgtcgccgcagatcaatgcttcgaacttctactttaacaaaaccaagggcttttactgcctgcgggacagcggccgggaccgctgcttacatgagtccaaaggccgggcgcacccccaagtcgatcccaaactactcaataaactgcacgaatattttcatgagccaaataagaagttcttcgagcttgttggcagaacatttgactggcactgatttgcaataagctaagctcagaaactttcctactgtaagttctggtgtacatctgaggggaaaaagaattttaaaaaagcatttaaggtataatttatttgtaaaatccataaagtacttctgtacagtattagattcacaattgccatatatactagttatatttttctacttgttaaatggagggcattttgtattgtttttcatggttgttaacattgtgtaatatgtctctatatgaaggaactaaactatttcactgaaaaaaaaaaaaagattttttctggagacgctatgtttttttgaatataattaacttgcccccaactcaaaatagctgtctgtgttgcaatcattgcaaaatctaaattcttttgttacttaaaaaaacatgtttttcatggctattacaatcctctctctcccctctcctttctgcattgctctttttaatttttaatgtctcattgtgatcatcagatttatttttacttggattgtaagatttatctcctcggcgattccttgtcatttttggaggtcacagttttactcattcccatgtgtaaacttcaagtaaacaaagcaatattcaggatggagaagcagttagtgactggctagaggtctcttgggatccatcttgacctcaaagaatatttgcacatgcttctgatctcagcagttataataaagaggattaaacccttggccttcagaatgatcttggacctggatactttgccccaggtggcagctggcctccagaaagccaattagaatagaaaagagaaactgcgaaatctatgcgtgtcttcatcctgtcggttctgtgaaaggctgactaaaagggtagtagtcttttgcttagtctgaaagtctgcttacttcctgaaagacacattggcattatagacatatattccatatgcactgagacataaatatgtgtatgtttcaaaatcaactctaaatttggagtcctgaatgtgaaagaaaaagtaagttcccaagtgttgaagttaaaaagagaaaagggcagagttgaaggtagcacctaagagaaccactgtacctgcccccagaggagtggctggagttcagttttacttctgcccctg

SEQ ID NO: 437206 - DNA, 2288 bp, Homo sapiens
ctaagaagaatcgaggctggagcaggtggagtggatgcagagggaaccaggaagcaaaggctggggattttcccatcctcctcacctcctgccctagcacctctgctctggaagtcccgagggaccggttgatcttaattgaaggcctgaaacgcccatgtgccactgactaggaggcttccctgctgcggcacttcatgacccagcggcgcgcggcccagtgaagccaccgtggtgtccagcatggccgcgctgctcctgggcgcggtgctgctggtggcccagccccagctagtgccttcccgccccgccgagctaggccagcaggagcttctgcggaaagcggggaccctccaggatgacgtccgcgatggcgtggccccaaacggctctgcccagcagttgccgcagaccatcatcatcggcgtgcgcaagggcggcacgcgcgcactgctggagatgctcagcctgcaccccgacgtggcggccgcggagaacgaggtccacttcttcgactgggaggagcattacagccacggcttgggctggtacctcagccagatgcccttctcctggccacaccagctcacagtggagaagacccccgcgtatttcacgtcgcccaaagtgcctgagcgagtctacagcatgaacccgtccatccggctgctgctcatcctgcgagacccgtcggagcgcgtgctatctgactacacccaagtgttctacaaccacatgcagaagcacaagccctacccgtccatcgaggagttcctggtgcgcgatggcaggctcaatgtggactacaaggccctcaaccgcagcctctaccacgtgcacatgcagaactggctgcgctttttcccgctgcgccacatccacattgtggacggcgaccgcctcatcagggaccccttccctgagatccaaaaggtcgagaggttcctaaagctgtcgccgcagatcaatgcttcgaacttctactttaacaaaaccaagggcttttactgcctgcgggacagcggccgggaccgctgcttacatgagtccaaaggccgggcgcacccccaagtcgatcccaaactactcaataaactgcacgaatattttcatgagccaaataagaagttcttcgagcttgttggcagaacatttgactggcactgatttgcaataagctaagctcagaaactttcctactgtaagttctggtgtacatctgaggggaaaaagaattttaaaaaagcatttaaggtataatttatttgtaaaatccataaagtacttctgtacagtattagattcacaattgccatatatactagttatatttttctacttgttaaatggagggcattttgtattgtttttcatggttgttaacattgtgtaatatgtctctatatgaaggaactaaactatttcactgaaaaaaaaaaaaagattttttctggagacgctatgtttttttgaatataattaacttgcccccaactcaaaatagctgtctgtgttgcaatcattgcaaaatctaaattcttttgttacttaaaaaaacatgtttttcatggctattacaatcctctctctcccctctcctttctgcattgctctttttaatttttaatgtctcattgtgatcatcagatttatttttacttggattgtaagatttatctcctcggcgattccttgtcatttttggaggtcacagttttactcattcccatgtgtaaacttcaagtaaacaaagcaatattcaggatggagaagcagttagtgactggctagaggtctcttgggatccatcttgacctcaaagaatatttgcacatgcttctgatctcagcagttataataaagaggattaaacccttggccttcagaatgatcttggacctggatactttgccccaggtggcagctggcctccagaaagccaattagaatagaaaagagaaactgcgaaatctatgcgtgtcttcatcctgtcggttctgtgaaaggctgactaaaagggtagtagtcttttgcttagtctgaaagtctgcttacttcctgaaagacacattggcattatagacatatattccatatgcactgagacataaatatgtgtatgtttcaaaatcaactctaaatttggagtcctgaatgtgaaagaaaaagtaagttcccaagtgttgaagttaaaaagagaaaagggcagagttgaaggtagcacctaagagaaccactgtacctgcccccagaggagtggctggagttcagttttacttctgcccctg

SEQ ID NO: 437207 - DNA, 379 bp, Homo sapiens
ggtttaaacaatagatatttatttctcacagctctggaggctggaagttcaagatcaaggtgtcagcagaagtggttcttcatgaaaccccattccttgctcgcagagggccacattttgcctgtgccttcacatggtggagagaatgagagagagagacagagtgagctctgttttatcttcctcttcttataaggacaccaatcttgtcagaatggagccccacccttacaaccttatggaaatccgatcatctaaagcccccacctccaaataccatcacactgagggttagggtctcaacctatgaatttggggaggacaaaaacattcagtccataacaacctggctcaagaaatgagacaaatcatctctccc

SEQ ID NO: 437208 - DNA, 1454 bp, Homo sapiens
aacgcccgcctgcaaggtcctctgcgccctggcagccaggagtcgccgccacgaccgccgggtctcagtgggtgcctgcgccttctccccgcccgcctgccccgggccatccagaaacttgctctacccgccgcgggtgctcggcagtgctgcccatggcccagcccaggagcctatttagggcgccggacgggctggacagaggcgcggctcagtaattgaaggcctgaaacgcccatgtgccactgactaggaggcttccctgctgcggcacttcatgacccagcggcgcgcggcccagtgaagccaccgtggtgtccagcatggccgcgctgctcctgggcgcggtgctgctggtggcccagccccagctagtgccttcccgccccgccgagctaggccagcaggagcttctgcggaaagcggggaccctccaggatgacgtccgcgatggcgtggccccaaacggctctgcccagcagttgccgcagaccatcatcatcggcgtgcgcaagggcggcacgcgcgcactgctggagatgctcagcctgcaccccgacgtggcggccgcggagaacgaggtccacttcttcgactgggaggagcattacagccacggcttgggctggtacctcagccagatgcccttctcctggccacaccagctcacagtggagaagacccccgcgtatttcacgtcgcccaaagtgcctgagcgagtctacagcatgaacccgtccatccggctgctgctcatcctgcgagacccgtcggagcgcgtgctatctgactacacccaagtgttctacaaccacatgcagaagcacaagccctacccgtccatcgaggagttcctggtgcgcgatggcaggctcaatgtggactacaaggccctcaaccgcagcctctaccacgtgcacatgcagaactggctgcgctttttcccgctgcgccacatccacattgtggacggcgaccgcctcatcagggaccccttccctgagatccaaaaggtcgagaggttcctaaagctgtcgccgcagatcaatgcttcgaacttctactttaacaaaaccaagggcttttactgcctgcgggacagcggccgggaccgctgcttacatgagtccaaaggccgggcgcacccccaagtcgatcccaaactactcaataaactgcacgaatattttcatgagccaaataagaagttcttcgagcttgttggcagaacatttgactggcactgatttgcaataagctaagctcagaaactttcctactgtaagttctggtgtacatctgaggggaaaaagaattttaaaaaagcatttaaggtataatttattttagttatatttttctacttgttaaatggagggcattttgtattgtttttcatggttgttaacattgtgtaatatgtctctatatgaaggaactaaactatttcactg

SEQ ID NO: 437209 - DNA, 2736 bp, Homo sapiens
ggaagaagaagctggagccaaagccgggtgccggcgcgggatggggtgtgctgggctctgcagttatagaaggcaggagagtgctagctggatttaaagccaacttcttgccccatgaccttgggcaacaatttctccctccctgaccctaaatttcttcctctgcaaaacagtgatgaaaagattattataagaaagtgagaaaatgtatatgaaatgcatcttgccgattggagaacacttgtgcaattgtaaagggtgttgttccaaacgtgtctccagaacctaactcagtgcctgcctggcacttagacattcaataagtatatttggaataattgaatgagtgattggactgaatcttcacagcaaccttggagagcagatggcgtcatttctattttaaggatttggaatctgccgatcggaaaacttaattaattttctaaagctctggaggctggaagttcaagatcaaggtgtcagcagaagtggttcttcatgaaaccccattccttgctcgcagagggccacattttgcctgtgccttcacatggtggagagaatgagagagagagacagataattgaaggcctgaaacgcccatgtgccactgactaggaggcttccctgctgcggcacttcatgacccagcggcgcgcggcccagtgaagccaccgtggtgtccagcatggccgcgctgctcctgggcgcggtgctgctggtggcccagccccagctagtgccttcccgccccgccgagctaggccagcaggagcttctgcggaaagcggggaccctccaggatgacgtccgcgatggcgtggccccaaacggctctgcccagcagttgccgcagaccatcatcatcggcgtgcgcaagggcggcacgcgcgcactgctggagatgctcagcctgcaccccgacgtggcggccgcggagaacgaggtccacttcttcgactgggaggagcattacagccacggcttgggctggtacctcagccagatgcccttctcctggccacaccagctcacagtggagaagacccccgcgtatttcacgtcgcccaaagtgcctgagcgagtctacagcatgaacccgtccatccggctgctgctcatcctgcgagacccgtcggagcgcgtgctatctgactacacccaagtgttctacaaccacatgcagaagcacaagccctacccgtccatcgaggagttcctggtgcgcgatggcaggctcaatgtggactacaaggccctcaaccgcagcctctaccacgtgcacatgcagaactggctgcgctttttcccgctgcgccacatccacattgtggacggcgaccgcctcatcagggaccccttccctgagatccaaaaggtcgagaggttcctaaagctgtcgccgcagatcaatgcttcgaacttctactttaacaaaaccaagggcttttactgcctgcgggacagcggccgggaccgctgcttacatgagtccaaaggccgggcgcacccccaagtcgatcccaaactactcaataaactgcacgaatattttcatgagccaaataagaagttcttcgagcttgttggcagaacatttgactggcactgatttgcaataagctaagctcagaaactttcctactgtaagttctggtgtacatctgaggggaaaaagaattttaaaaaagcatttaaggtataatttatttgtaaaatccataaagtacttctgtacagtattagattcacaattgccatatatactagttatatttttctacttgttaaatggagggcattttgtattgtttttcatggttgttaacattgtgtaatatgtctctatatgaaggaactaaactatttcactgaaaaaaaaaaaaagattttttctggagacgctatgtttttttgaatataattaacttgcccccaactcaaaatagctgtctgtgttgcaatcattgcaaaatctaaattcttttgttacttaaaaaaacatgtttttcatggctattacaatcctctctctcccctctcctttctgcattgctctttttaatttttaatgtctcattgtgatcatcagatttatttttacttggattgtaagatttatctcctcggcgattccttgtcatttttggaggtcacagttttactcattcccatgtgtaaacttcaagtaaacaaagcaatattcaggatggagaagcagttagtgactggctagaggtctcttgggatccatcttgacctcaaagaatatttgcacatgcttctgatctcagcagttataataaagaggattaaacccttggccttcagaatgatcttggacctggatactttgccccaggtggcagctggcctccagaaagccaattagaatagaaaagagaaactgcgaaatctatgcgtgtcttcatcctgtcggttctgtgaaaggctgactaaaagggtagtagtcttttgcttagtctgaaagtctgcttacttcctgaaagacacattggcattatagacatatattccatatgcactgagacataaatatgtgtatgtttcaaaatcaactctaaatttggagtcctgaatgtgaaagaaaaagtaagttcccaagtgttgaagttaaaaagagaaaagggcagagttgaaggtagcacctaagagaaccactgtacctgcccccagaggagtggctggagttcagttttacttctgcccctg

SEQ ID NO: 437210 - DNA, 2161 bp, Homo sapiens
aggggccaccgcaccgggtgggcgggaccgactactacccgaccagccgctggagctgctgcggcacttcatgacccagcggcgcgcggcccagtgaagccaccgtggtgtccagcatggccgcgctgctcctgggcgcggtgctgctggtggcccagccccagctagtgccttcccgccccgccgagctaggccagcaggagcttctgcggaaagcggggaccctccaggatgacgtccgcgatggcgtggccccaaacggctctgcccagcagttgccgcagaccatcatcatcggcgtgcgcaagggcggcacgcgcgcactgctggagatgctcagcctgcaccccgacgtggcggccgcggagaacgaggtccacttcttcgactgggaggagcattacagccacggcttgggctggtacctcagccagatgcccttctcctggccacaccagctcacagtggagaagacccccgcgtatttcacgtcgcccaaagtgcctgagcgagtctacagcatgaacccgtccatccggctgctgctcatcctgcgagacccgtcggagcgcgtgctatctgactacacccaagtgttctacaaccacatgcagaagcacaagccctacccgtccatcgaggagttcctggtgcgcgatggcaggctcaatgtggactacaaggccctcaaccgcagcctctaccacgtgcacatgcagaactggctgcgctttttcccgctgcgccacatccacattgtggacggcgaccgcctcatcagggaccccttccctgagatccaaaaggtcgagaggttcctaaagctgtcgccgcagatcaatgcttcgaacttctactttaacaaaaccaagggcttttactgcctgcgggacagcggccgggaccgctgcttacatgagtccaaaggccgggcgcacccccaagtcgatcccaaactactcaataaactgcacgaatattttcatgagccaaataagaagttcttcgagcttgttggcagaacatttgactggcactgatttgcaataagctaagctcagaaactttcctactgtaagttctggtgtacatctgaggggaaaaagaattttaaaaaagcatttaaggtataatttatttgtaaaatccataaagtacttctgtacagtattagattcacaattgccatatatactagttatatttttctacttgttaaatggagggcattttgtattgtttttcatggttgttaacattgtgtaatatgtctctatatgaaggaactaaactatttcactgaaaaaaaaaaaaagattttttctggagacgctatgtttttttgaatataattaacttgcccccaactcaaaatagctgtctgtgttgcaatcattgcaaaatctaaattcttttgttacttaaaaaaacatgtttttcatggctattacaatcctctctctcccctctcctttctgcattgctctttttaatttttaatgtctcattgtgatcatcagatttatttttacttggattgtaagatttatctcctcggcgattccttgtcatttttggaggtcacagttttactcattcccatgtgtaaacttcaagtaaacaaagcaatattcaggatggagaagcagttagtgactggctagaggtctcttgggatccatcttgacctcaaagaatatttgcacatgcttctgatctcagcagttataataaagaggattaaacccttggccttcagaatgatcttggacctggatactttgccccaggtggcagctggcctccagaaagccaattagaatagaaaagagaaactgcgaaatctatgcgtgtcttcatcctgtcggttctgtgaaaggctgactaaaagggtagtagtcttttgcttagtctgaaagtctgcttacttcctgaaagacacattggcattatagacatatattccatatgcactgagacataaatatgtgtatgtttcaaaatcaactctaaatttggagtcctgaatgtgaaagaaaaagtaagttcccaagtgttgaagttaaaaagagaaaagggcagagttgaaggtagcacctaagagaaccactgtacctgcccccagaggagtggctggagttcagttttacttctgcccctg

SEQ ID NO: 437211 - DNA, 3254 bp, Homo sapiens
cacgtcatctactctgtgaaatttttcatttcatatgcaattcccgatgtatcaaaacgcacaaagagcaagatccagagagaaaaatacctaacccaaaagcttcttcatgagaatcacctcaaagatatgacgaaaaatatgggggtgatagctgagcggatgatagaagcagtagataacaatttacggccaaaatcagaataagagctttatgttctgagaagcactttaaggaatttagctttgtcaaaatatattaggaatcactaatgagaatgtgtaagttaaatcactttggcaaatatgagtctcaactattgccatttcctcatgtattatttttcagtttcagctagcgatgcagaaactggaaaatgtaaaacttagatcatgaagggcataaaacttatcacccggaaaacctcaatgttacctttttctgataaattggaattttacagaaaaagtccctcagtgtgcttaaaaaccaccccttctaaagtagaatggattcttttttttctgtttgattattttcatttctgtctattctcaggcgcatgatctcctttatttttaagccatgtttcatttcttcacttggctagatctgttccagggtcatcttttccttacagtaccatcattatagatttaatttaatagctttcatgtgattaaaaatagctaactagactcaaggattcacaatatttaggtgtattttcaatacctccagaaaggaaacctcagttaatcagaggaaatagtttcagtcttcatttgagcatgtctttccatctcaaaaaaatactcttagtaggttggagtgaagatagcaaggttttgaagcatatttgtcctaatccacagtgacactttttatcttccaggagcactcctaggaggttccgtgcctaatcaatgttgactgctttgcagatctcaagggaataaaatgacaaaagcagggaaagttacagattcaaacagcattttaactcatgttgatctggataattaatcttttctaaagatgtgtagtttcttggaaaacagtgatatcacatgattaaaattacatttttatcaacataattgtctggaaaagataagcccctcaattttctaccagttgacttttattcattagatacagaaggtgcagtattacacatcaccagctgcctttgtgaatggctcactacacagccattggggtacaactgtgtgcatgggcagaaacagcaagtgccctcattgtggtcattgggtggggagtgccttttgtcaaggagtctgcaggaattggcttatttctgtatgccaaagtgatcaacacaccaaagtctctgccataaagaatgtggcttccttgcatcctccatcctgttactctgggcccagtaatttgatgtaactgtctgattgtactagagacaggagtatacccagcttattcataatcaagtaaagagactcagattagatttgattttttagcctcctctagagccaatcaggcagttaagagtaataaaggaaaagggtttggtcacaaaccctaccattatctggagattacttcctgctgcactcctgtcttgccatgcacgtcttgccccctcacttttgctcagcctagcagtctacttcactttattgccttgtaagtgtcaggcctcctgggcgctctggaaaagacagggagccaggccctctcacccctactggtaacaggtcattgctgggtgcacaagagggaggtgatttgcatcatggtcatgctgcatgggcttcactgggatgctgttaaacaccagaggagccaacctatcagaatcccagcagcaaaggaaaactcagattttagaggctttttacaataaagtagcgtaactctaggtcatgattgatttcaaatgcctgccatgaatgatttgtaagtaattatgtaggatccatcaaagcagtattgtaggcttttgaattgtcccagtggatccgggaccccatttcactgtctctcttgatcgtgttaatgatgcaatcagagttcaagacaggccccatgaagtctgactgcactgggatggagaaatgaatttcttcccactgaaggaaactctttctcattcgcagccaagacgggagtgccactgttcctctcttcactcctgagatactgcttctggaagcgggtgtcacttcctctctagtacctcttctcttctctgaagtgtgtgactatctcctagtgtttaaatttggcagttactcgccatgtatgtcagcatagaaaaggaaatgtttttaccttatctcctgtatgtatgatagaacttaaaagaaatgtgcatttgttttcatagccccagcagagaaaatcctcttcatagattaaatgtgctgctgtggacaggagggaaaaaaaaaccctctacatattgaaaggcaccaaatgtaatatctgacactgttaagatgcccaaaagagcaaagttgtagtggagatgcagggtcatttccccatgccatccacagtgtttgttagtgagtccacggctgacttgcagtgataaagaaaagcatggagctgtgtctgcagacaatggtggctgcatctgtaagtggcttcagaggcagcagccctggggaaattgatgggtgtggcagtggacctgtgaagagggagaatctagccttcagcctgtccagtgttaaccactagagaaactgagctttatatccttttttaatgcctgtgaattttagcatattgaaacattagagcaaatactcaggggatttttcattaaacatccctcagataatttagctatatatcattagaaagggaaagctatcatttttattttaaaactaaacaaggccatcttataaactgtcaccaaagtcttcccttttttattgcatgtgtgccttgaatttcataaaacattaattcacaatgggggtcagaatgtactcttgttgaaacacttcttgtaccattttatgttcatattatgtttgagagggtaaaaatgtatgagcagcttaactgaagtagaactattcatgatgcttttcacacattgtggcataagatgtaaagtttgtaattaatgttaatttctgtgcattttaatattcttttataattattaatgttaatttctgtgcattttaatattcttttataattatgagcattttaataaattcatttttacaaacaaaaaaaaaaa

SEQ ID NO: 437212 - DNA, 3200 bp, Homo sapiens
cacgtcatctactctgtgaaatttttcatttcatatgcaattcccgatgtatcaaaacgcacaaagagcaagatccagagagaaaaatacctaacccaaaagcttcttcatgagaatcacctcaaagatatgacgaaaaatatgggggtgatagctgagcggatgatagaagcagtagataacaatttacggccaaaatcagaataagagctttatgttctgagaagcactttaaggaatttagctttgtcaaaatatattaggaatcactaatgagaatgtgtaagttaaatcactttggcaaatatgagtctcaactattgccatttcctcatgtattatttttcagtttcagctagcgatgcagaaactggaaaatgtaaaacttagatcatgaagggcataaaacttatcacccggaaaacctcaatgttacctttttctgataaattggaattttacagaaaaagtccctcagtgtgcttaaaaaccaccccttctaaagtagaatggattcttttttttctgtttgattattttcatttctgtctattctcaggcgcatgatctcctttatttttaagccatgtttcatttcttcacttggctagatctgttccagggtcatcttttccttacagtaccatcattatagatttaatttaatagctttcatgtgattaaaaatagctaactagactcaaggattcacaatatttaggtgtattttcaatacctccagaaaggaaacctcagttaatcagaggaaatagtttcagtcttcatttgagcatgtctttccatctcaaaaaaatactcttagtaggttggagtgaagatagcaaggttttgaagcatatttgtcctaatccacagtgacactttttatcttccaggagcactcctaggaggttccgtgcctaatcaatgttgactgctttgcagatctcaagggaataaaatgacaaaagcagggaaagttacagattcaaacagcattttaactcatgttgatctggataattaatcttttctaaagatgtgtagtttcttggaaaacagtgatatcacatgattaaaattacatttttatcaacataattgtctggaaaagataagcccctcaattttctaccagttgacttttattcattagatacagaaggtgcagtattacacatcaccagctgcctttgtgaatggctcactacacagccattggggtacaactgtgtgcatgggcagaaacagcaagtgccctcattgtggtcattgggtggggagtgccttttgtcaaggagtctgcaggaattggcttatttctgtatgccaaagtgatcaacacaccaaagtctctgccataaagaatgtggcttccttgcatcctccatcctgttactctgggcccagtaatttgatgtaactgtctgattgtactagagacaggagtatacccagcttattcataatcaagtaaagagactcagattagatttgattttttagcctcctctagagccaatcaggcagttaagagtaataaaggaaaagggtttggtcacaaaccctaccattatctggagattacttcctgctgcactcctgtcttgccatgcacgtcttgccccctcacttttgctcagcctagcagtctacttcactttattgccttgtaagtgtcaggcctcctgggcgctctggaaaagacagggagccaggccctctcacccctactggtaacaggtcattgctgggtgcacaagagggaggtgatttgcatcatggtcatgctgcatgggcttcactgggatgctgttaaacaccagaggagccaacctatcagaatcccagcagcaaaggattgatttcaaatgcctgccatgaatgatttgtaagtaattatgtaggatccatcaaagcagtattgtaggcttttgaattgtcccagtggatccgggaccccatttcactgtctctcttgatcgtgttaatgatgcaatcagagttcaagacaggccccatgaagtctgactgcactgggatggagaaatgaatttcttcccactgaaggaaactctttctcattcgcagccaagacgggagtgccactgttcctctcttcactcctgagatactgcttctggaagcgggtgtcacttcctctctagtacctcttctcttctctgaagtgtgtgactatctcctagtgtttaaatttggcagttactcgccatgtatgtcagcatagaaaaggaaatgtttttaccttatctcctgtatgtatgatagaacttaaaagaaatgtgcatttgttttcatagccccagcagagaaaatcctcttcatagattaaatgtgctgctgtggacaggagggaaaaaaaaaccctctacatattgaaaggcaccaaatgtaatatctgacactgttaagatgcccaaaagagcaaagttgtagtggagatgcagggtcatttccccatgccatccacagtgtttgttagtgagtccacggctgacttgcagtgataaagaaaagcatggagctgtgtctgcagacaatggtggctgcatctgtaagtggcttcagaggcagcagccctggggaaattgatgggtgtggcagtggacctgtgaagagggagaatctagccttcagcctgtccagtgttaaccactagagaaactgagctttatatccttttttaatgcctgtgaattttagcatattgaaacattagagcaaatactcaggggatttttcattaaacatccctcagataatttagctatatatcattagaaagggaaagctatcatttttattttaaaactaaacaaggccatcttataaactgtcaccaaagtcttcccttttttattgcatgtgtgccttgaatttcataaaacattaattcacaatgggggtcagaatgtactcttgttgaaacacttcttgtaccattttatgttcatattatgtttgagagggtaaaaatgtatgagcagcttaactgaagtagaactattcatgatgcttttcacacattgtggcataagatgtaaagtttgtaattaatgttaatttctgtgcattttaatattcttttataattattaatgttaatttctgtgcattttaatattcttttataattatgagcattttaataaattcatttttacaaacaaaaaaaaaaa

SEQ ID NO: 437213 - DNA, 389 bp, Homo sapiens
gtgctgtgccagagagccacagtgtagagtgcaaggacattcctcaggaacatttgtcccaataggttggatatatttatgtccctggaagaaattttccagtcccatctatgctgatgggcctgctgagtatagactcaggaaagctgccccactgctacagccttttgggaatgactgaatgactttctctgtgccatgttttcaggccatcttggcagcaggcagcatgatgcagacccacggggactttgatgttgccctcaccaaatacagagttgtggcttgtgctgttccagaaagtcctccactctggaataacattggaatgtgtttctttggcaagaagaaatatgtggcggtgagtgtcccctcatgttctttgtttg

SEQ ID NO: 437214 - DNA, 507 bp, Homo sapiens
taaaaattgctcttaatttttaaactctcaatacaataaattttgaccttaccattattccagagattcagtattaaaaaaaaaaaagtcgacgcggccgcgtcgacctttaatagtatacatttaaaagaaaaaaaacaaaagccctggaagttgaggccaagcctgctgagtattgcagctgcatttgcccaaagggaatccagaacaagtccctccctgtattttgttcttgagaggggtcagtctagaagctagatcctatcaggatgaggagcagcagcccagggcttgtctggatcagcaccaacgattttaaagaaaaaaggaagagtttcttagatgagtaattgttattgaagatagtcagtgataaccactgaccagatgctatcaatacactatgtgtcctttttagaataaagattacatatcatcattcctttggggaaaattgttattcaggtataaaaacaagagatcataataaaaacctaaaagaaccta

SEQ ID NO: 437215 - DNA, 723 bp, Homo sapiens
ctgaccaacccaatcaaccacctcatagagaaaaggcttcagaattctctgctggatgaaatatgattaaaatgtgggactagtagggttagtcttctaagaattttgaggtaataattatggaaaatatatcttttacagatttcttttgggaaaacataaagctgccattgaagtatataatgaagcagctaaactcaaccagaaagattgggggtaagtagagaactttcagttctttcttattagtaaacttgctaatggttccatttatcatctggctgtcttatttctgaattcttacattccaaaaatgtcttgattttaacctcatacttaattcatgatttgtataagtataggatcaaaaaccatgtttcctcataactttgcaggcattgctgcatgattttctagcagtttgctgacgagcagtctcttaccagtctgattcttgttgatttgacccctagaagctttgggtatttttttcgtcattggaattccacagtatcagcaataggcatctagttgtgtttcatgtctttttcccgtccccatctgtgtgacattcaattgactctttcattctgaagacccttgcctttctttgggtcagggcctttgagtagttctttatttttcccctccccttctctttgtgtcaattgaggattgtgtgtaaatgcaacagaaaatttgactaaacattggctttacaaa

SEQ ID NO: 437216 - DNA, 769 bp, Homo sapiens
gcagcggtgggctgagctaaaatggctgaggagagagtcgcgacgagaactcaatttcctgtatctactgagtctcaaaaaccccggcagaaaaaagctccagagtttcctattttggagaagcagaactggttgattcatcttcattatatccggaaagattatgaagcctgcaaggctgttatcaaagaacagcttcaagagactcagggattgtgtgaatatgctatctatgtccaagcattgatatttcgcctagaaggaaatatccaagaatccctagaactcttccagacatgtgcagttcttagtcctcagagtgctgataacctcaagcaggtggccagatctttatttcttttgggaaaacataaagctgccattgaagtatataatgaagcagctaaactcaaccagaaagattgggagatcagccataacctaggagtttgctacatatacctgaagcagttcaacaaggtaatttatagaagtggtgatagatttcactgagggtgcacttgttgcagaagttgttacattgctcatttggtattatccctagtgcttgcagaggtttttggaactgaaaattgaaagtacctttatacatttttttctgttttaattctcacttgtcattattcatctgttgttttctgcttgtaataagaacatggaaagttctagaaatatgagggaatggcagtttttctcctttcttctttttctctacctccagttaaatttcccagtttagaaacagatg

SEQ ID NO: 437217 - DNA, 661 bp, Homo sapiens
gcagcggtgggctgagctaaaatggctgaggagagagtcgcgacgagaactcaatttcctgtatctactgagtctcaaaaaccccggcagaaaaaagctccagagtttcctattttggagaagcagaactggttgattcatcttcattatatccggaaagattatgaagcctgcaaggctgttatcaaagaacagcttcaagagactcagggattgtgtgaatatgctatctatgtccaagcattgatatttcgcctagaaggaaatatccaagaatccctagaactcttccagacatgtgcagttcttagtcctcagagtgctgataacctcaagcaggtggccagatctttatttcttttgggaaaacataaagctgccattgaagtatataatgaagcagctaaactcaaccagaaagattgggggtaagtagagaactttcagttctttcttattagtaaacttgctaatggttccatttatcatctggctgtcttatttctgaattcttacattccaaaaatgtcttgattttaacctcatacttaattcatgatttgtataagtataggatcgagcagctcttacaagctggtcttgtgatgaccctagacctttggattttttcgcaatgaattcccaggttagcaattgggtt

SEQ ID NO: 437218 - DNA, 332 bp, Homo sapiens
tttaattcaagataaaacttgactcttccagaacaagtccctccctgtattttgttcttgagaggggtcagtctagaagctagatcctatcaggatgaggagcagcagcccagggcttgtctggatcagcaccaacgattttaaagaaaaaaggaagagtttcttagatgagtaattgttattgaagatagtcagtgataaccactgaccagatgctatcaatacactatgtgtcctttttagaataaagattacatatcatcattcctttggggaaaattgttattcaggtataaaaacaagagatcataataaaaacctaaaagaaccta

SEQ ID NO: 437219 - DNA, 555 bp, Homo sapiens
aactccttgattcttctccacaggtctgcttagcacgtatgtacctaccttgctgcataatggagaaatctctacttaaccagttttgttttgtttttgtgtaatgagaaggatctctaaatgaccatttgttgcagagcccccagctccatagaatctctgtctgccacaggtgtaaccctttagtaaacctgaactatgctgtgctgctgtacaaccagggcgagaagaagaacgccctggcccaatatcaggagatggagaagaaagtcagcctactcaaggacaatagctctctggaatttgactctgagatggtggagatggctcagaagttgggagctgctctccaggttggggaggcactggtctggaccaaaccagttaaagatcccaaatcaaagcaccagaccacttcaaccagcaaacctgccagtttccagcagcctctgggctctaatcaagctctaggacaggcaatgtcttcagcagctgcatacaggacgctcccctcaggtaggaccatacagagctccatgaagacctggcaggtac

SEQ ID NO: 437220 - DNA, 639 bp, Homo sapiens
gttctcttcagactcatatgtccaacgtagtattggccacaaggggagaaaaaaaacacagggtggctaaattggcacttgtttccttaaggcgagctatgtagtaggtaacagctactcacagacttagttggatggtctatacactggtctttccaattttagcaatatgttattaagtatatcctgttatgcaatgtttaatttttactgctttatcagaagttgacacgtaaatatttttcagtgactcattgaaggcaaacttgactgttgctttatttctcagttatagtcttcccttatagttaatgggtcagtcccactggttccagaaaatatggggtttcctcttgaactctaacagcaaaaaagaatgatttcttctgaaattgtggaacatgaggattcaagtttttattttgttactaggtgctggaggaacatcccagttcacaaagcccccatctcttcctctggagccagagcctgcggtggaatcaagtccaactgtggtcccagctacttgggaggttgaagtgggaggattgcttgaaccctggagattgaggctgcagtgagccatgattgtgccactgcactccagcctgggcaatagaatgagaccctctctcctga

SEQ ID NO: 437221 - DNA, 384 bp, Homo sapiens
tagcggaacaagcaaacaagtattaaagaaaaatttgagaagccccaaattctatggaaaaaaaatttatgataaatccctacaaagagctgagtgcggtgggtagctcatgcctgtaatcccagcacttagggagggggagtattgcttgagcccaggagttcaagaccagcctgggtaacatagtgagacctacgtctctccaaaataatttaaaaaatacagaataagttagcagggcacggtgtcacatgcctgtggtcccagctacttgggaggttgaagtgggaggattgcttgaaccctggagattgaggctgcagtgagccatgattgtgccactgcactccagcctgggcaatagaatgagaccctctctcctga

SEQ ID NO: 437222 - DNA, 2581 bp, Homo sapiens
gggaactggtcgcctggggcaagtctggatacttagcagcacaggtcctgttctaggactgtagtccctcttggggtgcgctggacggagaagggagacttttcaccagtaatggctcttaccgtagtgccatctttttctgtctcgggggtttggaagagaactcaatttcctgtatctactgagtctcaaaaaccccggcagaaaaaagctccagagtttcctattttggagaagcagaactggttgattcatcttcattatatccggaaagattatgaagcctgcaaggctgttatcaaagaacagcttcaagagactcagggattgtgtgaatatgctatctatgtccaagcattgatatttcgcctagaaggaaatatccaagaatccctagaactcttccagacatgtgcagttcttagtcctcagagtgctgataacctcaagcaggtggccagatctttatttcttttgggaaaacataaagctgccattgaagtatataatgaagcagctaaactcaaccagaaagattgggagatcagccataacctaggagtttgctacatatacctgaagcagttcaacaaggcacaagaccagttgcacaatgccctgaatcttaataggcacgatctgacttatataatgctggggaagatccacttgctggagggagacttggacaaggccattgaagtctacaagaaagcagtggagttctcaccagaaaatacagagcttcttacaactttaggattactctacttacagctcggcatttaccagaaggcatttgaacatcttggcaatgcactgacttatgaccctaccaactacaaggccatcttggcagcaggcagcatgatgcagacccacggggactttgatgttgccctcaccaaatacagagttgtggcttgtgctgttccagaaagtcctccactctggaataacattggaatgtgtttctttggcaagaagaaatatgtggcggccatcagctgcctgaaacgagccaactacttggcacccttcgattggaagattctgtataatttgggccttgtccatttgaccatgcagcagtatgcatcagcttttcattttctcagtgcggccatcaacttccagccaaagatgggggagctctacatgctcttggcagtggctctgaccaatctggaagatacagaaaatgccaagagagcctacgcagaagcagtccacctggataagtgtaaccctttagtaaacctgaactatgctgtgctgctgtacaaccagggcgagaagaagaacgccctggcccaatatcaggagatggagaagaaagtcagcctactcaaggacaatagctctctggaatttgactctgagatggtggagatggctcagaagttgggagctgctctccaggttggggaggcactggtctggaccaaaccagttaaagatcccaaatcaaagcaccagaccacttcaaccagcaaacctgccagtttccagcagcctctgggctctaatcaagctctaggacaggcaatgtcttcagcagctgcatacaggacgctcccctcaggtgctggaggaacatcccagttcacaaagcccccatctcttcctctggagccagagcctgcggtggaatcaagtccaactgaaacatcagaacaaataagagagaaataagaatagaatgaatgaccccaaaatagggttttcttgggcgaggatgtgctggattaggaaaggtgacatgacacaggcagagcagagtggcacccaccacagaatacagtgtgtgttattacgaggagccagcagttgagcctaaggtccttctacctacctggtattggcatttgaggtcggaaaccctctactgccccataagccaggaaaagtgaaaagagaacacagttcctttaagaactggcagcaaggcttgaggccttatgtatgtagctgagtcagcaaggtacatgatgctgtctgctttcaaaaggacttttctctcctagctgactgactccttccttagttcaaggaacagctgagacagacctctgctgagtagctctgtgatgacaaagccttggtttaactgaggtgatcctcaggttgtgaggtttattagtccccaaggcaaacacaaatattagattaataatccaactttaatagtatacatttaaaagaaaaaaaacaaaagccctggaagttgaggccaagcctgctgagtattgcagctgcatttgcccaaagggaatccagaacaagtccctccctgtattttgttcttgagaggggtcagtctagaagctagatcctatcaggatgaggagcagcagcccagggcttgtctggatcagcaccaacgattttaaagaaaaaaggaagagtttcttagatgagtaattgttattgaagatagtcagtgataaccactgaccagatgctatcaatacactatgtgtcctttttagaataaagattacatatcatcattcctttggggaaaattgttattcaggtataaaaacaagagatcataataaaaacctaaaagaaccta

SEQ ID NO: 437223 - DNA, 2398 bp, Homo sapiens
gcagcggtgggctgagctaaaatggctgaggagagagtcgcgacgagaactcaatttcctgtatctactgagtctcaaaaaccccggcagaaaaaagctccagagtttcctattttggagaagcagaactggttgattcatcttcattatatccggaaagattatgaagcctgcaaggctgttatcaaagaacagcttcaagagactcagggattgtgtgaatatgctatctatgtccaagcattgatatttcgcctagaaggaaatatccaagaatccctagaactcttccagacatgtgcagttcttagtcctcagagtgctgataacctcaagcaggtggccagatctttatttcttttgggaaaacataaagctgccattgaagtatataatgaagcagctaaactcaaccagaaagattgggagatcagccataacctaggagtttgctacatatacctgaagcagttcaacaaggcacaagaccagttgcacaatgccctgaatcttaataggcacgatctgacttatataatgctggggaagatccacttgctggagggagacttggacaaggccattgaagtctacaagaaagcagtggagttctcaccagaaaatacagagcttcttacaactttaggattactctacttacaggccatcttggcagcaggcagcatgatgcagacccacggggactttgatgttgccctcaccaaatacagagttgtggcttgtgctgttccagaaagtcctccactctggaataacattggaatgtgtttctttggcaagaagaaatatgtggcggccatcagctgcctgaaacgagccaactacttggcacccttcgattggaagattctgtataatttgggccttgtccatttgaccatgcagcagtatgcatcagcttttcattttctcagtgcggccatcaacttccagccaaagatgggggagctctacatgctcttggcagtggctctgaccaatctggaagatacagaaaatgccaagagagcctacgcagaagcagtccacctggataagtgtaaccctttagtaaacctgaactatgctgtgctgctgtacaaccagggcgagaagaagaacgccctggcccaatatcaggagatggagaagaaagtcagcctactcaaggacaatagctctctggaatttgactctgagatggtggagatggctcagaagttgggagctgctctccaggttggggaggcactggtctggaccaaaccagttaaagatcccaaatcaaagcaccagaccacttcaaccagcaaacctgccagtttccagcagcctctgggctctaatcaagctctaggacaggcaatgtcttcagcagctgcatacaggacgctcccctcaggtgctggaggaacatcccagttcacaaagcccccatctcttcctctggagccagagcctgcggtggaatcaagtccaactgaaacatcagaacaaataagagagaaataagaatagaatgaatgaccccaaaatagggttttcttgggcgaggatgtgctggattaggaaaggtgacatgacacaggcagagcagagtggcacccaccacagaatacagtgtgtgttattacgaggagccagcagttgagcctaaggtccttctacctacctggtattggcatttgaggtcggaaaccctctactgccccataagccaggaaaagtgaaaagagaacacagttcctttaagaactggcagcaaggcttgaggccttatgtatgtagctgagtcagcaaggtacatgatgctgtctgctttcaaaaggacttttctctcctagctgactgactccttccttagttcaaggaacagctgagacagacctctgctgagtagctctgtgatgacaaagccttggtttaactgaggtgatcctcaggttgtgaggtttattagtccccaaggcaaacacaaatattagattaataatccaactttaatagtatacatttaaaagaaaaaaaacaaaagccctggaagttgaggccaagcctgctgagtattgcagctgcatttgcccaaagggaatccagaacaagtccctccctgtattttgttcttgagaggggtcagtctagaagctagatcctatcaggatgaggagcagcagcccagggcttgtctggatcagcaccaacgattttaaagaaaaaaggaagagtttcttagatgagtaattgttattgaagatagtcagtgataaccactgaccagatgctatcaatacactatgtgtcctttttagaataaagattacatatcatcattcctttggggaaaattgttattcaggtataaaaacaagagatcataataaaaacctaaaagaaccta

SEQ ID NO: 437224 - DNA, 2412 bp, Homo sapiens
gcagcggtgggctgagctaaaatggctgaggagagagtcgcgacgagaactcaatttcctgtatctactgagtctcaaaaaccccggcagaaaaaagctccagagtttcctattttggagaagcagaactggttgattcatcttcattatatccggaaagattatgaagcctgcaaggctgttatcaaagaacagcttcaagagactcagggattgtgtgaatatgctatctatgtccaagcattgatatttcgcctagaaggaaatatccaagaatccctagaactcttccagacatgtgcagttcttagtcctcagagtgctgataacctcaagcaggtggccagatctttatttcttttgggaaaacataaagctgccattgaagtatataatgaagcagctaaactcaaccagaaagattgggagatcagccataacctaggagtttgctacatatacctgaagcagttcaacaaggcacaagaccagttgcacaatgccctgaatcttaataggcacgatctgacttatataatgctggggaagatccacttgctggagggagacttggacaaggccattgaagtctacaagaaagcagtggactcggcatttaccagaaggcatttgaacatcttggcaatgcactgacttatgaccctaccaactacaaggccatcttggcagcaggcagcatgatgcagacccacggggactttgatgttgccctcaccaaatacagagttgtggcttgtgctgttccagaaagtcctccactctggaataacattggaatgtgtttctttggcaagaagaaatatgtggcggccatcagctgcctgaaacgagccaactacttggcacccttcgattggaagattctgtataatttgggccttgtccatttgaccatgcagcagtatgcatcagcttttcattttctcagtgcggccatcaacttccagccaaagatgggggagctctacatgctcttggcagtggctctgaccaatctggaagatacagaaaatgccaagagagcctacgcagaagcagtccacctggataagtgtaaccctttagtaaacctgaactatgctgtgctgctgtacaaccagggcgagaagaagaacgccctggcccaatatcaggagatggagaagaaagtcagcctactcaaggacaatagctctctggaatttgactctgagatggtggagatggctcagaagttgggagctgctctccaggttggggaggcactggtctggaccaaaccagttaaagatcccaaatcaaagcaccagaccacttcaaccagcaaacctgccagtttccagcagcctctgggctctaatcaagctctaggacaggcaatgtcttcagcagctgcatacaggacgctcccctcaggtgctggaggaacatcccagttcacaaagcccccatctcttcctctggagccagagcctgcggtggaatcaagtccaactgaaacatcagaacaaataagagagaaataagaatagaatgaatgaccccaaaatagggttttcttgggcgaggatgtgctggattaggaaaggtgacatgacacaggcagagcagagtggcacccaccacagaatacagtgtgtgttattacgaggagccagcagttgagcctaaggtccttctacctacctggtattggcatttgaggtcggaaaccctctactgccccataagccaggaaaagtgaaaagagaacacagttcctttaagaactggcagcaaggcttgaggccttatgtatgtagctgagtcagcaaggtacatgatgctgtctgctttcaaaaggacttttctctcctagctgactgactccttccttagttcaaggaacagctgagacagacctctgctgagtagctctgtgatgacaaagccttggtttaactgaggtgatcctcaggttgtgaggtttattagtccccaaggcaaacacaaatattagattaataatccaactttaatagtatacatttaaaagaaaaaaaacaaaagccctggaagttgaggccaagcctgctgagtattgcagctgcatttgcccaaagggaatccagaacaagtccctccctgtattttgttcttgagaggggtcagtctagaagctagatcctatcaggatgaggagcagcagcccagggcttgtctggatcagcaccaacgattttaaagaaaaaaggaagagtttcttagatgagtaattgttattgaagatagtcagtgataaccactgaccagatgctatcaatacactatgtgtcctttttagaataaagattacatatcatcattcctttggggaaaattgttattcaggtataaaaacaagagatcataataaaaacctaaaagaaccta

SEQ ID NO: 437225 - DNA, 1943 bp, Homo sapiens
gtgctgtgccagagagccacagtgtagagtgcaaggacattcctcaggaacatttgtcccaataggttggatatatttatgtccctggaagaaattttccagtcccatctatgctgatgggcctgctgagtatagactcaggaaagctgccccactgctacagccttttgggaatgactgaatgactttctctgtgccatgttttcaggccatcttggcagcaggcagcatgatgcagacccacggggactttgatgttgccctcaccaaatacagagttgtggcttgtgctgttccagaaagtcctccactctggaataacattggaatgtgtttctttggcaagaagaaatatgtggcggccatcagctgcctgaaacgagccaactacttggcacccttcgattggaagattctgtataatttgggccttgtccatttgaccatgcagcagtatgcatcagcttttcattttctcagtgcggccatcaacttccagccaaagatgggggagctctacatgctcttggcagtggctctgaccaatctggaagatacagaaaatgccaagagagcctacgcagaagcagtccacctggataagtgtaaccctttagtaaacctgaactatgctgtgctgctgtacaaccagggcgagaagaagaacgccctggcccaatatcaggagatggagaagaaagtcagcctactcaaggacaatagctctctggaatttgactctgagatggtggagatggctcagaagttgggagctgctctccaggttggggaggcactggtctggaccaaaccagttaaagatcccaaatcaaagcaccagaccacttcaaccagcaaacctgccagtttccagcagcctctgggctctaatcaagctctaggacaggcaatgtcttcagcagctgcatacaggacgctcccctcaggtgctggaggaacatcccagttcacaaagcccccatctcttcctctggagccagagcctgcggtggaatcaagtccaactgaaacatcagaacaaataagagagaaataagaatagaatgaatgaccccaaaatagggttttcttgggcgaggatgtgctggattaggaaaggtgacatgacacaggcagagcagagtggcacccaccacagaatacagtgtgtgttattacgaggagccagcagttgagcctaaggtccttctacctacctggtattggcatttgaggtcggaaaccctctactgccccataagccaggaaaagtgaaaagagaacacagttcctttaagaactggcagcaaggcttgaggccttatgtatgtagctgagtcagcaaggtacatgatgctgtctgctttcaaaaggacttttctctcctagctgactgactccttccttagttcaaggaacagctgagacagacctctgctgagtagctctgtgatgacaaagccttggtttaactgaggtgatcctcaggttgtgaggtttattagtccccaaggcaaacacaaatattagattaataatccaactttaatagtatacatttaaaagaaaaaaaacaaaagccctggaagttgaggccaagcctgctgagtattgcagctgcatttgcccaaagggaatccagaacaagtccctccctgtattttgttcttgagaggggtcagtctagaagctagatcctatcaggatgaggagcagcagcccagggcttgtctggatcagcaccaacgattttaaagaaaaaaggaagagtttcttagatgagtaattgttattgaagatagtcagtgataaccactgaccagatgctatcaatacactatgtgtcctttttagaataaagattacatatcatcattcctttggggaaaattgttattcaggtataaaaacaagagatcataataaaaacctaaaagaaccta

SEQ ID NO: 437226 - DNA, 2634 bp, Homo sapiens
aacagtgtataagcattcccttttctctgcagcctcaccaggatgttatattttgagtttttaataatagccattttgactggtgtgagatggttatctcactgtggtttcaatttgcatttctctaatcagtgatagagtttttcatatgcttgttggctgcatacatgacttcttttgaagtgtctgtttatgtcctttgcccattttaatgggattgtattcttcttgtaaatttgcttaagttccttatagatcctggatattagacctgcatggtttgcaaatattttctcccattttgtacattgtctgtttactgtgttgatagtttctttagatagctgggttctaatggaacacagaaatgtaaacagccataatgtaagagataacagcgatgctaactttacaaagtagagatggcattcaaactggatcctgaacaacaagctaaaatggaatagcacagaatggctgaggagccactgtgaagaaaggcatgcagccatgaaactgcagtgtcccttgctgttagtgggggttagtgttagagaatatgatgggagatgaatcaggaaagatattctggggtcagattatggaggtcatgcgtacagtgcaaggactttatcttagaggccatgtttgtccagctgtcttcctagatctcctcttaggtgcctggtaggagtgagtgcatagctggtggggaggtggaatgggcagggcttccagagcagctgtttttgttttatatattaggtgtcaaggaaatactgattttaaaaagtggggggagtgttttactgctaaatgaaagtgtaaagatcatggttatagatgtggggggccagtgaggattcctaagtaggatggtaatgtggtcagatttgtaaggcagtgagatacctggcagcgctgtggaaggtggaatggaggcaggtggggactttgacactggggaataaatggaaagcctaaaactacttgggcctgaacaagggcagtgtcagaaaagaaactgcaaaaaaaggatgcatagaacctggcaactgattgactgtagaagagatggttgaagatagcaccaggtatctaagctgacttagtaaactctggtgccatgagctgacagggtgaagtttactttgggggtagtctttaatactccttttgtcttctaagctgagctctccagctgcagtgctttctttgttgcagtggctctgaccaatctggaagatacagaaaatgccaagagagcctacgcagaagcagtccacctggataagtgtaaccctttagtaaacctgaactatgctgtgctgctgtacaaccagggcgagaagaagaacgccctggcccaatatcaggagatggagaagaaagtcagcctactcaaggacaatagctctctggaatttgactctgagatggtggagatggctcagaagttgggagctgctctccaggttggggaggcactggtctggaccaaaccagttaaagatcccaaatcaaagcaccagaccacttcaaccagcaaacctgccagtttccagcagcctctgggctctaatcaagctctaggacaggcaatgtcttcagcagctgcatacaggacgctcccctcaggtgctggaggaacatcccagttcacaaagcccccatctcttcctctggagccagagcctgcggtggaatcaagtccaactgaaacatcagaacaaataagagagaaataagaatagaatgaatgaccccaaaatagggttttcttgggcgaggatgtgctggattaggaaaggtgacatgacacaggcagagcagagtggcacccaccacagaatacagtgtgtgttattacgaggagccagcagttgagcctaaggtccttctacctacctggtattggcatttgaggtcggaaaccctctactgccccataagccaggaaaagtgaaaagagaacacagttcctttaagaactggcagcaaggcttgaggccttatgtatgtagctgagtcagcaaggtacatgatgctgtctgctttcaaaaggacttttctctcctagctgactgactccttccttagttcaaggaacagctgagacagacctctgctgagtagctctgtgatgacaaagccttggtttaactgaggtgatcctcaggttgtgaggtttattagtccccaaggcaaacacaaatattagattaataatccaactttaatagtatacatttaaaagaaaaaaaacaaaagccctggaagttgaggccaagcctgctgagtattgcagctgcatttgcccaaagggaatccagaacaagtccctccctgtattttgttcttgagaggggtcagtctagaagctagatcctatcaggatgaggagcagcagcccagggcttgtctggatcagcaccaacgattttaaagaaaaaaggaagagtttcttagatgagtaattgttattgaagatagtcagtgataaccactgaccagatgctatcaatacactatgtgtcctttttagaataaagattacatatcatcattcctttggggaaaattgttattcaggtataaaaacaagagatcataataaaaacctaaaagaaccta

SEQ ID NO: 437227 - DNA, 1304 bp, Homo sapiens
gcagcggtgggctgagctaaaatggctgaggagagagtcgcgacgagaactcaatttcctgtatctactgagtctcaaaaaccccggcagaaaaaagctccagagtttcctattttggagaagcagaactggttgattcatcttcattatatccggaaagattatgaagcctgcaaggctgttatcaaagaacagcttcaagagactcagggattgtgtgaatatgctatctatgtccaagcattgatatttcgcctagaaggaaatatccaagaatccctagaactcttccagacatgtgcagttcttagtcctcagagtgctgataacctcaagcaggtggccagatctttatttcttttgggaaaacataaagctgccattgaagtatataatgaagcagctaaactcaaccagaaagattgggagatcagccataacctaggagtttgctacatatacctgaagcagttcaacaaggcacaagaccagttgcacaatgccctgaatcttaataggcacgatctgacttatataatgctggggaagatccacttgctggagggagacttggacaaggccattgaagtctacaagaaagcagtggagttctcaccagaaaatacagagcttcttacaactttaggattactctacttacagctcggcatttaccagaaggcatttgaacatcttggcaatgcactgacttatgaccctaccaactacaaggccatcttggcagcaggcagcatgatgcagacccacggggactttgatgttgccctcaccaaatacagagttgtggcttgtgctgttccagaaagtcctccactctggaataacattggaatgtgtttctttggcaagaagaaatatgtggcggccatcagctgcctgaaacgagccaactacttggcacccttcgattggaagattctgtataatttgggccttgtccatttgaccatgcagcagtatgcatcagcttttcattttctcagtgcggccatcaacttccagccaaagatgggggagctctacatgctcttggcagtggctctgaccaatctggaagatacagaaaatgccaagagagcctacgcagaagcagtccacctggataagtatgcactttgttgagaatggtactggcgggggttggactctccaaagccatgaggtggtgccatacatagcattggtgctgcctgtgtcagcccagctgttcctctatggcattagtacatagcagacctcagtgtggagggatgtgtctcctaagtatgtggtggctcagcagg

SEQ ID NO: 437228 - DNA, 1471 bp, Homo sapiens
aacagtgtataagcattcccttttctctgcagcctcaccaggatgttatattttgagtttttaataatagccattttgactggtgtgagatggttatctcactgtggtttcaatttgcatttctctaatcagtgatagagtttttcatatgcttgttggctgcatacatgacttcttttgaagtgtctgtttatgtcctttgcccattttaatgggattgtattcttcttgtaaatttgcttaagttccttatagatcctggatattagacctgcatggtttgcaaatattttctcccattttgtacattgtctgtttactgtgttgatagtttctttagatagctgggttctaatggaacacagaaatgtaaacagccataatgtaagagataacagcgatgctaactttacaaagtagagatggcattcaaactggatcctgaacaacaagctaaaatggaatagcacagaatggctgaggagccactgtgaagaaaggcatgcagccatgaaactgcagtgtcccttgctgttagtgggggttagtgttagagaatatgatgggagatgaatcaggaaagatattctggggtcagattatggaggtcatgcgtacagtgcaaggactttatcttagaggccatgtttgtccagctgtcttcctagatctcctcttaggtgcctggtaggagtgagtgcatagctggtggggaggtggaatgggcagggcttccagagcagctgtttttgttttatatattaggtgtcaaggaaatactgattttaaaaagtggggggagtgttttactgctaaatgaaagtgtaaagatcatggttatagatgtggggggccagtgaggattcctaagtaggatggtaatgtggtcagatttgtaaggcagtgagatacctggcagcgctgtggaaggtggaatggaggcaggtggggactttgacactggggaataaatggaaagcctaaaactacttgggcctgaacaagggcagtgtcagaaaagaaactgcaaaaaaaggatgcatagaacctggcaactgattgactgtagaagagatggttgaagatagcaccaggtatctaagctgacttagtaaactctggtgccatgagctgacagggtgaagtttactttgggggtagtctttaatactccttttgtcttctaagctgagctctccagctgcagtgctttctttgttgcagtggctctgaccaatctggaagatacagaaaatgccaagagagcctacgcagaagcagtccacctggataagtatgcactttgttgagaatggtactggcgggggttggactctccaaagccatgaggtggtgccatacatagcattggtgctgcctgtgtcagcccagctgttcctctatggcattagtacatagcagacctcagtgtggagggatgtgtctcctaagtatgtggtggctcagcagg

SEQ ID NO: 437229 - DNA, 754 bp, Homo sapiens
gcagcggtgggctgagctaaaatggctgaggagagagtcgcgacgagaactcaatttcctgtatctactgagtctcaaaaaccccggcagaaaaaagctccagagtttcctattttggagaagcagaactggttgattcatcttcattatatccggaaagattatgaagcctgcaaggctgttatcaaagaacagcttcaagagactcagggattgtgtgaatatgctatctatgtccaagcattgatatttcgcctagaaggaaatatccaagaatccctagaactcttccagacatgtgcagttcttagtcctcagagtgctgataacctcaagcaggtggccagatctttatttcttttgggaaaacataaagctgccattgaagtatataatgaagcagctaaactcaaccagaaagattgggcattgctgcatgattttctagcagtttgctgacgagcagtctcttaccagtctgattcttgttgatttgacccctagaagctttgggtatttttttcgtcattggaattccacagtatcagcaataggcatctagttgtgtttcatgtctttttcccgtccccatctgtgtgacattcaattgactctttcattctgaagacccttgcctttctttgggtcagggcctttgagtagttctttatttttcccctccccttctctttgtgtcaattgaggattgtgtgtaaatgcaacagaaaatttgactaaacattggctttacaaa

SEQ ID NO: 437230 - DNA, 289 bp, Homo sapiens
tagctctctggaatttgactctgaggtatgtcttttattagctcccaagagtcataagtaagctctcaggagacttttaaaaatcaagcccagatcatccaaatccaaggtattacacgttcatggctgttctggctttgatgttcctagcagcatgagttcatcaattaataacagcctgagaaaaactttcctagaataataataaaaggaaattcaggcttactgagttgttattgctaattcaactcatcaaagttgaggtctgtgtctgtctgtagcttccttc

SEQ ID NO: 437231 - DNA, 2467 bp, Homo sapiens
gcagcggtgggctgagctaaaatggctgaggagagagtcgcgacgagaactcaatttcctgtatctactgagtctcaaaaaccccggcagaaaaaagctccagagtttcctattttggagaagcagaactggttgattcatcttcattatatccggaaagattatgaagcctgcaaggctgttatcaaagaacagcttcaagagactcagggattgtgtgaatatgctatctatgtccaagcattgatatttcgcctagaaggaaatatccaagaatccctagaactcttccagacatgtgcagttcttagtcctcagagtgctgataacctcaagcaggtggccagatctttatttcttttgggaaaacataaagctgccattgaagtatataatgaagcagctaaactcaaccagaaagattgggagatcagccataacctaggagtttgctacatatacctgaagcagttcaacaaggcacaagaccagttgcacaatgccctgaatcttaataggcacgatctgacttatataatgctggggaagatccacttgctggagggagacttggacaaggccattgaagtctacaagaaagcagtggagttctcaccagaaaatacagagcttcttacaactttaggattactctacttacagctcggcatttaccagaaggcatttgaacatcttggcaatgcactgacttatgaccctaccaactacaaggccatcttggcagcaggcagcatgatgcagacccacggggactttgatgttgccctcaccaaatacagagttgtggcttgtgctgttccagaaagtcctccactctggaataacattggaatgtgtttctttggcaagaagaaatatgtggcggccatcagctgcctgaaacgagccaactacttggcacccttcgattggaagattctgtataatttgggccttgtccatttgaccatgcagcagtatgcatcagcttttcattttctcagtgcggccatcaacttccagccaaagatgggggagctctacatgctcttggcagtggctctgaccaatctggaagatacagaaaatgccaagagagcctacgcagaagcagtccacctggataagtgtaaccctttagtaaacctgaactatgctgtgctgctgtacaaccagggcgagaagaagaacgccctggcccaatatcaggagatggagaagaaagtcagcctactcaaggacaatagctctctggaatttgactctgagatggtggagatggctcagaagttgggagctgctctccaggttggggaggcactggtctggaccaaaccagttaaagatcccaaatcaaagcaccagaccacttcaaccagcaaacctgccagtttccagcagcctctgggctctaatcaagctctaggacaggcaatgtcttcagcagctgcatacaggacgctcccctcaggtgctggaggaacatcccagttcacaaagcccccatctcttcctctggagccagagcctgcggtggaatcaagtccaactgaaacatcagaacaaataagagagaaataagaatagaatgaatgaccccaaaatagggttttcttgggcgaggatgtgctggattaggaaaggtgacatgacacaggcagagcagagtggcacccaccacagaatacagtgtgtgttattacgaggagccagcagttgagcctaaggtccttctacctacctggtattggcatttgaggtcggaaaccctctactgccccataagccaggaaaagtgaaaagagaacacagttcctttaagaactggcagcaaggcttgaggccttatgtatgtagctgagtcagcaaggtacatgatgctgtctgctttcaaaaggacttttctctcctagctgactgactccttccttagttcaaggaacagctgagacagacctctgctgagtagctctgtgatgacaaagccttggtttaactgaggtgatcctcaggttgtgaggtttattagtccccaaggcaaacacaaatattagattaataatccaactttaatagtatacatttaaaagaaaaaaaacaaaagccctggaagttgaggccaagcctgctgagtattgcagctgcatttgcccaaagggaatccagaacaagtccctccctgtattttgttcttgagaggggtcagtctagaagctagatcctatcaggatgaggagcagcagcccagggcttgtctggatcagcaccaacgattttaaagaaaaaaggaagagtttcttagatgagtaattgttattgaagatagtcagtgataaccactgaccagatgctatcaatacactatgtgtcctttttagaataaagattacatatcatcattcctttggggaaaattgttattcaggtataaaaacaagagatcataataaaaacctaaaagaaccta

SEQ ID NO: 437232 - DNA, 881 bp, Homo sapiens
gcagcggtgggctgagctaaaatggctgaggagagagtcgcgacgagaactcaatttcctgtatctactgagtctcaaaaaccccggcagaaaaaagctccagagtttcctattttggagaagcagaactggttgattcatcttcattatatccggaaagattatgaagcctgcaaggctgttatcaaagaacagcttcaagagactcagggattgtgtgaatatgctatctatgtccaagcattgatatttcgcctagaaggaaatatccaagaatccctagaactcttccagacatgtgcagttcttagtcctcagagtgctgataacctcaagcaggtggccagatctttatttcttttgggaaaacataaagctgccattgaagtatataatgaagcagctaaactcaaccagaaagattgggggtaagtagagaactttcagttctttcttattagtaaacttgctaatggttccatttatcatctggctgtcttatttctgaattcttacattccaaaaatgtcttgattttaacctcatacttaattcatgatttgtataagtataggatctttgctgacgagcagtctcttaccagtctgattcttgttgatttgacccctagaagctttgggtatttttttcgtcattggaattccacagtatcagcaataggcatctagttgtgtttcatgtctttttcccgtccccatctgtgtgacattcaattgactctttcattctgaagacccttgcctttctttgggtcagggcctttgagtagttctttatttttcccctccccttctctttgtgtcaattgaggattgtgtgtaaatgcaacagaaaatttgactaaacattggctttacaaa

SEQ ID NO: 437233 - DNA, 2882 bp, Homo sapiens
gcagcggtgggctgagctaaaatggctgaggagagagtcgcgacgagaactcaatttcctgtatctactgagtctcaaaaaccccggcagaaaaaagctccagagtttcctattttggagaagcagaactggttgattcatcttcattatatccggaaagattatgaagcctgcaaggctgttatcaaagaacagcttcaagagactcagggattgtgtgaatatgctatctatgtccaagcattgatatttcgcctagaaggaaatatccaagaatccctagaactcttccagacatgtgcagttcttagtcctcagagtgctgataacctcaagcaggtggccagatctttatttcttttgggaaaacataaagctgccattgaagtatataatgaagcagctaaactcaaccagaaagattgggagatcagccataacctaggagtttgctacatatacctgaagcagttcaacaaggcacaagaccagttgcacaatgccctgaatcttaataggcacgatctgacttatataatgctggggaagatccacttgctggagggagacttggacaaggccattgaagtctacaagaaagcagtggagttctcaccagaaaatacagagcttcttacaactttaggattactctacttacagctcggcatttaccagaaggcatttgaacatcttggcaatgcactgacttatgaccctaccaactacaaggccatcttggcagcaggcagcatgatgcagacccacggggactttgatgttgccctcaccaaatacagagttgtggcttgtgctgttccagaaagtcctccactctggaataacattggaatgtgtttctttggcaagaagaaatatgtggcggccatcagctgcctgaaacgagccaactacttggcacccttcgattggaagattctgtataatttgggccttgtccatttgaccatgcagcagtatgcatcagcttttcattttctcagtgcggccatcaacttccagccaaagatgggggagctctacatgctcttggcagtggctctgaccaatctggaagatacagaaaatgccaagagagcctacgcagaagcagtccacctggataagtgtaaccctttagtaaacctgaactatgctgtgctgctgtacaaccagggcgagaagaagaacgccctggcccaatatcaggagatggagaagaaagtcagcctactcaaggacaatagctctctggaatttgactctgagatggtggagatggctcagaagttgggagctgctctccaggttggggaggcactggtctggaccaaaccagttaaagatcccaaatcaaagcaccagaccacttcaaccagcaaacctgccagtttccagcagcctctgggctctaatcaagctctaggacaggcaatgtcttcagcagctgcatacaggacgctcccctcaggtgctggaggaacatcccagttcacaaagcccccatctcttcctctggagccagagcctgcggtggaatcaagtccaactgaaacatcagaacaaataagagagaaataagaatagaatgaatgaccccaaaatagggttttcttgggcgaggatgtgctggattaggaaaggtgacatgacacaggcagagcagagtggcacccaccacagaatacagtgtgtgttattacgaggagccagcagttgagcctaaggtccttctacctacctggtattggcatttgaggtcggaaaccctctactgccccataagccaggaaaagtgaaaagagaacacagttcctttaagaactggcagcaaggcttgaggccttatgtatgtagctgagtcagcaaggtacatgatgctgtctgctttcaaaaggacttttctctcctagctgactgactccttccttagttcaaggaacagctgagacagacctctgctgagtagctctgtgatgacaaagccttggtttaactgaggtgatcctcaggttgtgaggtttattagtccccaaggcaaacacaaatattagattaataatccaactttaatagtatacatttaaaagaaaaaaaacaaaagccctggaagttgaggccaagcctgctgagtattgcagctgcatttgcccaaagggaatccagaacaagtccctccctgtattttgttcttgagaggggtcagtctagaagctagatcctatcaggatgaggagcagcagcccagggcttgtctggatcagcaccaacgattttaaagaaaaaaggaagagtttcttagatgagtaattgttattgaagatagtcagtgataaccactgaccagatgctatcaatacactatgtgtcctttttagaataaagattacatatcatcattcctttggggaaaattgttattcaggtataaaaacaagagatcataataaaaacctaaaagaacctaaaaaaaaaaaaaaaaaaaaaaaaaaaagaaaaaaaaaaaaaaagacaaacacaaagaagaaaaaaaaacaaaacaaaagaaacacaaaataaaagcaatacaaaatagaaagacaaacagaaaagagagagagagaagtaagagagaggagacgagatcaagtaagcagagaagaaggagataagagaagcgaaagataacagaaaacaagacacagaaagcacaaagagacaaagagagagacaacaagacagaagaacaagcaagaagagaggctcggaacaaccgagataagaactcggcggggtgcgagaattacaaaaacgagaccaaagagaatatgcagacaaaacgaagaacaagagcagcaggctaaacggagcagaaagacatagaaaaatacaaaagggagaaa

SEQ ID NO: 437234 - DNA, 2355 bp, Homo sapiens
gcagcggtgggctgagctaaaatggctgaggagagagtcgcgacgagaactcaatttcctgtatctactgagtctcaaaaaccccggcagaaaaaagctccagagtttcctattttggagaagcagaactggttgattcatcttcattatatccggaaagattatgaagcctgcaaggctgttatcaaagaacagcttcaagagactcagggattgtgtgaatatgctatctatgtccaagatttcttttgggaaaacataaagctgccattgaagtatataatgaagcagctaaactcaaccagaaagattgggagatcagccataacctaggagtttgctacatatacctgaagcagttcaacaaggcacaagaccagttgcacaatgccctgaatcttaataggcacgatctgacttatataatgctggggaagatccacttgctggagggagacttggacaaggccattgaagtctacaagaaagcagtggagttctcaccagaaaatacagagcttcttacaactttaggattactctacttacagctcggcatttaccagaaggcatttgaacatcttggcaatgcactgacttatgaccctaccaactacaaggccatcttggcagcaggcagcatgatgcagacccacggggactttgatgttgccctcaccaaatacagagttgtggcttgtgctgttccagaaagtcctccactctggaataacattggaatgtgtttctttggcaagaagaaatatgtggcggccatcagctgcctgaaacgagccaactacttggcacccttcgattggaagattctgtataatttgggccttgtccatttgaccatgcagcagtatgcatcagcttttcattttctcagtgcggccatcaacttccagccaaagatgggggagctctacatgctcttggcagtggctctgaccaatctggaagatacagaaaatgccaagagagcctacgcagaagcagtccacctggataagtgtaaccctttagtaaacctgaactatgctgtgctgctgtacaaccagggcgagaagaagaacgccctggcccaatatcaggagatggagaagaaagtcagcctactcaaggacaatagctctctggaatttgactctgagatggtggagatggctcagaagttgggagctgctctccaggttggggaggcactggtctggaccaaaccagttaaagatcccaaatcaaagcaccagaccacttcaaccagcaaacctgccagtttccagcagcctctgggctctaatcaagctctaggacaggcaatgtcttcagcagctgcatacaggacgctcccctcaggtgctggaggaacatcccagttcacaaagcccccatctcttcctctggagccagagcctgcggtggaatcaagtccaactgaaacatcagaacaaataagagagaaataagaatagaatgaatgaccccaaaatagggttttcttgggcgaggatgtgctggattaggaaaggtgacatgacacaggcagagcagagtggcacccaccacagaatacagtgtgtgttattacgaggagccagcagttgagcctaaggtccttctacctacctggtattggcatttgaggtcggaaaccctctactgccccataagccaggaaaagtgaaaagagaacacagttcctttaagaactggcagcaaggcttgaggccttatgtatgtagctgagtcagcaaggtacatgatgctgtctgctttcaaaaggacttttctctcctagctgactgactccttccttagttcaaggaacagctgagacagacctctgctgagtagctctgtgatgacaaagccttggtttaactgaggtgatcctcaggttgtgaggtttattagtccccaaggcaaacacaaatattagattaataatccaactttaatagtatacatttaaaagaaaaaaaacaaaagccctggaagttgaggccaagcctgctgagtattgcagctgcatttgcccaaagggaatccagaacaagtccctccctgtattttgttcttgagaggggtcagtctagaagctagatcctatcaggatgaggagcagcagcccagggcttgtctggatcagcaccaacgattttaaagaaaaaaggaagagtttcttagatgagtaattgttattgaagatagtcagtgataaccactgaccagatgctatcaatacactatgtgtcctttttagaataaagattacatatcatcattcctttggggaaaattgttattcaggtataaaaacaagagatcataataaaaacctaaaagaaccta

SEQ ID NO: 437235 - DNA, 1868 bp, Homo sapiens
  misc_feature (66)..(66): n is a, c, g, or t
agcagcctgctgaggaacagtgtttcttacatcattcctccacccctagttttttgtagggagggngagtggatggggctttggaccctccatagctcccaaacggtcctgtgtcatattgggcttcccgtaagactgtattttataaaaacgcgctgtggaaggtggaatggaggcaggtggggactttgacactggggaataaatggaaagcctaaaactacttgggcctgaacaagggcagtgtcagaaaagaaactgcaaaaaaaggatgcatagaacctggcaactgattgactgtagaagagatggttgaagatagcaccaggtatctaagctgacttagtaaactctggtgccatgagctgacagggtgaagtttactttgggggtagtctttaatactccttttgtcttctaagctgagctctccagctgcagtgctttctttgttgcagtggctctgaccaatctggaagatacagaaaatgccaagagagcctacgcagaagcagtccacctggataagtgtaaccctttagtaaacctgaactatgctgtgctgctgtacaaccagggcgagaagaagaacgccctggcccaatatcaggagatggagaagaaagtcagcctactcaaggacaatagctctctggaatttgactctgagatggtggagatggctcagaagttgggagctgctctccaggttggggaggcactggtctggaccaaaccagttaaagatcccaaatcaaagcaccagaccacttcaaccagcaaacctgccagtttccagcagcctctgggctctaatcaagctctaggacaggcaatgtcttcagcagctgcatacaggacgctcccctcaggtgctggaggaacatcccagttcacaaagcccccatctcttcctctggagccagagcctgcggtggaatcaagtccaactgaaacatcagaacaaataagagagaaataagaatagaatgaatgaccccaaaatagggttttcttgggcgaggatgtgctggattaggaaaggtgacatgacacaggcagagcagagtggcacccaccacagaatacagtgtgtgttattacgaggagccagcagttgagcctaaggtccttctacctacctggtattggcatttgaggtcggaaaccctctactgccccataagccaggaaaagtgaaaagagaacacagttcctttaagaactggcagcaaggcttgaggccttatgtatgtagctgagtcagcaaggtacatgatgctgtctgctttcaaaaggacttttctctcctagctgactgactccttccttagttcaaggaacagctgagacagacctctgctgagtagctctgtgatgacaaagccttggtttaactgaggtgatcctcaggttgtgaggtttattagtccccaaggcaaacacaaatattagattaataatccaactttaatagtatacatttaaaagaaaaaaaacaaaagccctggaagttgaggccaagcctgctgagtattgcagctgcatttgcccaaagggaatccagaacaagtccctccctgtattttgttcttgagaggggtcagtctagaagctagatcctatcaggatgaggagcagcagcccagggcttgtctggatcagcaccaacgattttaaagaaaaaaggaagagtttcttagatgagtaattgttattgaagatagtcagtgataaccactgaccagatgctatcaatacactatgtgtcctttttagaataaagattacatatcatcattcctttggggaaaattgttattcaggtataaaaacaagagatcataataaaaacctaaaagaaccta

SEQ ID NO: 437236 - DNA, 862 bp, Homo sapiens
gcagcggtgggctgagctaaaatggctgaggagagagtcgcgacgagaactcaatttcctgtatctactgagtctcaaaaaccccggcagaaaaaagctccagagtttcctattttggagaagcagaactggttgattcatcttcattatatccggaaagattatgaagcctgcaaggctgttatcaaagaacagcttcaagagactcagggattgtgtgaatatgctatctatgtccaagcattgatatttcgcctagaaggaaatatccaagaatccctagaactcttccagacatgtgcagttcttagtcctcagagtgctgataacctcaagcaggtggccagatctttgggtaagtagagaactttcagttctttcttattagtaaacttgctaatggttccatttatcatctggctgtcttatttctgaattcttacattccaaaaatgtcttgattttaacctcatacttaattcatgatttgtataagtataggatcaaaaaccatgtttcctcataactttgcaggcattgctgcatgattttctagcagtttgctgacgagcagtctcttaccagtctgattcttgttgatttgacccctagaagctttgggtatttttttcgtcattggaattccacagtatcagcaataggcatctagttgtgtttcatgtctttttcccgtccccatctgtgtgacattcaattgactctttcattctgaagacccttgcctttctttgggtcagggcctttgagtagttctttatttttcccctccccttctctttgtgtcaattgaggattgtgtgtaaatgcaacagaaaatttgactaaacattggctttacaaa

SEQ ID NO: 437237 - DNA, 2796 bp, Homo sapiens
  misc_feature (2620)..(2620): n is a, c, g, or t
  misc_feature (2699)..(2700): n is a, c, g, or t
gagacagatgagtggctgcctcctgcacggatactaggatctaggttatccctgaggagaggatgatcttatacctaagaactactatatactcactctggacgttatatgctattgaagtttactgccccattgtcgtgaccattctgttcacagttgggccggctttacagcagttgtggtttgtatcaagatgggaactcaaacaagtcattcctcctaaggagctggtgtcttcatccagaagggacagtttgtgccagctctccagagagaaaagaacacggctggcagatccagctcctcgtatagtgccttcacccgggccaccttctcggcctccttctgcctgtaattttccttcaggatctggtactgttctggagtggcctgtagcagacactgaaccaccagccagctgcatttgttgtcctggaagtcattgccaactctgccagtcacactggggtccccaaagaagttcacagatctgccggaggcgctgggcaatgaccccgggactccaggccagaggggtctgaagctgtttgggaaagcagcgggactccttgggaagatggtcatggccccaagcccttccctggtgcaggtgtacaccagccccgcagctgtggctatggcaggatgggctgggcacctggcacccctacagtgccaccatctgcagcttcatcgagcagcagtttgtccagcagaagggccaacgttttgggcttgggagcctggcccacagcatccccttgggccaggcagacccctcgctggtccgttacattattgacctccccagctggacccagttccgccaggacaccggcaccacgcggactgtgcggagacacctgttcccccagcactcagcccctggccgaggtgtcgtctgggagtggctgagcgacgatggctcctggaccgcctatgaagccggcgtctgtgacgatctggagcagcaggtggccaggggcaaccagctcgtggacttggcccccctggggtacaactacactgtcaactacaccacccacacgcagaccaacaagacttccagcttctgctgcagcgtgcggcgccaagcagggccgccttacccagtgaccaccatcatcgctccgccgggccacacaggcgtcgcctgctcttgccaccagtgcctcagtggcagcagaactggccctgtgtcaggccgctaccgccactccatgaccaacctccctgcataccccgtcccccagcaccccccccacaggaccgcttctgtgtttgggacccaccaggcctttgcaccgtacaacaaaccctcactctccggggcccggtctgcgcccaggctgaacaccacgaacgcctgggacgcagctcctccttccctggggagccagcccctctaccgctccagcctctcccacctgggaccgcagcacctgcccccaggatcctccacctccggtgcagtcagtgcctccctccccagcggtccctcaagcagcccagggagcgtccctgccactgtgcccatgcagatgccaaagcccagcagagtccagcaggcgctcgcaggagcgaccccgaagccagagccagagccagagcaggtcataaaaaactacacggaagagctgaaagtgcccccagatgaggactgcatcatctgcatggagaagctgtccgcagcgtctggatacagcgatgtgactgacagcaaggcaatcgggcccctggctgtgggctgcctcaccaagtgcagccacgccttccacctgctgtgcctcctggccatgtactgcaacggcaataagggccctgagcaccccaatcccggaaagccgttcactgccagagggtttccccgccagtgctaccttccagacaacgcccagggccgcaagcctccaggggcttccagaacccggagacactggctgacattccggcctccccacagctgctgaccgatggccactacatgacgctgcccgtgtctccggaccagctgccctgtgacgaccccatggcgggcagcggtggtgcccccgtgctgcgggtgggccatgaccacggctgccaccagcagcccttctgcaacgcgcccctccctggccctggaccctatcgtacagaacctgctaaggccatcaaacctattgatcggaagtcagtccatcagatttgctctgggccagtggtactgagtctaagcactggatgaagaagatagtagaaaacagtctggatgctggtgccactaatgttgatctaaagcttaaggactatggaatggatctcattgaagtttcaggcaatggatgtggggtagaagaagaaaacttcgaaggcttaatgatgtcaccatttctacctgccacgtatcggcgaaggttgggactcgactggtgtttgatcacgatgggaaaatcatccagaaaaccccctacccccaccccagagggaccacagtcagcgtgaagcagttattttctacgctacctgtgcgccataaggaatttcaaaggaatattaagaagaaacgtgcctgcttccccttcgccttctgccgtgattgtcagcttcttgagggctccccagccatgcttcctgtacngcctgcaaaactgactcctagaagtaccccaccccacccctgctccttggaggacaacgtgatcactgtattcagctcnntcaagaatggtccaggttcttctagatgatctgcacaaatggttcctctcctccttcctgatgtctgccattagcattggaataaagttcctgctg

SEQ ID NO: 437238 - DNA, 1981 bp, Homo sapiens
gagacagatgagtggctgcctcctgcacggatactaggatctaggttatccctgaggagaggatgatcttatacctaagaactactatatactcactctggacgttatatgctattgaagtttactgccccattgtcgtgaccattctgttcacagttgggccggctttacagcagttgtggtttgtatcaagatgggaactcaaacaagtcattcctcctaaggagctggtgtcttcatccagaagggacagtttgtgccagctctccagagagaaaagaacacggctggcagatccagctcctcgtatagtgccttcacccgggccaccttctcggcctccttctgcctgtaattttccttcaggatctggtactgttctggagtggcctgtagcagacactgaaccaccagccagctgcatttgttgtcctggaagtcattgccaactctgccagtcacactggggtccccaaagaagttcacagatctgccggaggcgctgggcaatgaccccgggactccaggccagaggggtctgaagctgtttgggaaagcagcgggactccttgggaagatggtcatggccccaagcccttccctggtgcaggtgtacaccagccccgcagctgtggctatggcaggatgggctgggcacctggcacccctacagtgccaccatctgcagcttcatcgagcagcagtttgtccagcagaagggccaacgttttgggcttgggagcctggcccacagcatccccttgggccaggcagacccctcgctggtccgttacattattgacctccccagctggacccagttccgccaggacaccggcaccacgcggactgtgcggagacacctgttcccccagcactcagcccctggccgaggtgtcgtctgggagtggctgagcgacgatggctcctggaccgcctatgaagccggcgtctgtgacgatctggagcagcaggtggccaggggcaaccagctcgtggacttggcccccctggggtacaactacactgtcaactacaccacccacacgcagaccaacaagacttccagcttctgctgcagcgtgcggcgccaagcagggccgccttacccagtgaccaccatcatcgctccgccgggccacacaggcgtcgcctgctcttgccaccagtgcctcagtggcagcagaactggccctgtgtcaggccgctaccgccactccatgaccaacctccctgcataccccgtcccccagcaccccccccacaggaccgcttctgtgtttgggacccaccaggcctttgcaccgtacaacaaaccctcactctccggggcccggtctgcgcccaggctgaacaccacgaacgcctgggacgcagctcctccttccctggggagccagcccctctaccgctccagcctctcccacctgggaccgcagcacctgcccccaggatcctccacctccggtgcagtcagtgcctccctccccagcggtccctcaagcagcccagggagcgtccctgccactgtgcccatgcagatgccaaagcccagcagagtccagcaggcgctcgcaggagcgaccccgaagccagagccagagccagagcaggtcataaaaaactacacggaagagctgaaagtgcccccagatgaggactgcatcatctgcatggagaagctgtccgcagcgtctggatacagcgatgtgactgacagcaaggcaatcgggcccctggctgtgggctgcctcaccaagtgcagccacgccttccacctgctgtgcctcctggccatgtactgcaacggcaataagggccctgagcaccccaatcccggaaagccgttcactgccagagggtttccccgccagtgctaccttccagacaacgcccagggccgcaaggtgagtgccaccatgagccccgggggtggacggggccctgaccaggcggcaggaggccaggcgccacactggac

SEQ ID NO: 437239 - DNA, 1408 bp, Homo sapiens
  misc_feature (1232)..(1232): n is a, c, g, or t
  misc_feature (1311)..(1312): n is a, c, g, or t
gccacagcagggtgtgcgtcgaggaaccttgggttgggagtggcagggccaggcgtgtgggtgtcaggagcccaggcacaaggccccagagtcccagaggagactcagatgggccctagccctttcggtctcctgtcttgagccaaggtggatcgtagggcctggtgcagggtgggaagataacggggcagcaggcagcgggcactggctgccagccaaggtccacctgtggtggatggaggcttctttttgtcttgttgaaccatgagcctttcccctggtttccctccacttctccacagctcagagggaaattcaggaacattcggggttggcatctcggagcgggggaggagctggagctgtgcaggggcctgtccctgtgcgggctctcggagcaccctatcctggtgtctgttcctcccgcagggccctgagcaccccaatcccggaaagccgttcactgccagagggtttccccgccagtgctaccttccagacaacgcccagggccgcaagcctccaggggcttccagaacccggagacactggctgacattccggcctccccacagctgctgaccgatggccactacatgacgctgcccgtgtctccggaccagctgccctgtgacgaccccatggcgggcagcggtggtgcccccgtgctgcgggtgggccatgaccacggctgccaccagcagcccttctgcaacgcgcccctccctggccctggaccctatcgtacagaacctgctaaggccatcaaacctattgatcggaagtcagtccatcagatttgctctgggccagtggtactgagtctaagcactggatgaagaagatagtagaaaacagtctggatgctggtgccactaatgttgatctaaagcttaaggactatggaatggatctcattgaagtttcaggcaatggatgtggggtagaagaagaaaacttcgaaggcttaatgatgtcaccatttctacctgccacgtatcggcgaaggttgggactcgactggtgtttgatcacgatgggaaaatcatccagaaaaccccctacccccaccccagagggaccacagtcagcgtgaagcagttattttctacgctacctgtgcgccataaggaatttcaaaggaatattaagaagaaacgtgcctgcttccccttcgccttctgccgtgattgtcagcttcttgagggctccccagccatgcttcctgtacngcctgcaaaactgactcctagaagtaccccaccccacccctgctccttggaggacaacgtgatcactgtattcagctcnntcaagaatggtccaggttcttctagatgatctgcacaaatggttcctctcctccttcctgatgtctgccattagcattggaataaagttcctgctg

SEQ ID NO: 437240 - DNA, 240 bp, Homo sapiens
taccggtgtgagccaccacacccctcctgagtctctctgaattgcccaggaaaacaaaaccaaaggcctccacacaggcacccaaggagcgtaaaagcgcgaaggcacctcagtgactcccacttggccatgacgcagtgtttctccagctctcgtttccaataagtcagcggtgtgcagtaagctctgctcttttctcccccagtgcctccctccccagcggtccctcaagcagcccag

SEQ ID NO: 437241 - DNA, 267 bp, Homo sapiens
cgtcccgcacactggcctccctgtctgggcccctctcgcatttcctcctggcagcttagacctcttccttgccttcctcgccctctggcctcctctccagcctgtgctcctcaggacgctgcttatgtacttctctcttctaggagcgaccccgaagccagagccagagccagagcaggtcataaaaaactacacggaagagctgaaagtgcccccagatgaggtttgtgtcttgggaccttggctgcctttgtttctgtttggaaa

SEQ ID NO: 437242 - DNA, 274 bp, Homo sapiens
caccccagcccaccagccctcccgcctcccgtctggcttccaaaagtcacggctcagttaagagattgaggaaaatgtccgtgaaaggagcgaccccgaagccagagccagagccagagcaggtcataaaaaactacacggaagagctgcttcgggcccccggtgctcggggcctggtgtggggcgagtaaagacttccccagcctggacgggcgtgggttctgggtcagcttcttttacctcaattttgtttgcaataaatgctctacagcca

SEQ ID NO: 437243 - DNA, 1688 bp, Homo sapiens
  misc_feature (68)..(68): n is a, c, g, or t
  misc_feature (117)..(117): n is a, c, g, or t
  misc_feature (1512)..(1512): n is a, c, g, or t
  misc_feature (1591)..(1592): n is a, c, g, or t
ctcgtacctgcttgattctgccctgcctcccaagttggattacagcatgagacaccaacccgtctgtnactctctctcagttccaggcagagggacctgggctccaccgtggtgggntttttttgtttgtttgtgtgttttgttttgttttgttttggagacggagtcttgctctgtcacccaaactggagggcagtggcaagatctcggctcactgcaacctccaccttctgggttcaagtgattctcctgcttcagcctcccgagtagctgggattataggcacctgccaacacgcccagctaatttttgtattcttagtagagatggggttttcccgtgttggccaggctggcctcaaattcctgacctcaagtgatcggcctcccagagtgctgggattacaggcctgagccactgcgcctggcctcggaattgactttgactgcacttccagcatttcagcacatgaaagcctctttttccaagactggcccacgtcagcccagcccactgttggcaagcatgacccgtgtttggtctcctccaggactgcatcatctgcatggagaagctgtccgcagcgtctggatacagcgatgtgactgacagcaaggcaatcgggcccctggctgtgggctgcctcaccaagtgcagccacgccttccacctgctgtgcctcctggccatgtactgcaacggcaataagggccctgagcaccccaatcccggaaagccgttcactgccagagggtttccccgccagtgctaccttccagacaacgcccagggccgcaagcctccaggggcttccagaacccggagacactggctgacattccggcctccccacagctgctgaccgatggccactacatgacgctgcccgtgtctccggaccagctgccctgtgacgaccccatggcgggcagcggtggtgcccccgtgctgcgggtgggccatgaccacggctgccaccagcagcccttctgcaacgcgcccctccctggccctggaccctatcgtacagaacctgctaaggccatcaaacctattgatcggaagtcagtccatcagatttgctctgggccagtggtactgagtctaagcactggatgaagaagatagtagaaaacagtctggatgctggtgccactaatgttgatctaaagcttaaggactatggaatggatctcattgaagtttcaggcaatggatgtggggtagaagaagaaaacttcgaaggcttaatgatgtcaccatttctacctgccacgtatcggcgaaggttgggactcgactggtgtttgatcacgatgggaaaatcatccagaaaaccccctacccccaccccagagggaccacagtcagcgtgaagcagttattttctacgctacctgtgcgccataaggaatttcaaaggaatattaagaagaaacgtgcctgcttccccttcgccttctgccgtgattgtcagcttcttgagggctccccagccatgcttcctgtacngcctgcaaaactgactcctagaagtaccccaccccacccctgctccttggaggacaacgtgatcactgtattcagctcnntcaagaatggtccaggttcttctagatgatctgcacaaatggttcctctcctccttcctgatgtctgccattagcattggaataaagttcctgctg

SEQ ID NO: 437244 - DNA, 1214 bp, Homo sapiens
gagacagatgagtggctgcctcctgcacggatactaggatctaggttatccctgaggagaggatgatcttatacctaagaactactatatactcactctggacgttatatgctattgaagtttactgccccattgtcgtgaccattctgttcacagttgggccggctttacagcagttgtggtttgtatcaagatgggaactcaaacaagtcattcctcctaaggagctggtgtcttcatccagaagggacagtttgtgccagctctccagagagaaaagaacacggctggcagatccagctcctcgtatagtgccttcacccgggccaccttctcggcctccttctgcctgtaattttccttcaggatctggtactgttctggagtggcctgtagcagacactgaaccaccagccagctgcatttgttgtcctggaagtcattgccaactctgccagtcacactggggtccccaaagaagtcaaggtaatcatcctgaatctgaaagaactcttgaatctccagcaggatcttcttggcactggtgtgctccttcttgtcatccattcttgacatgtacatggctgcagctacaggaaggtagaaggagtagaaagctgtcttgtacttgacaacagatttgtgccttttttcggtgcatctgcgaagatccacattgccctggggggttgtgatgaggtcgagggtctgcccaatctcagtctgataagaattctgctggaagagctccatcaggttcaggtaatagggctgctcccggcaatacagcttcagcaggcagtagatacatgcttccagaaggatagcatcattgatggcatccaaacccatgcccagcttctgataccaggagatctgtccctggcaggtaagggatgaatccataatgtcatctgccaccaggaagaaagcttgcagcagttgcgcataccagcccacagtcggtgcccactggagactatcagcatccagtttcctcggctccaccagctcccggaacgctactagcaccatcaaacctcggtgatacttgcctccaatggcattgtactccaggacctccttgagccgggcagtagcatctcctgtctctgggtgccccatctcatcctcagtcagcaccctaacgatctgggagtagtgctgaacgaaatcctgctttgcttgggcataaatatctgatttctggtttc

SEQ ID NO: 437245 - DNA, 461 bp, Homo sapiens
gactaacctttggttttcctttgaaaacaggcaccacgcggactgtgcggagacacctgttcccccagcactcagcccctggccgaggtgtcgtctgggagtggctgagcgacgatggctcctggaccgcctatgaagccggcgtctgtgacgatctggagcagcaggtggccaggggcaaccagctcgtggacttggcccccctggggtacaactacactgtcaactacaccacccacacgcagaccaacaagacttccagcttctgctgcagcgtgcggcgccaagcagggccgccttacccagtgaccaccatcatcgctccgccgggccacacaggcgtcgcctgctcttgccaccagtgcctcagtggcagcagaactggccctgtgtcaggccgctaccgccactccatgaccaacctccctgcataccccgtcccccagcaccccccccacagg

SEQ ID NO: 437246 - DNA, 5209 bp, Homo sapiens
cacctccaaagctataccgttactcaccacaaagctttttaccagattctaccattcaaaaacaaaactttataccacatacatcattgcaagttaaaaatagtcagcttccaaattctgtattaactttaccatcaaggcagacctcagctgtaccatcacagcagtatgccacgcaaactgacaaaagacctcctcctcctccttacaactgtagatatggaagccagcctttgcaaagtactcagcatattactaaacacttgtctatggaagttcctcagagtcgagaaatgctgtcatctgaaataaggaccagctttcaacagcagtggcaaaaccctaatgaaaatgtcagcacaattggaaatttcactaacttgaaagtaaataccaacaacaaacagccttttaacagtcccattagatcttctgtggatggtgttcagactcttgctcaaactaatgaagagaaaataatggattcttgcaatccaacttcaaatcaagtactggacacaagtgttgcaaaagaaaagctagtaagggatattaaaacattagtagagataaaacagaagttttcagaacttgcaaggaaaattaaaatcaataaagatcttttgatggcagcaggttgtattaaaatgactaatacttcttatagtgaaccagctcagaattctaaattgtctctaaaacaaactgccaaaatccagtctggaccccagataactccagtaatgccagagaatgcagagagacaaacaccaacagtagtggaatctgcagaaacaaataagactcaatgtatgttgaattctgacattcaggaagtcaattgcagaaggtttaaccaagttgattctgttttaccaaatcctgtctattctgaaaagcggccaatgccagacccatctcatgatgtgaaagttctcacttcaaagacatcagctgttgagatgacccaggcagtattgaatactcagctttcatcagaaaatgttaccaaagttgagcaaaattcaccagcagtttgtgaaacaatttctgttcccaagtccatgtccactgaggaatataaatcaaaaattcaaaatgaaaatatgctacttctcgctttgctttcacaggcacgtaagactcagaagacagtattaaaagatgctaatcaaactattcaggattctaaaccagacagttgtgaaatgaatccaaatacccaaatgactggtaaccaactgaatttgaagaacatggaaactccaagtacttctaatgtaagtggcagggttttggacaactccttttgcagtggacaagaatcctcaacaaaaggaatgcctgctaaaagtgacagtagctgttccatggaagtgctagcaacctgtctttccctgtggaaaaagcaaccttcagatactgcaaaagaaaaggagtgtgataaactcagaacaaacacaacagcagttggaatttcaaagcctgctaacatccacgttaagagtccttgttcagttgtgggaaattcaaattctcagaataaaataagtaatccctcacagcagacagctttgtcgatggtaatgcacaattatgagtcttcaggtataaatataacaaagggaacagaacttcagatagctgtagtgtcaccgttagttctgtcagaggtcaaaacattgtctgtcaaaggaataacacctgcagtgttacctgaaacagtgtatcccgttattaaagaaggcagtgtttgtagtttacaaaatcaattggcagaaaatgcaaaggcaactgctgctttgaaagttgatgttagtggaccagtagcaagtacagcaacatcaaccaagatttttccactaactcagaaggaaaagcagaatgagtcaactaatggtaattcagaagtcacacctaatgtcaatcaaggaaagcataacaaattagagtcagctatccattctcctatgaacgatcagcaaatctcacaggagtcaaggaatagtactgttgtgagtagtgatacattacagattgacaatatttgttctctggttgaaggtgatacctcttacaattcccaaatagcaaagatattcagctctcttcccttgaaaatggttgagccacagaaaccttctctacccaatcagcaagggattggcagcagagaaccagaaaaacaattagataataccactgaaaataaagactttggttttcaaaaagataaacctgtacagtgcacagatgtttcacataaaatatgtgatcagtcaaagtcagagccacccttagagtcatcttttaacaatcttgaaacaaacagagttattctagagaaaagtagtttggagcatgccactgaaaaaagcacagctaacgatacgtgctcgtcagctgctattcaggaggatatttaccctcaggaaatagatgcatccagcaactatactccccaagatcctgcaagaaatgaaatccacagtgataaggcacctgtcttatacctacatgaccagctgtcagaacttctaaaagagtttccttatggcattgaggctgtgaatacacgtgaaggttctgtgggccagcaaactacataccagacctcagaagatcaaactgctgataaaaccagttctgactccaaagacccagcagatcaaatacaaattacaatattaagctcagagcaaatgaaagaaatatttcctgaacaggatgatcaaccctatgtagtagacaagttggcagaacctcagaaagaagagcccatcacagaagtagttagccagtgtgacctgcaggcacctgcagctggacaaagtcgtgattctgtgatactggactctgagaaagatgatatccactgctgtgcattgggctggctctccatggtttacgaaggagtaccccagtgtcagtgtaattccatcaagaactcatcttcagaggaagagaaacaaaaagagcagtgttctcctttggataccaacagttgtaaacaaggagagagaacttctgatagagatgtcactgttgttcaatttaagagccttgtaaataatccaaagactcctccagatgggaaaagtcattttcctgaactacaagacgacagtagaaaagatacacccaaaacaaaacataaaagcttaccaaggacagaacaagaattagttgctggtcagttttcatctaaatgtgataaactaaatcccttgcaaaatcacaaaagaaaaaaattgaggtttcacgaggtaacctttcactccagtaataaaatgacagcatcttatgaacaagcttctcaggaaacccgacagaagaaacatgtaacacagaactcacgtccactaaaaacaaaaacagcttttttgccaaataaagatgtgtataagaagcatagttctttgggacagtcattatcaccagaaaagataaaattgaaactcaaatcagttagcttcaaacaaaaacgaaagttagaccaagggaacgtattagatatggaagtaaagaaaaagaaacatgataaacaagaacagaaaggaagtgtgggagctacattcaaattaggtgactctttgtcaaacccaaacgaaagagccattgttaaagaaaagatggtatcaaatactaagtctgtagacacgaaagcgagttcatctaaatttagtagaattctaactcctaaggagtatttacaaaggcagaagcataaagaagctctgagtaataaagcatcgaagaaaatctgtgtgaaaaacgtgccatgtgattctgaacatatgagaccaagtaaacttgccgtgcaggttgaaagttgtgggaaatcaaatgagaaacacagcagcggcgtgcagacctctaaagaatcattaaatggcttgacaagccatggtaaaaacctcaaaatccaccattctcaggagtctaaaacatacaacattctaaggaatgttaaagaaaaagttggtgggaagcagcctgataaaatatggattgataagactaaattagacaaattaaccaatataagcaacgaagctcaattcagccaaatgcctccccaagtaaaggatcaaaagaaattatatctgaatagagttgggtttaaatgcactgaacgtgaaagcatttctctcaccaaattagaaagttcacccaggaagcttcataaagataagagacaggaaaataaacataagacctttttaccggtgaaaggtaacacagaaaaatcaaacatgctggagtttaaattatgtccagatatcttactaaagaatacaaactctgtggaagaacggaaggatgtaaagcctcatcctaggaaggagcaagcccctctgcaagtttcaggaataaaaagtacaaaagaagactggttaaaatttgttgctacaaagaaaaggacacagaaagacagccaagagagagataatgttaattcaagactctcgaagagaagcttcagtgcagatggatttgagatgctacaaaacccagtaaaagattcaaaagaaatgtttcaaacctacaaacagatgtacctggagaagagaagcagaagccttggtagcagtcctgtaaaataattacaagatgtggttttgtaattgccactgggaaatttctttccttttctgttcaaaatatttcgctgaaactaatgagaaatgccatgataaagatttctcagagtttggttcccactttcattgtatttcattgaaagtgcttaattaaaatggcttgagaactttgggtagccatgtgtaagaaatggatggtattcaccggggaaacaaggtatttgaatttctactttattgaaccagatttaccattattttaaaaggaatgcttatacaaatcaatttgaaattctacccatcttgagggaggaccgttcctcagttaaggacttgtttatttaaatgggactgtaaatatgttttggtttctaagctatattagcaaaatttatttttcaaaaatgcccactgtgatgtgaatgtcaaaatatattcttaagtgttttataactaattgtaaactttttttcagaagtcttattttatacttgtgaaactgaacacaattttgggacaacgtttaaacattacttttcatacttgaaataaacatttattttttaaaaaactaaaaaaaaagagaagaacaaacaacaaaacac

SEQ ID NO: 437247 - DNA, 5186 bp, Homo sapiens
cacctccaaagctataccgttactcaccacaaagctttttaccagattctaccattcaaaaacaaaactttataccacatacatcattgcaagttaaaaatagtcagcttccaaattctgtattaactttaccatcaaggcagacctcagctgtaccatcacagcagtatgccacgcaaactgacaaaagacctcctcctcctccttacaactgtagatatggaagccagcctttgcaaagtactcagcatattactaaacacttgtctatggaagttcctcagagtcgagaaatgctgtcatctgaaataaggaccagctttcaacagcagtggcaaaaccctaatgaaaatgtcagcacaattggaaatttcactaacttgaaagtaaataccaacaacaaacagccttttaacagtcccattagatcttctgtggatggtgttcagactcttgctcaaactaatgaagagaaaataatggattcttgcaatccaacttcaaatcaagtactggacacaagtgttgcaaaagaaaagctagtaagggatattaaaacattagtagagataaaacagaagttttcagaacttgcaaggaaaattaaaatcaataaagatcttttgatggcagcaggttgtattaaaatgactaatacttcttatagtgaaccagctcagaattctaaattgtctctaaaacaaactgccaaaatccagtctggaccccagataactccagtaatgccagagaatgcagagagacaaacaccaacagtagtggaatctgcagaaacaaataagactcaatgtatgttgaattctgacattcaggaagtcaattgcagaaggtttaaccaagttgattctgttttaccaaatcctgtctattctgaaaagcggccaatgccagacccatctcatgatgtgaaagttctcacttcaaagacatcagctgttgagatgacccaggcagtattgaatactcagctttcatcagaaaatgttaccaaagttgagcaaaattcaccagcagtttgtgaaacaatttctgttcccaagtccatgtccactgaggaatataaatcaaaaattcaaaatgaaaatatgctacttctcgctttgctttcacaggcacgtaagactcagaagacagtattaaaagatgctaatcaaactattcaggattctaaaccagacagttgtgaaatgaatccaaatacccaaatgactggtaaccaactgaatttgaagaacatggaaactccaagtacttctaatgtaagtggcagggttttggacaactccttttgcagtggacaagaatcctcaacaaaaggaatgcctgctaaaagtgacagtagctgttccatggaagtgctagcaacctgtctttccctgtggaaaaagcaaccttcagatactgcaaaagaaaaggagtgtgataaactcagaacaaacacaacagcagttggaatttcaaagcctgctaacatccacgttaagagtccttgttcagttgtgggaaattcaaattctcagaataaaataagtaatccctcacagcagacagctttgtcgatggtaatgcacaattatgagtcttcaggtataaatataacaaagggaacagaacttcagatagctgtagtgtcaccgttagttctgtcagaggtcaaaacattgtctgtcaaaggaataacacctgcagtgttacctgaaacagtgtatcccgttattaaagaaggcagtgtttgtagtttacaaaatcaattggcagaaaatgcaaaggcaactgctgctttgaaagttgatgttagtggaccagtagcaagtacagcaacatcaaccaagatttttccactaactcagaaggaaaagcagaatgagtcaactaatggtaattcagaagtcacacctaatgtcaatcaaggaaagcataacaaattagagtcagctatccattctcctatgaacgatcagcaaatctcacaggagtcaaggaatagtactgttgtgagtagtgatacattacagattgacaatatttgttctctggttgaaggtgatacctcttacaattcccaaatagcaaagatattcagctctcttcccttgaaaatggttgagccacagaaaccttctctacccaatcagcaagggattggcagcagagaaccagaaaaacaattagataataccactgaaaataaagactttggttttcaaaaagataaacctgtacagtgcacagatgtttcacataaaatatgtgatcagtcaaagtcagagccacccttagagtcatcttttaacaatcttgaaacaaacagagttattctagagaaaagtagtttggagcatgccactgaaaaaagcacagctaacgatacgtgctcgtcagctgctattcaggaggatatttaccctcaggaaatagatgcatccagcaactatactccccaagatcctgcaagaaatgaaatccacagtgataaggcacctgtcttatacctacatgaccagctgtcagaacttctaaaagagtttccttatggcattgaggctgtgaatacacgtgaaggttctgtgggccagcaaactacataccagacctcagaagatcaaactgctgataaaaccagttctgactccaaagacccagcagatcaaatacaaattacaatattaagctcagagcaaatgaaagaaatatttcctgaacaggatgatcaaccctatgtagtagacaagttggcagaacctcagaaagaagagcccatcacagaagtagttagccagtgtgacctgcaggcacctgcagctggacaaagtcgtgattctgtgatactggactctgagaaagatgatatccactgctgtgcattgggctggctctccatggtttacgaaggagtaccccagtgtcagtgtaattccatcaagaactcatcttcagaggaagagaaacaaaaagagcagtgttctcctttggataccaacagttgtaaacaaggagagagaacttctgatagagatgtcactgttgttcaatttaagagccttgtaaataatccaaagactcctccagatgggaaaagtcattttcctgaactacaagacgacagtagaaaagatacacccaaaacaaaacataaaagcttaccaaggacagaacaagaattagttgctggtcagttttcatctaaatgtgataaactaaatcccttgcaaaatcacaaaagaaaaaaattgaggtttcacgaggtaacctttcactccagtaataaaatgacagcatcttatgaacaagcttctcaggaaacccgacagaagaaacatgtaacacagaactcacgtccactaaaaacaaaaacagcttttttgccaaataaagatgtgtataagaagcatagttctttgggacagtcattatcaccagaaaagataaaattgaaactcaaatcagttagcttcaaacaaaaacgaaagttagaccaagggaacgtattagatatggaagtaaagaaaaagaaacatgataaacaagaacagaaaggaagtgtgggagctacattcaaattaggtgactctttgtcaaacccaaacgaaagagccattgttaaagaaaagatggtatcaaatactaagtctgtagacacgaaagcgagttcatctaaatttagtagaattctaactcctaaggagtatttacaaaggcagaagcataaagaagctctgagtaataaagcatcgaagaaaatctgtgtgaaaaacgtgccatgtgattctgaacatatgagaccaagtaaacttgccgtgcaggttgaaagttgtgggaaatcaaatgagaaacacagcagcggcgtgcagacctctaaagaatcattaaatggcttgacaagccatggtaaaaacctcaaaatccaccattctcaggagtctaaaacatacaacattctaaggaatgttaaagaaaaagttggtgggaagcagcctgataaaatatggattgataagactaaattagacaaattaaccaatataagcaacgaagctcaattcagccaaatgcctccccaagtaaaggatcaaaagaaattatatctgaatagagttgggtttaaatgcactgaacgtgaaagcatttctctcaccaaattagaaagttcacccaggaagcttcataaagataagagacaggaaaataaacataagacctttttaccggtgaaaggtaacacagaaaaatcaaacatgctggagtttaaattatgtccagatatcttactaaagaatacaaactctgtggaagaacggaaggatgtaaagcctcatcctaggaaggagcaagcccctctgcaagtttcaggaataaaaagtacaaaagaagactggttaaaatttgttgctacaaagaaaaggacacagaaagacagccaagagagagataatgttaattcaagactctcgaagagaagcttcagtgcagatggatttgagatgctacaaaacccagtaaaagattcaaaagaaatgtttcaaacctacaaacagatgtacctggagaagagaagcagaagccttggtagcagtcctgtaaaataattacaagatgtggttttgtaattgccactgggaaatttctttccttttctgttcaaaatatttcgctgaaactaatgagaaatgccatgataaagatttctcagagtttggttcccactttcattgtatttcattgaaagtgcttaattaaaatggcttgagaactttgggtagccatgtgtaagaaatggatggtattcaccggggaaacaaggtatttgaatttctactttattgaaccagatttaccattattttaaaaggaatgcttatacaaatcaatttgaaattctacccatcttgagggaggaccgttcctcagttaaggacttgtttatttaaatgggactgtaaatatgttttggtttctaagctatattagcaaaatttatttttcaaaaatgcccactgtgatgtgaatgtcaaaatatattcttaagtgttttataactaattgtaaactttttttcagaagtcttattttatacttgtgaaactgaacacaattttgggacaacgtttaaacattacttttcatacttgggtgggacgttatttttgtggggagtagaaggaaaa

SEQ ID NO: 437248 - DNA, 4542 bp, Homo sapiens
cacctccaaagctataccgttactcaccacaaagctttttaccagattctaccattcaaaaacaaaactttataccacatacatcattgcaagttaaaaatagtcagcttccaaattctgtattaactttaccatcaaggcagacctcagctgtaccatcacagcagtatgccacgcaaactgacaaaagacctcctcctcctccttacaactgtagatatggaagccagcctttgcaaagtactcagcatattactaaacacttgtctatggaagttcctcagagtcgagaaatgctgtcatctgaaataaggaccagctttcaacagcagtggcaaaaccctaatgaaaatgtcagcacaattggaaatttcactaacttgaaagtaaataccaacaacaaacagccttttaacagtcccattagatcttctgtggatggtgttcagactcttgctcaaactaatgaagagaaaataatggattcttgcaatccaacttcaaatcaagtactggacacaagtgttgcaaaagaaaagctagtaagggatattaaaacattagtagagataaaacagaagttttcagaacttgcaaggaaaattaaaatcaataaagatcttttgatggcagcaggttgtattaaaatgactaatacttcttatagtgaaccagctcagaattctaaattgtctctaaaacaaactgccaaaatccagtctggaccccagataactccagtaatgccagagaatgcagagagacaaacaccaacagtagtggaatctgcagaaacaaataagactcaatgtatgttgaattctgacattcaggaagtcaattgcagaaggtttaaccaagttgattctgttttaccaaatcctgtctattctgaaaagcggccaatgccagacccatctcatgatgtgaaagttctcacttcaaagacatcagctgttgagatgacccaggcagtattgaatactcagctttcatcagaaaatgttaccaaagttgagcaaaattcaccagcagtttgtgaaacaatttctgttcccaagtccatgtccactgaggaatataaatcaaaaattcaaaatgaaaatatgctacttctcgctttgctttcacaggcacgtaagactcagaagacagtattaaaagatgctaatcaaactattcaggattctaaaccagacagttgtgaaatgaatccaaatacccaaatgactggtaaccaactgaatttgaagaacatggaaactccaagtacttctaatgtaagtggcagggttttggacaactccttttgcagtggacaagaatcctcaacaaaaggaatgcctgctaaaagtgacagtagctgttccatggaagtgctagcaacctgtctttccctgtggaaaaagcaaccttcagatactgcaaaagaaaaggagtgtgataaactcagaacaaacacaacagcagttggaatttcaaagcctgctaacatccacgttaagagtccttgttcagttgtgggaaattcaaattctcagaataaaataagtaatccctcacagcagacagctttgtcgatggtaatgcacaattatgagtcttcaggtataaatataacaaagggaacagaacttcagatagctgtagtgtcaccgttagttctgtcagaggtcaaaacattgtctgtcaaaggaataacacctgcagtgttacctgaaacagtgtatcccgttattaaagaaggcagtgtttgtagtttacaaaatcaattggcagaaaatgcaaaggcaactgctgctttgaaagttgatgttagtggaccagtagcaagtacagcaacatcaaccaagatttttccactaactcagaaggaaaagcagaatgagtcaactaatggtaattcagaagtcacacctaatgtcaatcaaggaaagcataacaaattagagtcagctatccattctcctatgaacgatcagcaaatctcacaggagtcaaggaatagtactgttgtgagtagtgatacattacagattgacaatatttgttctctggttgaaggtgatacctcttacaattcccaaatagcaaagatattcagctctcttcccttgaaaatggttgagccacagaaaccttctctacccaatcagcaagggattggcagcagagaaccagaaaaacaattagataataccactgaaaataaagactttggttttcaaaaagataaacctgtacagtgcacagatgtttcacataaaatatgtgatcagtcaaagtcagagccacccttagagtcatcttttaacaatcttgaaacaaacagagttattctagagaaaagtagtttggagcatgccactgaaaaaagcacagctaacgatacgtgctcgtcagctgctattcaggaggatatttaccctcaggaaatagatgcatccagcaactatactccccaagatcctgcaagaaatgaaatccacagtgataaggcacctgtcttatacctacatgaccagctgtcagaacttctaaaagagtttccttatggcattgaggctgtgaatacacgtgaaggttctgtgggccagcaaactacataccagacctcagaagatcaaactgctgataaaaccagttctgactccaaagacccagcagatcaaatacaaattacaatattaagctcagagcaaatgaaagaaatatttcctgaacaggatgatcaaccctatgtagtagacaagttggcagaacctcagaaagaagagcccatcacagaagtagttagccagtgtgacctgcaggcacctgcagctggacaaagtcgtgattctgtgatactggactctgagaaagatgatatccactgctgtgcattgggctggctctccatggtttacgaaggagtaccccagtgtcagtgtaattccatcaagaactcatcttcagaggaagagaaacaaaaagagcagtgttctcctttggataccaacagttgtaaacaaggagagagaacttctgatagagatgtcactgttgttcaatttaagagccttgtaaataatccaaagactcctccagatgggaaaagtcattttcctgaactacaagacgacagtagaaaagatacacccaaaacaaaacataaaagcttaccaaggacagaacaagaattagttgctggtcagttttcatctaaatgtgataaactaaatcccttgcaaaatcacaaaagaaaaaaattgaggtttcacgaggtaacctttcactccagtaataaaatgacagcatcttatgaacaagcttctcaggaaacccgacagaagaaacatgtaacacagaactcacgtccactaaaaacaaaaacagcttttttgccaaataaagatgtgtataagaagcatagttctttgggacagtcattatcaccagaaaagataaaattgaaactcaaatcagttagcttcaaacaaaaacgaaagttagaccaagggaacgtattagatatggaagtaaagaaaaagaaacatgataaacaagaacagaaaggaagtgtgggagctacattcaaattaggtgactctttgtcaaacccaaacgaaagagccattgttaaagaaaagatggtatcaaatactaagtctgtagacacgaaagcgagttcatctaaatttagtagaattctaactcctaaggagtatttacaaaggcagaagcataaagaagctctgagtaataaagcatcgaagaaaatctgtgtgaaaaacgtgccatgtgattctgaacatatgagaccaagtaaacttgccgtgcaggttgaaagttgtgggaaatcaaatgagaaacacagcagcggcgtgcagacctctaaagaatcattaaatggcttgacaagccatggtaaaaacctcaaaatccaccattctcaggagtctaaaacatacaacattctaaggaatgttaaagaaaaagttggtgggaagcagcctgataaaatatggattgataagactaaattagacaaattaaccaatataagcaacgaagctcaattcagccaaatgcctccccaagtaaaggatcaaaagaaattatatctgaatagagttgggtttaaatgcactgaacgtgaaagcatttctctcaccaaattagaaagttcacccaggaagcttcataaagataagagacaggaaaataaacataagacctttttaccggtgaaaggtaacacagaaaaatcaaacatgctggagtttaaattatgtccagatatcttactaaagaatacaaactctgtggaagaacggaaggatgtaaagcctcatcctaggaaggagcaagcccctctgcaaggtccagtatgattttcttggtggtgtctacaatattgtaaagagtcgtaggtcaatatttgggctagcacctctcatgctgtcttgggctgctgggaaagactttaatgtgttatgccactacctagtatttgttttgcctggtaaaccaatgtttcattgggcaatatttgttttg

SEQ ID NO: 437249 - DNA, 4427 bp, Homo sapiens
cacctccaaagctataccgttactcaccacaaagctttttaccagattctaccattcaaaaacaaaactttataccacatacatcattgcaagttaaaaatagtcagcttccaaattctgtattaactttaccatcaaggcagacctcagctgtaccatcacagcagtatgccacgcaaactgacaaaagacctcctcctcctccttacaactgtagatatggaagccagcctttgcaaagtactcagcatattactaaacacttgtctatggaagttcctcagagtcgagaaatgctgtcatctgaaataaggaccagctttcaacagcagtggcaaaaccctaatgaaaatgtcagcacaattggaaatttcactaacttgaaagtaaataccaacaacaaacagccttttaacagtcccattagatcttctgtggatggtgttcagactcttgctcaaactaatgaagagaaaataatggattcttgcaatccaacttcaaatcaagtactggacacaagtgttgcaaaagaaaagctagtaagggatattaaaacattagtagagataaaacagaagttttcagaacttgcaaggaaaattaaaatcaataaagatcttttgatggcagcaggttgtattaaaatgactaatacttcttatagtgaaccagctcagaattctaaattgtctctaaaacaaactgccaaaatccagtctggaccccagataactccagtaatgccagagaatgcagagagacaaacaccaacagtagtggaatctgcagaaacaaataagactcaatgtatgttgaattctgacattcaggaagtcaattgcagaaggtttaaccaagttgattctgttttaccaaatcctgtctattctgaaaagcggccaatgccagacccatctcatgatgtgaaagttctcacttcaaagacatcagctgttgagatgacccaggcagtattgaatactcagctttcatcagaaaatgttaccaaagttgagcaaaattcaccagcagtttgtgaaacaatttctgttcccaagtccatgtccactgaggaatataaatcaaaaattcaaaatgaaaatatgctacttctcgctttgctttcacaggcacgtaagactcagaagacagtattaaaagatgctaatcaaactattcaggattctaaaccagacagttgtgaaatgaatccaaatacccaaatgactggtaaccaactgaatttgaagaacatggaaactccaagtacttctaatgtaagtggcagggttttggacaactccttttgcagtggacaagaatcctcaacaaaaggaatgcctgctaaaagtgacagtagctgttccatggaagtgctagcaacctgtctttccctgtggaaaaagcaaccttcagatactgcaaaagaaaaggagtgtgataaactcagaacaaacacaacagcagttggaatttcaaagcctgctaacatccacgttaagagtccttgttcagttgtgggaaattcaaattctcagaataaaataagtaatccctcacagcagacagctttgtcgatggtaatgcacaattatgagtcttcaggtataaatataacaaagggaacagaacttcagatagctgtagtgtcaccgttagttctgtcagaggtcaaaacattgtctgtcaaaggaataacacctgcagtgttacctgaaacagtgtatcccgttattaaagaaggcagtgtttgtagtttacaaaatcaattggcagaaaatgcaaaggcaactgctgctttgaaagttgatgttagtggaccagtagcaagtacagcaacatcaaccaagatttttccactaactcagaaggaaaagcagaatgagtcaactaatggtaattcagaagtcacacctaatgtcaatcaaggaaagcataacaaattagagtcagctatccattctcctatgaacgatcagcaaatctcacaggagtcaaggaatagtactgttgtgagtagtgatacattacagattgacaatatttgttctctggttgaaggtgatacctcttacaattcccaaatagcaaagatattcagctctcttcccttgaaaatggttgagccacagaaaccttctctacccaatcagcaagggattggcagcagagaaccagaaaaacaattagataataccactgaaaataaagactttggttttcaaaaagataaacctgtacagtgcacagatgtttcacataaaatatgtgatcagtcaaagtcagagccacccttagagtcatcttttaacaatcttgaaacaaacagagttattctagagaaaagtagtttggagcatgccactgaaaaaagcacagctaacgatacgtgctcgtcagctgctattcaggaggatatttaccctcaggaaatagatgcatccagcaactatactccccaagatcctgcaagaaatgaaatccacagtgataaggcacctgtcttatacctacatgaccagctgtcagaacttctaaaagagtttccttatggcattgaggctgtgaatacacgtgaaggttctgtgggccagcaaactacataccagacctcagaagatcaaactgctgataaaaccagttctgactccaaagacccagcagatcaaatacaaattacaatattaagctcagagcaaatgaaagaaatatttcctgaacaggatgatcaaccctatgtagtagacaagttggcagaacctcagaaagaagagcccatcacagaagtagttagccagtgtgacctgcaggcacctgcagctggacaaagtcgtgattctgtgatactggactctgagaaagatgatatccactgctgtgcattgggctggctctccatggtttacgaaggagtaccccagtgtcagtgtaattccatcaagaactcatcttcagaggaagagaaacaaaaagagcagtgttctcctttggataccaacagttgtaaacaaggagagagaacttctgatagagatgtcactgttgttcaatttaagagccttgtaaataatccaaagactcctccagatgggaaaagtcattttcctgaactacaagacgacagtagaaaagatacacccaaaacaaaacataaaagcttaccaaggacagaacaagaattagttgctggtcagttttcatctaaatgtgataaactaaatcccttgcaaaatcacaaaagaaaaaaattgaggtttcacgaggtaacctttcactccagtaataaaatgacagcatcttatgaacaagcttctcaggaaacccgacagaagaaacatgtaacacagaactcacgtccactaaaaacaaaaacagcttttttgccaaataaagatgtgtataagaagcatagttctttgggacagtcattatcaccagaaaagataaaattgaaactcaaatcagttagcttcaaacaaaaacgaaagttagaccaagggaacgtattagatatggaagtaaagaaaaagaaacatgataaacaagaacagaaaggaagtgtgggagctacattcaaattaggtgactctttgtcaaacccaaacgaaagagccattgttaaagaaaagatggtatcaaatactaagtctgtagacacgaaagcgagttcatctaaatttagtagaattctaactcctaaggagtatttacaaaggcagaagcataaagaagctctgagtaataaagcatcgaagaaaatctgtgtgaaaaacgtgccatgtgattctgaacatatgagaccaagtaaacttgccgtgcaggttgaaagttgtgggaaatcaaatgagaaacacagcagcggcgtgcagacctctaaagaatcattaaatggcttgacaagccatggtaaaaacctcaaaatccaccattctcaggagtctaaaacatacaacattctaaggaatgttaaagaaaaagttggtgggaagcagcctgataaaatatggattgataagactaaattagacaaattaaccaatataagcaacgaagctcaattcagccaaatgcctccccaagtaaaggatcaaaagaaattatatctgaatagagttgggtttaaatgcactgaacgtgaaagcatttctctcaccaaattagaaagttcacccaggaagcttcataaagataagagacaggaaaataaacataagacctttttaccggtgaaagccaaccacacaccaacataccaccctcgccaacaaaacacccccacgccctctccctctcacctccacgcccccggacaacacctcgtcacaccccaacaacatttctaaccttcacctctaccccccgtcccccccgaccacccctcaccgccctccccccgtcccccccgcccccccatcctcaccccc

SEQ ID NO: 437250 - DNA, 1162 bp, Homo sapiens
cgggaggccgccggttttctccccgcttgccggggtggtcctcttccctttgtcggaccaaagaagtaaacactgtgtggagagggactgacgtgtttggagggaaatgggaatgtacacgataattaaagagtaaagttgtgctcaacgctgtttacttctaattatttcctgattcacaaattaatttttgcaattcacaacttcaagaatacttggactattggattcaatccatagtaatctgcaaaagaagagaagcagaattatacctagaagtctactaatggacagttagtcacccacctacatgttgagtttcaggaataaaaagtacaaaagaagactggttaaaatttgttgctacaaagaaaaggacacagaaagacagccaagagagagataatgttaattcaagactctcgaagagaagcttcagtgcagatggatttgagatgctacaaaacccagtaaaagattcaaaagaaatgtttcaaacctacaaacagatgtacctggagaagagaagcagaagccttggtagcagtcctgtaaaataattacaagatgtggttttgtaattgccactgggaaatttctttccttttctgttcaaaatatttcgctgaaactaatgagaaatgccatgataaagatttctcagagtttggttcccactttcattgtatttcattgaaagtgcttaattaaaatggcttgagaactttgggtagccatgtgtaagaaatggatggtattcaccggggaaacaaggtatttgaatttctactttattgaaccagatttaccattattttaaaaggaatgcttatacaaatcaatttgaaattctacccatcttgagggaggaccgttcctcagttaaggacttgtttatttaaatgggactgtaaatatgttttggtttctaagctatattagcaaaatttatttttcaaaaatgcccactgtgatgtgaatgtcaaaatatattcttaagtgttttataactaattgtaaactttttttcagaagtcttattttatacttgtgaaactgaacacaattttgggacaacgtttaaacattacttttcatacttgaaataaacatttattttttaaaaaactaaaaaaaaagagaagaacaaacaacaaaacac

SEQ ID NO: 437251 - DNA, 994 bp, Homo sapiens
cgggaggccgccggttttctccccgcttgccggggtggtcctcttccctttgtcggaccaaagaagtaaacactgtgtggagagggactgacgtgtttggagggaaatgggaatgtacacgataattaaagagtaaagttgtgctcaacgtttcaggaataaaaagtacaaaagaagactggttaaaatttgttgctacaaagaaaaggacacagaaagacagccaagagagagataatgttaattcaagactctcgaagagaagcttcagtgcagatggatttgagatgctacaaaacccagtaaaagattcaaaagaaatgtttcaaacctacaaacagatgtacctggagaagagaagcagaagccttggtagcagtcctgtaaaataattacaagatgtggttttgtaattgccactgggaaatttctttccttttctgttcaaaatatttcgctgaaactaatgagaaatgccatgataaagatttctcagagtttggttcccactttcattgtatttcattgaaagtgcttaattaaaatggcttgagaactttgggtagccatgtgtaagaaatggatggtattcaccggggaaacaaggtatttgaatttctactttattgaaccagatttaccattattttaaaaggaatgcttatacaaatcaatttgaaattctacccatcttgagggaggaccgttcctcagttaaggacttgtttatttaaatgggactgtaaatatgttttggtttctaagctatattagcaaaatttatttttcaaaaatgcccactgtgatgtgaatgtcaaaatatattcttaagtgttttataactaattgtaaactttttttcagaagtcttattttatacttgtgaaactgaacacaattttgggacaacgtttaaacattacttttcatacttgaaataaacatttattttttaaaaaactaaaaaaaaagagaagaacaaacaacaaaacac

SEQ ID NO: 437252 - DNA, 1090 bp, Homo sapiens
tgtattaacctcttcagttcatgtgaggggaacataattacatagtaaagataaactcattttttaattgaggtaagcatttcaaatagaaatcatttttccagtcctttttttagagttgtgttacatgtggttatatctagggcctttcaaaatctattttcagcttacatgattttcctttgttatagtactaaaggagatgattagcaatatctagagttctgaaaatgaatatttaaatagtttcaggaataaaaagtacaaaagaagactggttaaaatttgttgctacaaagaaaaggacacagaaagacagccaagagagagataatgttaattcaagactctcgaagagaagcttcagtgcagatggatttgagatgctacaaaacccagtaaaagattcaaaagaaatgtttcaaacctacaaacagatgtacctggagaagagaagcagaagccttggtagcagtcctgtaaaataattacaagatgtggttttgtaattgccactgggaaatttctttccttttctgttcaaaatatttcgctgaaactaatgagaaatgccatgataaagatttctcagagtttggttcccactttcattgtatttcattgaaagtgcttaattaaaatggcttgagaactttgggtagccatgtgtaagaaatggatggtattcaccggggaaacaaggtatttgaatttctactttattgaaccagatttaccattattttaaaaggaatgcttatacaaatcaatttgaaattctacccatcttgagggaggaccgttcctcagttaaggacttgtttatttaaatgggactgtaaatatgttttggtttctaagctatattagcaaaatttatttttcaaaaatgcccactgtgatgtgaatgtcaaaatatattcttaagtgttttataactaattgtaaactttttttcagaagtcttattttatacttgtgaaactgaacacaattttgggacaacgtttaaacattacttttcatacttgaaataaacatttattttttaaaaaactaaaaaaaaagagaagaacaaacaacaaaacac

SEQ ID NO: 437253 - DNA, 927 bp, Homo sapiens
ataacttacaattctataagtgaagagctatggttctgaaacttttgcttaactccttgccttaattttttatccctccaatatatattttccctctgaattttgattatatattgatcacagctaacattgagaaataaagtaagtaaagtttttatttcccttagataatgttaattcaagactctcgaagagaagcttcagtgcagatggatttgagatgctacaaaacccagtaaaagattcaaaagaaatgtttcaaacctacaaacagatgtacctggagaagagaagcagaagccttggtagcagtcctgtaaaataattacaagatgtggttttgtaattgccactgggaaatttctttccttttctgttcaaaatatttcgctgaaactaatgagaaatgccatgataaagatttctcagagtttggttcccactttcattgtatttcattgaaagtgcttaattaaaatggcttgagaactttgggtagccatgtgtaagaaatggatggtattcaccggggaaacaaggtatttgaatttctactttattgaaccagatttaccattattttaaaaggaatgcttatacaaatcaatttgaaattctacccatcttgagggaggaccgttcctcagttaaggacttgtttatttaaatgggactgtaaatatgttttggtttctaagctatattagcaaaatttatttttcaaaaatgcccactgtgatgtgaatgtcaaaatatattcttaagtgttttataactaattgtaaactttttttcagaagtcttattttatacttgtgaaactgaacacaattttgggacaacgtttaaacattacttttcatacttgaaataaacatttattttttaaaaaactaaaaaaaaagagaagaacaaacaacaaaacac

SEQ ID NO: 437254 - DNA, 910 bp, Homo sapiens
cgggaggccgccggttttctccccgcttgccggggtggtcctcttccctttgtcggaccaaagaagtaaacactgtgtggagagggactgacgtgtttggagggaaatgggaatgtacacgataattaaagagtaaagttgtgctcaacgataatgttaattcaagactctcgaagagaagcttcagtgcagatggatttgagatgctacaaaacccagtaaaagattcaaaagaaatgtttcaaacctacaaacagatgtacctggagaagagaagcagaagccttggtagcagtcctgtaaaataattacaagatgtggttttgtaattgccactgggaaatttctttccttttctgttcaaaatatttcgctgaaactaatgagaaatgccatgataaagatttctcagagtttggttcccactttcattgtatttcattgaaagtgcttaattaaaatggcttgagaactttgggtagccatgtgtaagaaatggatggtattcaccggggaaacaaggtatttgaatttctactttattgaaccagatttaccattattttaaaaggaatgcttatacaaatcaatttgaaattctacccatcttgagggaggaccgttcctcagttaaggacttgtttatttaaatgggactgtaaatatgttttggtttctaagctatattagcaaaatttatttttcaaaaatgcccactgtgatgtgaatgtcaaaatatattcttaagtgttttataactaattgtaaactttttttcagaagtcttattttatacttgtgaaactgaacacaattttgggacaacgtttaaacattacttttcatacttgaaataaacatttattttttaaaaaactaaaaaaaaagagaagaacaaacaacaaaacac

SEQ ID NO: 437255 - DNA, 170 bp, Homo sapiens
tgttaatcttagtgagatctttaatatgaaagtccacatccataattatctttatgctttcttgcagctgtttacttctaattatttcctgattcacaaattaatttttgcaattcacaacttcaagaatacttggactattggattcaatccatagtaatctgcaaaag

SEQ ID NO: 437256 - DNA, 523 bp, Homo sapiens
  misc_feature (513)..(513): n is a, c, g, or t
cacctccaaagctataccgttactcaccacaaagctttttaccagattctaccattcaaaaacaaaactttataccacatacatcattgcaagttaaaaatagtcagcttccaaattctgtattaactttaccatcaaggcagacctcagctgtaccatcacagcagtatgccacgcaaactgacaaaagacctcctcctcctccttacaactgtagatatggaagccagcctttgcaaagtactcagcatattactaaacacttgtctatggaagttcctcagagtcgagaaatgctgtcatctgaaataaggaccagctttcaacagcagtggcaaaaccctaatgaaaatgtcagcacaattggaaatttcactaacttgaaagtaaataccaacaacaaacagccttttaacagtcccattagatcttctgtggatggtgttcagattggtggtggggctaatcactaaaaaataaaccctcccccatccacttagagtctgaactggnccgagtgttc

SEQ ID NO: 437257 - DNA, 5155 bp, Homo sapiens
cacctccaaagctataccgttactcaccacaaagctttttaccagattctaccattcaaaaacaaaactttataccacatacatcattgcaagttaaaaatagtcagcttccaaattctgtattaactttaccatcaaggcagacctcagctgtaccatcacagcagtatgccacgcaaactgacaaaagacctcctcctcctccttacaactgtagatatggaagccagcctttgcaaagtactcagcatattactaaacacttgtctatggaagttcctcagagtcgagaaatgctgtcatctgaaataaggaccagctttcaacagcagtggcaaaaccctaatgaaaatgtcagcacaattggaaatttcactaacttgaaagtaaataccaacaacaaacagccttttaacagtcccattagatcttctgtggatggtgttcagactcttgctcaaactaatgaagagaaaataatggattcttgcaatccaacttcaaatcaagtactggacacaagtgttgcaaaagaaaagctagtaagggatattaaaacattagtagagataaaacagaagttttcagaacttgcaaggaaaattaaaatcaataaagatcttttgatggcagcaggttgtattaaaatgactaatacttcttatagtgaaccagctcagaattctaaattgtctctaaaacaaactgccaaaatccagtctggaccccagataactccagtaatgccagagaatgcagagagacaaacaccaacagtagtggaatctgcagaaacaaataagactcaatgtatgttgaattctgacattcaggaagtcaattgcagaaggtttaaccaagttgattctgttttaccaaatcctgtctattctgaaaagcggccaatgccagacccatctcatgatgtgaaagttctcacttcaaagacatcagctgttgagatgacccaggcagtattgaatactcagctttcatcagaaaatgttaccaaagttgagcaaaattcaccagcagtttgtgaaacaatttctgttcccaagtccatgtccactgaggaatataaatcaaaaattcaaaatgaaaatatgctacttctcgctttgctttcacaggcacgtaagactcagaagacagtattaaaagatgctaatcaaactattcaggattctaaaccagacagttgtgaaatgaatccaaatacccaaatgactggtaaccaactgaatttgaagaacatggaaactccaagtacttctaatgtaagtggcagggttttggacaactccttttgcagtggacaagaatcctcaacaaaaggaatgcctgctaaaagtgacagtagctgttccatggaagtgctagcaacctgtctttccctgtggaaaaagcaaccttcagatactgcaaaagaaaaggagtgtgataaactcagaacaaacacaacagcagttggaatttcaaagcctgctaacatccacgttaagagtccttgttcagttgtgggaaattcaaattctcagaataaaataagtaatccctcacagcagacagctttgtcgatggtaatgcacaattatgagtcttcaggtataaatataacaaagggaacagaacttcagatagctgtagtgtcaccgttagttctgtcagaggtcaaaacattgtctgtcaaaggaataacacctgcagtgttacctgaaacagtgtatcccgttattaaagaaggcagtgtttgtagtttacaaaatcaattggcagaaaatgcaaaggcaactgctgctttgaaagttgatgttagtggaccagtagcaagtacagcaacatcaaccaagatttttccactaactcagaaggaaaagcagaatgagtcaactaatggtaattcagaagtcacacctaatgtcaatcaaggaaagcataacaaattagagtcagctatccattctcctatgaacgatcagcaaatctcacaggagtcaaggaatagtactgttgtgagtagtgatacattacagattgacaatatttgttctctggttgaaggtgatacctcttacaattcccaaatagcaaagatattcagctctcttcccttgaaaatggttgagccacagaaaccttctctacccaatcagcaagggattggcagcagagaaccagaaaaacaattagataataccactgaaaataaagactttggttttcaaaaagataaacctgtacagtgcacagatgtttcacataaaatatgtgatcagtcaaagtcagagccacccttagagtcatcttttaacaatcttgaaacaaacagagttattctagagaaaagtagtttggagcatgccactgaaaaaagcacagctaacgatacgtgctcgtcagctgctattcaggaggatatttaccctcaggaaatagatgcatccagcaactatactccccaagatcctgcaagaaatgaaatccacagtgataaggcacctgtcttatacctacatgaccagctgtcagaacttctaaaagagtttccttatggcattgaggctgtgaatacacgtgaaggttctgtgggccagcaaactacataccagacctcagaagatcaaactgctgataaaaccagttctgactccaaagacccagcagatcaaatacaaattacaatattaagctcagagcaaatgaaagaaatatttcctgaacaggatgatcaaccctatgtagtagacaagttggcagaacctcagaaagaagagcccatcacagaagtagttagccagtgtgacctgcaggcacctgcagctggacaaagtcgtgattctgtgatactggactctgagaaagatgatatccactgctgtgcattgggctggctctccatggtttacgaaggagtaccccagtgtcagtgtaattccatcaagaactcatcttcagaggaagagaaacaaaaagagcagtgttctcctttggataccaacagttgtaaacaaggagagagaacttctgatagagatgtcactgttgttcaatttaagagccttgtaaataatccaaagactcctccagatgggaaaagtcattttcctgaactacaagacgacagtagaaaagatacacccaaaacaaaacataaaagcttaccaaggacagaacaagaattagttgctggtcagttttcatctaaatgtgataaactaaatcccttgcaaaatcacaaaagaaaaaaattgaggtttcacgaggtaacctttcactccagtaataaaatgacagcatcttatgaacaagcttctcaggaaacccgacagaagaaacatgtaacacagaactcacgtccactaaaaacaaaaacagcttttttgccaaataaagatgtgtataagaagcatagttctttgggacagtcattatcaccagaaaagataaaattgaaactcaaatcagttagcttcaaacaaaaacgaaagttagaccaagggaacgtattagatatggaagtaaagaaaaagaaacatgataaacaagaacagaaaggaagtgtgggagctacattcaaattaggtgactctttgtcaaacccaaacgaaagagccattgttaaagaaaagatggtatcaaatactaagtctgtagacacgaaagcgagttcatctaaatttagtagaattctaactcctaaggagtatttacaaaggcagaagcataaagaagctctgagtaataaagcatcgaagaaaatctgtgtgaaaaacgtgccatgtgattctgaacatatgagaccaagtaaacttgccgtgcaggttgaaagttgtgggaaatcaaatgagaaacacagcagcggcgtgcagacctctaaagaatcattaaatggcttgacaagccatggtaaaaacctcaaaatccaccattctcaggagtctaaaacatacaacattctaaggaatgttaaagaaaaagttggtgggaagcagcctgataaaatatggattgataagactaaattagacaaattaaccaatataagcaacgaagctcaattcagccaaatgcctccccaagtaaaggatcaaaagaaattatatctgaatagagttgggtttaaatgcactgaacgtgaaagcatttctctcaccaaattagaaagttcacccaggaagcttcataaagataagagacaggaaaataaacataagacctttttaccggtgaaaggtaacacagaaaaatcaaacatgctggagtttaaattatgtccagatatcttactaaagaatacaaactctgtggaagaacggaaggatgtaaagcctcatcctaggaaggagcaagcccctctgcaagtttcaggaataaaaagtacaaaagaagactggttaaaatttgttgctacaaagaaaaggacacagaaagacagccaagagagagataatgttaattcaagactctcgaagagaagcttcagtgcagatggatttgagatgctacaaaacccagtaaaagattcaaaagaaatgtttcaaacctacaaacagatgtacctggagaagagaagcagaagccttggtagcagtcctgtaaaataattacaagatgtggttttgtaattgccactgggaaatttctttccttttctagtttggttcccactttcattgtatttcattgaaagtgcttaattaaaatggcttgagaactttgggtagccatgtgtaagaaatggatggtattcaccggggaaacaaggtatttgaatttctactttattgaaccagatttaccattattttaaaaggaatgcttatacaaatcaatttgaaattctacccatcttgagggaggaccgttcctcagttaaggacttgtttatttaaatgggactgtaaatatgttttggtttctaagctatattagcaaaatttatttttcaaaaatgcccactgtgatgtgaatgtcaaaatatattcttaagtgttttataactaattgtaaactttttttcagaagtcttattttatacttgtgaaactgaacacaattttgggacaacgtttaaacattacttttcatacttgaaataaacatttattttttaaaaaactaaaaaaaaagagaagaacaaacaacaaaacac

SEQ ID NO: 437258 - DNA, 4869 bp, Homo sapiens
cacctccaaagctataccgttactcaccacaaagctttttaccagattctaccattcaaaaacaaaactttataccacatacatcattgcaagttaaaaatagtcagcttccaaattctgtattaactttaccatcaaggcagacctcagctgtaccatcacagcagtatgccacgcaaactgacaaaagacctcctcctcctccttacaactgtagatatggaagccagcctttgcaaagtactcagcatattactaaacacttgtctatggaagttcctcagagtcgagaaatgctgtcatctgaaataaggaccagctttcaacagcagtggcaaaaccctaatgaaaatgtcagcacaattggaaatttcactaacttgaaagtaaataccaacaacaaacagccttttaacagtcccattagatcttctgtggatggtgttcagactcttgctcaaactaatgaagagaaaataatggattcttgcaatccaacttcaaatcaagtactggacacaagtgttgcaaaagaaaagctagtaagggatattaaaacattagtagagataaaacagaagttttcagaacttgcaaggaaaattaaaatcaataaagatcttttgatggcagcaggttgtattaaaatgactaatacttcttatagtgaaccagctcagaattctaaattgtctctaaaacaaactgccaaaatccagtctggaccccagataactccagtaatgccagagaatgcagagagacaaacaccaacagtagtggaatctgcagaaacaaataagactcaatgtatgttgaattctgacattcaggaagtcaattgcagaaggtttaaccaagttgattctgttttaccaaatcctgtctattctgaaaagcggccaatgccagacccatctcatgatgtgaaagttctcacttcaaagacatcagctgttgagatgacccaggcagtattgaatactcagctttcatcagaaaatgttaccaaagttgagcaaaattcaccagcagtttgtgaaacaatttctgttcccaagtccatgtccactgaggaatataaatcaaaaattcaaaatgaaaatatgctacttctcgctttgctttcacaggcacgtaagactcagaagacagtattaaaagatgctaatcaaactattcaggattctaaaccagacagttgtgaaatgaatccaaatacccaaatgactggtaaccaactgaatttgaagaacatggaaactccaagtacttctaatgtaagtggcagggttttggacaactccttttgcagtggacaagaatcctcaacaaaaggaatgcctgctaaaagtgacagtagctgttccatggaagtgctagcaacctgtctttccctgtggaaaaagcaaccttcagatactgcaaaagaaaaggagtgtgataaactcagaacaaacacaacagcagttggaatttcaaagcctgctaacatccacgttaagagtccttgttcagttgtgggaaattcaaattctcagaataaaataagtaatccctcacagcagacagctttgtcgatggtaatgcacaattatgagtcttcaggtataaatataacaaagggaacagaacttcagatagctgtagtgtcaccgttagttctgtcagaggtcaaaacattgtctgtcaaaggaataacacctgcagtgttacctgaaacagtgtatcccgttattaaagaaggcagtgtttgtagtttacaaaatcaattggcagaaaatgcaaaggcaactgctgctttgaaagttgatgttagtggaccagtagcaagtacagcaacatcaaccaagatttttccactaactcagaaggaaaagcagaatgagtcaactaatggtaattcagaagtcacacctaatgtcaatcaaggaaagcataacaaattagagtcagctatccattctcctatgaacgatcagcaaatctcacaggagtcaaggaatagtactgttgtgagtagtgatacattacagattgacaatatttgttctctggttgaaggtgatacctcttacaattcccaaatagcaaagatattcagctctcttcccttgaaaatggttgagccacagaaaccttctctacccaatcagcaagggattggcagcagagaaccagaaaaacaattagataataccactgaaaataaagactttggttttcaaaaagataaacctgtacagtgcacagatgtttcacataaaatatgtgatcagtcaaagtcagagccacccttagagtcatcttttaacaatcttgaaacaaacagagttattctagagaaaagtagtttggagcatgccactgaaaaaagcacagctaacgatacgtgctcgtcagctgctattcaggaggatatttaccctcaggaaatagatgcatccagcaactatactccccaagatcctgcaagaaatgaaatccacagtgataaggcacctgtcttatacctacatgaccagctgtcagaacttctaaaagagtttccttatggcattgaggctgtgaatacacgtgaaggttctgtgggccagcaaactacataccagacctcagaagatcaaactgctgataaaaccagttctgactccaaagacccagcagatcaaatacaaattacaatattaagctcagagcaaatgaaagaaatatttcctgaacaggatgatcaaccctatgtagtagacaagttggcagaacctcagaaagaagagcccatcacagaagtagttagccagtgtgacctgcaggcacctgcagctggacaaagtcgtgattctgtgatactggactctgagaaagatgatatccactgctgtgcattgggctggctctccatggtttacgaaggagtaccccagtgtcagtgtaattccatcaagaactcatcttcagaggaagagaaacaaaaagagcagtgttctcctttggataccaacagttgtaaacaaggagagagaacttctgatagagatgtcactgttgttcaatttaagagccttgtaaataatccaaagactcctccagatgggaaaagtcattttcctgaactacaagacgacagtagaaaagatacacccaaaacaaaacataaaagcttaccaaggacagaacaagaattagttgctggtcagttttcatctaaatgtgataaactaaatcccttgcaaaatcacaaaagaaaaaaattgaggtttcacgaggtaacctttcactccagtaataaaatgacagcatcttatgaacaagcttctcaggaaacccgacagaagaaacatgtaacacagaactcacgtccactaaaaacaaaaacagcttttttgccaaataaagatgtgtataagaagcatagttctttgggacagtcattatcaccagaaaagataaaattgaaactcaaatcagttagcttcaaacaaaaacgaaagttagaccaagggaacgtattagatatggaagtaaagaaaaagaaacatgataaacaagaacagaaaggaagtgtgggagctacattcaaattaggtgactctttgtcaaacccaaacgaaagagccattgttaaagaaaagatggtatcaaatactaagtctgtagacacgaaagcgagttcatctaaatttagtagaattctaactcctaaggagtatttacaaaggcagaagcataaagaagctctgagtaataaagcatcgaagaaaatctgtgtgaaaaacgtgccatgtgattctgaacatatgagaccaagtaaacttgccgtgcaggttgaaagttgtgggaaatcaaatgagaaacacagcagcggcgtgcagacctctaaagaatcattaaatggcttgacaagccatggtaaaaacctcaaaatccaccattctcaggagtctaaaacatacaacattctaaggaatgttaaagaaaaagttggtgggaagcagcctgataaaatatggattgataagactaaattagacaaattaaccaatataagcaacgaagctcaattcagccaaatgcctccccaagtaaaggatcaaaagaaattatatctgaatagagttgggtttaaatgcactgaacgtgaaagcatttctctcaccaaattagaaagttcacccaggaagcttcataaagataagagacaggaaaataaacataagacctttttaccggtgaaaggtaacacagaaaaatcaaacatgctggagtttaaattatgtccagatatcttactaaagaatacaaactctgtggaagaacggaaggatgtaaagcctcatcctaggaaggagcaagcccctctgcaagtttcaggaataaaaagtacaaaagaagactggttaaaatttgttgctacaaagaaaaggacacagaaagacagccaagagagagataatgttaattcaagactctcgaagagaagcttcagtgcagatggatttgagatgctacaaaacccagtaaaagattcaaaagaaatgtttcaaacctacaaacagatgtacctggagaagagaagcagaagccttgacggagttttgctctgcctcccatacaggctggagtgccgtggcgcggtcttagctcactgcagcctctgcctcccgggctcgggctattctcctgcctcagcctcccgagtggctgcgattaacaggaaagttggccgggcatggtgggaggcacctgtagtcccagctactcgggaggctgaggcaggagaatggcgtgaacccgggaggcagagcttgcagtgcgccgagatcgcgccactgcactccagcctgggcgacagagccagactccttctca

SEQ ID NO: 437259 - DNA, 2588 bp, Homo sapiens
cacctccaaagctataccgttactcaccacaaagctttttaccagattctaccattcaaaaacaaaactttataccacatacatcattgcaagttaaaaatagtcagcttccaaattctgtattaactttaccatcaaggcagacctcagctgtaccatcacagcagtatgccacgcaaactgacaaaagacctcctcctcctccttacaactgtagatatggaagccagcctttgcaaagtactcagcatattactaaacacttgtctatggaagttcctcagagtcgagaaatgctgtcatctgaaataaggaccagctttcaacagcagtggcaaaaccctaatgaaaatgtcagcacaattggaaatttcactaacttgaaagtaaataccaacaacaaacagccttttaacagtcccattagatcttctgtggatggtgttcagactcttgctcaaactaatgaagagaaaataatggattcttgcaatccaacttcaaatcaagtactggacacaagtgttgcaaaagaaaagctagtaagggatattaaaacattagtagagataaaacagaagttttcagaacttgcaaggaaaattaaaatcaataaagatcttttgatggcagcaggttgtattaaaatgactaatacttcttatagtgaaccagctcagaattctaaattgtctctaaaacaaactgccaaaatccagtctggaccccagataactccagtaatgccagagaatgcagagagacaaacaccaacagtagtggaatctgcagaaacaaataagactcaatgtatgttgaattctgacattcaggaagtcaattgcagaaggtttaaccaagttgattctgttttaccaaatcctgtctattctgaaaagcggccaatgccagacccatctcatgatgtgaaagttctcacttcaaagacatcagctgttgagatgacccaggcagtattgaatactcagctttcatcagaaaatgttaccaaagttgagcaaaattcaccagcagtttgtgaaacaatttctgttcccaagtccatgtccactgaggaatataaatcaaaaattcaaaatgaaaatatgctacttctcgctttgctttcacaggcacgtaagactcagaagacagtattaaaagatgctaatcaaactattcaggattctaaaccagacagttgtgaaatgaatccaaatacccaaatgactggtaaccaactgaatttgaagaacatggaaactccaagtacttctaatgtaagtggcagggttttggacaactccttttgcagtggacaagaatcctcaacaaaaggaatgcctgctaaaagtgacagtagctgttccatggaagtgctagcaacctgtctttccctgtggaaaaagcaaccttcagatactgcaaaagaaaaggagtgtgataaactcagaacaaacacaacagcagttggaatttcaaagcctgctaacatccacgttaagagtccttgttcagttgtgggaaattcaaattctcagaataaaataagtaatccctcacagcagacagctttgtcgatggtaatgcacaattatgagtcttcaggtataaatataacaaagggaacagaacttcagatagctgtagtgtcaccgttagttctgtcagaggtcaaaacattgtctgtcaaaggaataacacctgcagtgttacctgaaacagtgtatcccgttattaaagaaggcagtgtttgtagtttacaaaatcaattggcagaaaatgcaaaggcaactgctgctttgaaagttgatgttagtggaccagtagcaagtacagcaacatcaaccaagatttttccactaactcagaaggaaaagcagaatgagtcaactaatggtaattcagaagtcacacctaatgtcaatcaaggaaagcataacaaattagagtcagctatccattctcctatgaacgatcagcaaatctcacaggagtcaaggaatagtactgttgtgagtagtgatacattacagattgacaatatttgttctctggttgaaggtgatacctcttacaattcccaaatagcaaagatattcagctctcttcccttgaaaatggttgagccacagaaaccttctctacccaatcagcaagggattggcagcagagaaccagaaaaacaattagataataccactgaaaataaagactttggttttcaaaaagataaacctgtacagtgcacagatgtttcacataaaatatgtgatcagtcaaagtcagagccacccttagagtcatcttttaacaatcttgaaacaaacagagttattctagagaaaagtagtttggagcatgccactgaaaaaagcacagctaacgatacgtgctcgtcagctgctattcaggaggatatttaccctcaggaaatagatgcatccagcaactatactccccaagatcctgcaagaaatgaaatccacagtgataaggcacctgtcttatacctacatgaccagctgtcagaacttctaaaagagtttccatgcactctgacttcttctaatctttctgtcctgtca

SEQ ID NO: 437260 - DNA, 611 bp, Homo sapiens
gaaactcttcagtacaagcttctgaaatgacagtacctcaaaagccttctgtgtgccaccgaccttgtaaaattgaaccagttgggattcaaaggtcatataagcctgaacacacaggcccagcattacataacttatgtgggcaaaagccaactattagagacccttactgtagaacacaaaacttggaaatccgtgaagtgttttcattggcagttagcgattacccccagagaattctgggaggaaatgccccacagaagcctagctcagcagaaggaaattgtttgtccattgcaatggagactggagatgctgaggatgaatatgccagagaggaagagctggcatcgatgagagcacagataccaagctattcgagattttatgaaagtggcagttcccttcgagctgagaaccaaagtacaaccttgcccggaccaggaagaaatatgccaaattcacaaatggtgaatattagagatatgtcagacaatgtactgtatcaaaacagaaactaccatttgacaccacggacctcattacatacagcatctagtacaatgtacagtaataccaatccattacggagtaatttttctcctcatttt

SEQ ID NO: 437261 - DNA, 2034 bp, Homo sapiens
gcggccgccacgcagtcccacaatgccccgctcgcaccaccctgagggcggagagaaaggaccgctgccggggatagggcttccgccgagagcgccgagaagtgcgcacgcgcactgaccccgcgggccctagcaaccagagcagtgacagtagcaaccgccggaatggcgaaagcaacaacaatcaaagaagccttagcgagatgggaagagaaaactggccagaggccatctgaagccaaagagataaaactttatgcccagattccccctatagagaagatggatgcatccttgtccatgcttgctaattgcgagaagctttcactgtctacaaactgcattgaaaaaattgccaacctgaatggcttaaaaaacttgaggatattatctttaggaagaaacaacataaagaacttaaatggactggaggcagtaggggacacattagaagaactgtggatctcctacaattttattgagaagttgaaagggatccacataatgaagaaattgaagattctctacatgtctaataacctggtaaaagactgggctgagtttgtgaagctggcagaactgccatgcctcgaagacctggtgtttgtaggcaatcccttggaagagaaacattctgctgagaataactggattgaagaagcaaccaagagagtgcccaaactgaaaaagctggatggtactccagtaattaaaggggatgaggaagaagacaactaatgccacgctttccactgtgtgttaacttatttaaatgtcataagaacaatagataaattttatataattgtctattttaaagattctgtatgggacaaaagtttcttaagataaaacagatcactcattctcatctttttttttcctttaacttattcagtgtttctccccaaaactggtaatgccaaccttatatatcctatttctctttttagaaaccacaaattttcgatttttgtcttcagtctcagttacgtactgtgtagccccatctactaaaacaaaacctttgtagaccagtcatttttaataacaaaggaacaaatgtttttttcagtttgttcattttttttaggttagacattttaaaagatgtacatttgaaaattcagaacatttttcctgaaggtctgtctctgtacaattcagaagcacatgcctttagctcagaaggcagcatggtgatgggaagagttcctcttagaaatacagcaggtccggaaccaagactccaaagttccattggaaaagatatggtgaaaaaaggaaaaagtagtatctcagagaccttctagtctatattatacttatttgtttttccaaaaatgtgcacattgtcaactggaatttaggttgtttttatatgcatggccacttgagtcattgtgtacagtcattctgtgatctcagttagtggttaaaatgactgtcatgatcatttctttgactgataatgtggcaatgttactcatgtggacctcgccttaagcacacattttggttttatagttccttatgtgtttaaagcattagttatatttgaattcctagactaaatgctggccattgatgtatgtcaaaatttaccctaattatttggtctggtgaccctcattgttgggaaaagtgactaccatggttataagtaagggtataatgaaacttagtatttcaaaatatattttttgagaagttctaagttaaacagctcttaaaatgtattatgtacgtggttgtggagggaagggagatgtttcattatgagatcccaggcaaatggcaatatgtttgaggattgtctcctacataaagcagtgtaggtgatttaacctcaaaattgcaaagcaatagttagatgcagaggttagaatttatcatgtaaacaaaaaatccttcaggaaaatgtaagacattgtagtcagtaagcagatgaggtcataggaggccatggctggatcactattagattgcagaaaagaagtcaggggccctctgccaaattgtgcctaaagtccc

SEQ ID NO: 437262 - DNA, 2574 bp, Homo sapiens
gcggccgccacgcagtcccacaatgccccgctcgcaccaccctgagggcggagagaaaggaccgctgccggggatagggcttccgccgagagcgccgagaagtgcgcacgcgcactgaccccgcgggccctagcaaccagagcagtgacagtagcaaccgccggaatggaagctttcactgtctacaaactgcattgaaaaaattgccaacctgaatggcttaaaaaacttgaggatattatctttaggaagaaacaacataaagaacttaaatggactggaggcagtaggggacacattagaagaactgtggatctcctacaattttattgagaagttgaaagggatccacataatgaagaaattgaagattctctacatgtctaataacctggtaaaagactgggctgagtttgtgaagctggcagaactgccatgcctcgaagacctggtgtttgtaggcaatcccttggaagagaaacattctgctgagaataactggattgaagaagcaaccaagagagtgcccaaactgaaaaagctggatggtactccagtaattaaaggggatgaggaagaagacaactaatgccacgctttccactgtgtgttaacttatttaaatgtcataagaacaatagataaattttatataattgtctattttaaagattctgtatgggacaaaagtttcttaagataaaacagatcactcattctcatctttttttttcctttaacttattcagtgtttctccccaaaactggtaatgccaaccttatatatcctatttctctttttagaaaccacaaattttcgatttttgtcttcagtctcagttacgtactgtgtagccccatctatcgggaggctgaggcaggagaattgcttgaacccgggaggcagaggcttcagtgagccgaaatagtgtgactgtactccagcctgggtgacagagtaagtctccgtctcaaaaagaaaaaaaaaatgtggttcttttgtggaaagaggaatttgaacttgaataaacacttcttttgacaccttttaccagtggtctgaagcagaataaggaagaataagaaatgaatcttgactgttgacttattctgagaattggtgatgtgtaaagagagttggaatcttctacctgggtttttctcagggctaaatggaaaagcacagggcccagaaaggttggagttaatcattcacttaaaagcattaggaggaagtgtcaaagcatcagtcatgaatagattatgtctctctgactacagtcagaccatcaattcactaagaccttatactctgtaagtgttggtaaaggaagaaaactgctaaattgcatgttaccctttactagaaattcattcctttggcacagattttatttatttggggctgtttaatgtgtctgtaaatcatgaaatataaaagcaagattcagtgtagcagagttggtgcttcttctgacaagctaacttgaccatatttctttatctgtgctctaacatgtgtcatattgttttctttttgtaaaccataaaatgggtgaacttccaaaaatcaagggtcatgttttaaaatcatggaacttttagaaataccatatctgtatctctattcctgcattttataaatctgtaaaggaagaaaactgaaaggaagaactagactgagtcttacctttctctgacctaagataaactgataaaactttttacttgatatttggagaagtcattaactggattctagttaatttcccatattgggcagtttagaggagacccagccaaccaaattatgatctagcaaatttaacataggggaagagggatagtaaactatttttcagtagatttgcactttaaacttaggaactggatgttggtggaaaggacttccatagggcagatgggtaaatatctagcctgcacttggatgttagagaatcaaacctcacccttgctcgttctaaacccacatgagtagttaactgtcttttgacataatcagagtcaggatttccctttttccctacttgagtcgtcttccatgtctgttacatccaagatcatccctctgggggatgtgtcaagtagttctcctactcagaatagaagctttgcgaattatcattcccacctctagattttaaatgaatgtagagttgtctaacattatatgggtgggaggctctttgcctctgtgatcagtagggtacctgcctctgaggtgctactgcctggagggatcactcccatcaaaagactggtgagttggaagctaagagcacatgcgcatagccagctcctctcccaggctggcagtcatgattacgagcatcattccagaatctttggcttctagaaccaactccattctgaagaacattttaacatctatgaataccttggtaataatcttttatacacaggagttttgtagcatgactttatgactaaacttattgtgaattaagttatttagaaatgttgagtttctgaatgttattttgtgatttgtttcaaaatagtaataaattgtgttattttgtaaaaaaaaaa

SEQ ID NO: 437263 - DNA, 2682 bp, Homo sapiens
aaatgtatttttctcataggaagagaaaactggccagaggccatctgaagccaaagagataaaactttatgcccagattccccctatagagaagatggatgcatccttgtccatgcttgctaattgcgagaagctttcactgtctacaaactgcattgaaaaaattgccaacctgaatggcttaaaaaacttgaggatattatctttaggaagaaacaacataaagaacttaaatggactgagatggggtttcaccgtagtagccaggatggtctcgatctcctgacctcatgatccgcctgcctcggcctcccaaagtgctgggattacaggcgtgagccaccacacctgggcaaaatttgatatttgtgatgttctaaataaattggaggcagtaggggacacattagaagaactgtggatctcctacaattttattgagaagttgaaagggatccacataatgaagaaattgaagattctctacatgtctaataacctggtaaaagactgggctgagtttgtgaagctggcagaactgccatgcctcgaagacctggtgtttgtaggcaatcccttggaagagaaacattctgctgagaataactggattgaagaagcaaccaagagagtgcccaaactgaaaaagctggatggtactccagtaattaaaggggatgaggaagaagacaactaatgccacgctttccactgtgtgttaacttatttaaatgtcataagaacaatagataaattttatataattgtctattttaaagattctgtatgggacaaaagtttcttaagataaaacagatcactcattctcatctttttttttcctttaacttattcagtgtttctccccaaaactggtaatgccaaccttatatatcctatttctctttttagaaaccacaaattttcgatttttgtcttcagtctcagttacgtactgtgtagccccatctatcgggaggctgaggcaggagaattgcttgaacccgggaggcagaggcttcagtgagccgaaatagtgtgactgtactccagcctgggtgacagagtaagtctccgtctcaaaaagaaaaaaaaaatgtggttcttttgtggaaagaggaatttgaacttgaataaacacttcttttgacaccttttaccagtggtctgaagcagaataaggaagaataagaaatgaatcttgactgttgacttattctgagaattggtgatgtgtaaagagagttggaatcttctacctgggtttttctcagggctaaatggaaaagcacagggcccagaaaggttggagttaatcattcacttaaaagcattaggaggaagtgtcaaagcatcagtcatgaatagattatgtctctctgactacagtcagaccatcaattcactaagaccttatactctgtaagtgttggtaaaggaagaaaactgctaaattgcatgttaccctttactagaaattcattcctttggcacagattttatttatttggggctgtttaatgtgtctgtaaatcatgaaatataaaagcaagattcagtgtagcagagttggtgcttcttctgacaagctaacttgaccatatttctttatctgtgctctaacatgtgtcatattgttttctttttgtaaaccataaaatgggtgaacttccaaaaatcaagggtcatgttttaaaatcatggaacttttagaaataccatatctgtatctctattcctgcattttataaatctgtaaaggaagaaaactgaaaggaagaactagactgagtcttacctttctctgacctaagataaactgataaaactttttacttgatatttggagaagtcattaactggattctagttaatttcccatattgggcagtttagaggagacccagccaaccaaattatgatctagcaaatttaacataggggaagagggatagtaaactatttttcagtagatttgcactttaaacttaggaactggatgttggtggaaaggacttccatagggcagatgggtaaatatctagcctgcacttggatgttagagaatcaaacctcacccttgctcgttctaaacccacatgagtagttaactgtcttttgacataatcagagtcaggatttccctttttccctacttgagtcgtcttccatgtctgttacatccaagatcatccctctgggggatgtgtcaagtagttctcctactcagaatagaagctttgcgaattatcattcccacctctagattttaaatgaatgtagagttgtctaacattatatgggtgggaggctctttgcctctgtgatcagtagggtacctgcctctgaggtgctactgcctggagggatcactcccatcaaaagactggtgagttggaagctaagagcacatgcgcatagccagctcctctcccaggctggcagtcatgattacgagcatcattccagaatctttggcttctagaaccaactccattctgaagaacattttaacatctatgaataccttggtaataatcttttatacacaggagttttgtagcatgactttatgactaaacttattgtgaattaagttatttagaaatgttgagtttctgaatgttattttgtgatttgtttcaaaatagtaataaattgtgttattttgtaaaaaaaaaa

SEQ ID NO: 437264 - DNA, 2219 bp, Homo sapiens
aggcatgagccaccgtgcctggccaaatttcttctattcttgtaagtgatggtaaaactctggaatcagtccagtattttagtttttcacagcaaatttgattttagtctaccaaggagtttaacttttctatgttccctaactctaagattagggctgtattacctagacaggccttaaaaggtttttgtgttgttctctgttaataagaatttgttcctttaaaccagaggatcaaccttggaactattaacattttgggattgataattcattgttgttgggggctgtcctgtgtgcttaggatgttcagctgcagccctggcctctacccactagattccagtagaccccctcctcagccatgacaacaaagatatctccagacattgccatctgtcccttgggtaggagggtgggaacaaattctcccttagttgtactttttataccaacatcacttgtgtccagggtccatttattttcagtctgtagccatgtgccacttgaattgttatatgagagaaggtgatgtattcagtaatcatggatggaaagaaatggtcactggtattttttgtaatgtccagcctgggtgacagagtaagtctccgtctcaaaaagaaaaaaaaaatgtggttcttttgtggaaagaggaatttgaacttgaataaacacttcttttgacaccttttaccagtggtctgaagcagaataaggaagaataagaaatgaatcttgactgttgacttattctgagaattggtgatgtgtaaagagagttggaatcttctacctgggtttttctcagggctaaatggaaaagcacagggcccagaaaggttggagttaatcattcacttaaaagcattaggaggaagtgtcaaagcatcagtcatgaatagattatgtctctctgactacagtcagaccatcaattcactaagaccttatactctgtaagtgttggtaaaggaagaaaactgctaaattgcatgttaccctttactagaaattcattcctttggcacagattttatttatttggggctgtttaatgtgtctgtaaatcatgaaatataaaagcaagattcagtgtagcagagttggtgcttcttctgacaagctaacttgaccatatttctttatctgtgctctaacatgtgtcatattgttttctttttgtaaaccataaaatgggtgaacttccaaaaatcaagggtcatgttttaaaatcatggaacttttagaaataccatatctgtatctctattcctgcattttataaatctgtaaaggaagaaaactgaaaggaagaactagactgagtcttacctttctctgacctaagataaactgataaaactttttacttgatatttggagaagtcattaactggattctagttaatttcccatattgggcagtttagaggagacccagccaaccaaattatgatctagcaaatttaacataggggaagagggatagtaaactatttttcagtagatttgcactttaaacttaggaactggatgttggtggaaaggacttccatagggcagatgggtaaatatctagcctgcacttggatgttagagaatcaaacctcacccttgctcgttctaaacccacatgagtagttaactgtcttttgacataatcagagtcaggatttccctttttccctacttgagtcgtcttccatgtctgttacatccaagatcatccctctgggggatgtgtcaagtagttctcctactcagaatagaagctttgcgaattatcattcccacctctagattttaaatgaatgtagagttgtctaacattatatgggtgggaggctctttgcctctgtgatcagtagggtacctgcctctgaggtgctactgcctggagggatcactcccatcaaaagactggtgagttggaagctaagagcacatgcgcatagccagctcctctcccaggctggcagtcatgattacgagcatcattccagaatctttggcttctagaaccaactccattctgaagaacattttaacatctatgaataccttggtaataatcttttatacacaggagttttgtagcatgactttatgactaaacttattgtgaattaagttatttagaaatgttgagtttctgaatgttattttgtgatttgtttcaaaatagtaataaattgtgttattttgtaaaaaaaaaa

SEQ ID NO: 437265 - DNA, 2437 bp, Homo sapiens
aagcagtggtatcaacgcagagggcccattacggccggggctagcaaccagagcagtgacagtagcaaccgccggaatggcgaaagcaacaacaatcaaagaagccttagcgagatgggaagagaaaactggccagaggccatctgaagccaaagagataaaactttatgcccagattccccctatagagaagatggatgcatccttgtccatgcttgctaattgcgagaagctttcactgtctacaaactgcattgaaaaaattgccaacctgaatggcttaagaggcagtaggggacacattagaagaactgtggatctcctacaattttattgagaagttgaaagggatccacataatgaagaaattgaagattctctacatgtctaataacctggtaaaagactggggtactccagtaattaaaggggatgaggaagaagacaactaatgccacgctttccactgtgtgttaacttatttaaatgtcataagaacaatagataaattttatataattgtctattttaaagattctgtatgggacaaaagtttcttaagataaaacagatcactcattctcatctttttttttcctttaacttattcagtgtttctccccaaaactggtaatgccaaccttatatatcctatttctctttttagaaaccacaaattttcgatttttgtcttcagtctcagttacgtactgtgtagccccatctatcgggaggctgaggcaggagaattgcttgaacccgggaggcagaggcttcagtgagccgaaatagtgtgactgtactccagcctgggtgacagagtaagtctccgtctcaaaaagaaaaaaaaaatgtggttcttttgtggaaagaggaatttgaacttgaataaacacttcttttgacaccttttaccagtggtctgaagcagaataaggaagaataagaaatgaatcttgactgttgacttattctgagaattggtgatgtgtaaagagagttggaatcttctacctgggtttttctcagggctaaatggaaaagcacagggcccagaaaggttggagttaatcattcacttaaaagcattaggaggaagtgtcaaagcatcagtcatgaatagattatgtctctctgactacagtcagaccatcaattcactaagaccttatactctgtaagtgttggtaaaggaagaaaactgctaaattgcatgttaccctttactagaaattcattcctttggcacagattttatttatttggggctgtttaatgtgtctgtaaatcatgaaatataaaagcaagattcagtgtagcagagttggtgcttcttctgacaagctaacttgaccatatttctttatctgtgctctaacatgtgtcatattgttttctttttgtaaaccataaaatgggtgaacttccaaaaatcaagggtcatgttttaaaatcatggaacttttagaaataccatatctgtatctctattcctgcattttataaatctgtaaaggaagaaaactgaaaggaagaactagactgagtcttacctttctctgacctaagataaactgataaaactttttacttgatatttggagaagtcattaactggattctagttaatttcccatattgggcagtttagaggagacccagccaaccaaattatgatctagcaaatttaacataggggaagagggatagtaaactatttttcagtagatttgcactttaaacttaggaactggatgttggtggaaaggacttccatagggcagatgggtaaatatctagcctgcacttggatgttagagaatcaaacctcacccttgctcgttctaaacccacatgagtagttaactgtcttttgacataatcagagtcaggatttccctttttccctacttgagtcgtcttccatgtctgttacatccaagatcatccctctgggggatgtgtcaagtagttctcctactcagaatagaagctttgcgaattatcattcccacctctagattttaaatgaatgtagagttgtctaacattatatgggtgggaggctctttgcctctgtgatcagtagggtacctgcctctgaggtgctactgcctggagggatcactcccatcaaaagactggtgagttggaagctaagagcacatgcgcatagccagctcctctcccaggctggcagtcatgattacgagcatcattccagaatctttggcttctagaaccaactccattctgaagaacattttaacatctatgaataccttggtaataatcttttatacacaggagttttgtagcatgactttatgactaaacttattgtgaattaagttatttagaaatgttgagtttctgaatgttattttgtgatttgtttcaaaatagtaataaattgtgttattttgtaaaaaaaaaa

SEQ ID NO: 437266 - DNA, 1821 bp, Homo sapiens
cttgaggtcaggagttcgaggccagcctggccaacgtggtgaaaccccatgtctaccaaaaatataaaaagatagccgggcgtggtggcgcatgcctgtaatcccagctactcgggaggctgaggcaggagaattgcttgaacccgggaggcagaggcttcagtgagccgaaatagtgtgactgtactccagcctgggtgacagagtaagtctccgtctcaaaaagaaaaaaaaaatgtggttcttttgtggaaagaggaatttgaacttgaataaacacttcttttgacaccttttaccagtggtctgaagcagaataaggaagaataagaaatgaatcttgactgttgacttattctgagaattggtgatgtgtaaagagagttggaatcttctacctgggtttttctcagggctaaatggaaaagcacagggcccagaaaggttggagttaatcattcacttaaaagcattaggaggaagtgtcaaagcatcagtcatgaatagattatgtctctctgactacagtcagaccatcaattcactaagaccttatactctgtaagtgttggtaaaggaagaaaactgctaaattgcatgttaccctttactagaaattcattcctttggcacagattttatttatttggggctgtttaatgtgtctgtaaatcatgaaatataaaagcaagattcagtgtagcagagttggtgcttcttctgacaagctaacttgaccatatttctttatctgtgctctaacatgtgtcatattgttttctttttgtaaaccataaaatgggtgaacttccaaaaatcaagggtcatgttttaaaatcatggaacttttagaaataccatatctgtatctctattcctgcattttataaatctgtaaaggaagaaaactgaaaggaagaactagactgagtcttacctttctctgacctaagataaactgataaaactttttacttgatatttggagaagtcattaactggattctagttaatttcccatattgggcagtttagaggagacccagccaaccaaattatgatctagcaaatttaacataggggaagagggatagtaaactatttttcagtagatttgcactttaaacttaggaactggatgttggtggaaaggacttccatagggcagatgggtaaatatctagcctgcacttggatgttagagaatcaaacctcacccttgctcgttctaaacccacatgagtagttaactgtcttttgacataatcagagtcaggatttccctttttccctacttgagtcgtcttccatgtctgttacatccaagatcatccctctgggggatgtgtcaagtagttctcctactcagaatagaagctttgcgaattatcattcccacctctagattttaaatgaatgtagagttgtctaacattatatgggtgggaggctctttgcctctgtgatcagtagggtacctgcctctgaggtgctactgcctggagggatcactcccatcaaaagactggtgagttggaagctaagagcacatgcgcatagccagctcctctcccaggctggcagtcatgattacgagcatcattccagaatctttggcttctagaaccaactccattctgaagaacattttaacatctatgaataccttggtaataatcttttatacacaggagttttgtagcatgactttatgactaaacttattgtgaattaagttatttagaaatgttgagtttctgaatgttattttgtgatttgtttcaaaatagtaataaattgtgttattttgtaaaaaaaaaa

SEQ ID NO: 437267 - DNA, 617 bp, Homo sapiens
aggcatgagccaccgtgcctggccaaatttcttctattcttgtaagtgatggtaaaactctggaatcagtccagtattttagtttttcacagcaaatttgattttagtctaccaaggagtttaacttttctatgttccctaactctaagattagggctgtattacctagacaggccttaaaaggtttttgtgttgttctctgttaataagaatttgttcctttaaaccagaggatcaaccttggaactattaacattttgggattgataattcattgttgttgggggctgtcctgtgtgcttaggatgttcagctgcagccctggcctctacccactagattccagtagaccccctcctcagccatgacaacaaagatatctccagacattgccatctgtcccttgggtaggagggtgggaacaaattctcccttagttgtactttttataccaacatcacttgtgtccagggtccatttattttcagtctgtagccatgtgccacttgaattgttatatgagagaaggtgatgtattcagtaatcatggatggaaagaaatggtcactggtattttttgtaatgctcatttttttttttttttgagacagagtctc

SEQ ID NO: 437268 - DNA, 2634 bp, Homo sapiens
aagcagtggtatcaacgcagagggcccattacggccggggctagcaaccagagcagtgacagtagcaaccgccggaatggcgaaagcaacaacaatcaaagaagccttagcgagatgggaagagaaaactggccagaggccatctgaagccaaagagataaaactttatgcccagattccccctatagagaagatggatgcatccttgtccatgcttgctaattgcgagaagctttcactgtctacaaactgcattgaaaaaattgccaacctgaatggcttaaaaaacttgaggatattatctttaggaagaaacaacataaagaacttaaatggactggaggcagtaggggacacattagaagaactgtggatctcctacaattttattgagaagttgaaagggatccacataatgaagaaattgaagattctctacatgtctaataacctggtaaaagactgggctgagtttgtgaagctggcagaactgccatgcctcgaagacctggtgtttgtaggcaatcccttggaagagaaacattctgctgagaataactggattgaagaagcaaccaagagagtgcccaaactgaaaaagctggatggtactccagtaattaaaggggatgaggaagaagacaactaatgccacgctttccactgtgtgttaacttatttaaatgtcataagaacaatagataaattttatataattgtctattttaaagattctgtatgggacaaaagtttcttaagataaaacagatcactcattctcatctttttttttcctttaacttattcagtgtttctccccaaaactggtaatgccaaccttatatatcctatttctctttttagaaaccacaaattttcgatttttgtcttcagtctcagttacgtactgtgtagccccatctatcgggaggctgaggcaggagaattgcttgaacccgggaggcagaggcttcagtgagccgaaatagtgtgactgtactccagcctgggtgacagagtaagtctccgtctcaaaaagaaaaaaaaaatgtggttcttttgtggaaagaggaatttgaacttgaataaacacttcttttgacaccttttaccagtggtctgaagcagaataaggaagaataagaaatgaatcttgactgttgacttattctgagaattggtgatgtgtaaagagagttggaatcttctacctgggtttttctcagggctaaatggaaaagcacagggcccagaaaggttggagttaatcattcacttaaaagcattaggaggaagtgtcaaagcatcagtcatgaatagattatgtctctctgactacagtcagaccatcaattcactaagaccttatactctgtaagtgttggtaaaggaagaaaactgctaaattgcatgttaccctttactagaaattcattcctttggcacagattttatttatttggggctgtttaatgtgtctgtaaatcatgaaatataaaagcaagattcagtgtagcagagttggtgcttcttctgacaagctaacttgaccatatttctttatctgtgctctaacatgtgtcatattgttttctttttgtaaaccataaaatgggtgaacttccaaaaatcaagggtcatgttttaaaatcatggaacttttagaaataccatatctgtatctctattcctgcattttataaatctgtaaaggaagaaaactgaaaggaagaactagactgagtcttacctttctctgacctaagataaactgataaaactttttacttgatatttggagaagtcattaactggattctagttaatttcccatattgggcagtttagaggagacccagccaaccaaattatgatctagcaaatttaacataggggaagagggatagtaaactatttttcagtagatttgcactttaaacttaggaactggatgttggtggaaaggacttccatagggcagatgggtaaatatctagcctgcacttggatgttagagaatcaaacctcacccttgctcgttctaaacccacatgagtagttaactgtcttttgacataatcagagtcaggatttccctttttccctacttgagtcgtcttccatgtctgttacatccaagatcatccctctgggggatgtgtcaagtagttctcctactcagaatagaagctttgcgaattatcattcccacctctagattttaaatgaatgtagagttgtctaacattatatgggtgggaggctctttgcctctgtgatcagtagggtacctgcctctgaggtgctactgcctggagggatcactcccatcaaaagactggtgagttggaagctaagagcacatgcgcatagccagctcctctcccaggctggcagtcatgattacgagcatcattccagaatctttggcttctagaaccaactccattctgaagaacattttaacatctatgaataccttggtaataatcttttatacacaggagttttgtagcatgactttatgactaaacttattgtgaattaagttatttagaaatgttgagtttctgaatgttattttgtgatttgtttcaaaatagtaataaattgtgttattttgtaaaaaaaaaa

SEQ ID NO: 437269 - DNA, 540 bp, Homo sapiens
ctgtggggaggggtttttaaagttttaaaaatctagcttttgggtgagtgcagtggctcatgccagtaatcccacctcagcctcccaaatagctgggactacaggtgcatggcactatgtctggctaatttttaaatttttctgtagagatgaggtccctccatgttgcctaggctggtcttgaacttttgggctcaagagtcctcctgccttggctccccgaggtgctgggattattatagtcatgagctactgctcctgacctagtgataactttttgaattccaattccttgatcctttagcatcctaggcaaagacaaccatttctgctgggtaaagcacagtgaaaagccctgcttctctgtatacaaatgaaacagattgtacaattaatatgtattgggtgctgcatggtccatcctaacagtagtgctaattgccatatcatttatttttacatttggaagtattttactttggcctcaatgtaattttgtttttttaatgctgtagagtgtatgggatataggtaaggagt

SEQ ID NO: 437270 - DNA, 345 bp, Homo sapiens
ctcccaaagggctgggatgatgggtgagccatggtgcccagccgagaatgtccttcaaaaaaatacatttcaattcagacatttatggcaccccgtctcaaaaaaaagaagtgtgccgttgaaaatgaggtttgttcagtactgatcgtggggaaccctttctcctgagataactgtaagagccttgtgtcctgagaggccctggagctattcttggggaattgaggtgggcagagattggcagcccctgggacctgcttggctccaggcgatctgacagcagggaggattgcgaagtacagatctgtagacggggcgtggttttcaaaaccatccgtggaggct

SEQ ID NO: 437271 - DNA, 1895 bp, Homo sapiens
ggaaacagcagccgtggccaagctgaccccagagcccttcccttcctggccctccctctgaatcatcgcgctccacttgtgacgtcgcggacgcccggctcgggcaggcgtggggggcccgcgcgtcccgggagccccgaggcggcagcgcgcgtttccacgccgcggtcccgcgggaaagccgggggcggcggcctggctgaggccaagctcggatccggtgccgagccaagcggggccgtgcgtcgccggggcttcgccttcgctcgcgtgacctccgccgtcctccccaaccctcgtcctctggccgcgcctgcggccgcacgcccagcgcccctcgcctaacctcgcgcccgggccgcgcctcctcctcctcctgctccccgccgcttccgtttctcgagggaaaggctgctgcctcctgctctgtcctcatccccggcttagctgacggcccagagggtgggtgccaattccaccagcagctgcaactgaaaagcaaggttcagaaatgtcagatatcctccgggagctgctctgtgtctctgagaaggctgctaacattgcccgggcgtgcagacagcaggaagccctcttccagctgctgatcgaagaaaagaaagagggagaaaagaacaagaagtttgcagttgacttcaagacgctggctgatgtactggtacaggaagttataaaacagaatatggagaacaagtttccaggcttggaaaaaaatatttttggagaagaatccaatgagtttactaatgactggggggaaaagattaccttgaggttgtgttcaacagaggaagaaacagcagagcttcttagcaaagtcctcaatggtaacaaggtggcatctgaagcattagccagggttgttcatcaggatgttgcctttactgacccaactctggattccacagagatcaatgttccacaggacattttgggaatttgggtggaccccatagattcaacttatcagtatataaaaggttctgctgacattaaatccaaccagggaatcttcccctgtggacttcagtgtgtcaccattttaattggtgtctatgacatacagacaggggttcccctgatgggagtcatcaatcaaccttttgtgtcacgagatccaaacaccctcaggtggaaaggacagtgctattggggcctttcttacatggggaccaacatgcattcactacagctcaccatctctagaagaaacggcagtgaaacacacactggaaacaccggctctgaggcagcattctcccccagtttttcagccgtaattagtacaagtgaaaaggagactatcaaagctgcattgtcacgtgtgtgtggagatcgcatatttggggcagctggggctggttataagagcctatgtgttgtccaaggcctcgttgacatttacatcttttcagaagataccacattcaaatgggactcttgtgctgctcatgccatactgcgggccatgggtgggggaatagtagacttgaaagaatgcttagaaagaaatccagaaacagggcttgatttgccacagttggtgtaccacgtggaaaatgagggtgctgctggggtggatcggtgggccaacaagggaggactcattgcatacagatccaggaagcggctggagacattcctgagcctcctggtccaaaacctggcacctgcagagacgcatacctagaggaactctaaccccggtgtacctgtataaactgaactgtgaaactgtttcggttatctctgtcttttgaggatggctttgtcctgttgctggttaacattcaccttcctcttttgaggagtatttttccattatgtattcataataatgttaatttcaataaatgacattcatgcagcaatta

SEQ ID NO: 437272 - DNA, 2012 bp, Homo sapiens
ggaaacagcagccgtggccaagctgaccccagagcccttcccttcctggccctccctctgaatcatcgcgctccacttgtgacgtcgcggacgcccggctcgggcaggcgtggggggcccgcgcgtcccgggagccccgaggcggcagcgcgcgtttccacgccgcggtcccgcgggaaagccgggggcggcggcctggctgaggccaagctcggatccggtgccgagccaagcggggccgtgcgtcgccggggcttcgccttcgctcgcgtgacctccgccgtcctccccaaccctcgtcctctggccgcgcctgcggccgcacgcccagcgcccctcgcctaacctcgcgcccgggccgcgcctcctcctcctcctgctccccgccgcttccgtttctcgagggaaaggctgctgcctcctgctctgtcctcatccccggcttaggtaacacgttttcctccttacgacacccaccacagggtccccgcgccgctgcccctcctccttggatctggggcccgggctggtgagcggcgcgcgccgtcgcctcttcgcgggtagctgacggcccagagggtgggtgccaattccaccagcagctgcaactgaaaagcaaggttcagaaatgtcagatatcctccgggagctgctctgtgtctctgagaaggctgctaacattgcccgggcgtgcagacagcaggaagccctcttccagctgctgatcgaagaaaagaaagagggagaaaagaacaagaagtttgcagttgacttcaagacgctggctgatgtactggtacaggaagttataaaacagaatatggagaacaagtttccaggcttggaaaaaaatatttttggagaagaatccaatgagtttactaatgactggggggaaaagattaccttgaggttgtgttcaacagaggaagaaacagcagagcttcttagcaaagtcctcaatggtaacaaggtggcatctgaagcattagccagggttgttcatcaggatgttgcctttactgacccaactctggattccacagagatcaatgttccacaggacattttgggaatttgggtggaccccatagattcaacttatcagtatataaaaggttctgctgacattaaatccaaccagggaatcttcccctgtggacttcagtgtgtcaccattttaattggtgtctatgacatacagacaggggttcccctgatgggagtcatcaatcaaccttttgtgtcacgagatccaaacaccctcaggtggaaaggacagtgctattggggcctttcttacatggggaccaacatgcattcactacagctcaccatctctagaagaaacggcagtgaaacacacactggaaacaccggctctgaggcagcattctcccccagtttttcagccgtaattagtacaagtgaaaaggagactatcaaagctgcattgtcacgtgtgtgtggagatcgcatatttggggcagctggggctggttataagagcctatgtgttgtccaaggcctcgttgacatttacatcttttcagaagataccacattcaaatgggactcttgtgctgctcatgccatactgcgggccatgggtgggggaatagtagacttgaaagaatgcttagaaagaaatccagaaacagggcttgatttgccacagttggtgtaccacgtggaaaatgagggtgctgctggggtggatcggtgggccaacaagggaggactcattgcatacagatccaggaagcggctggagacattcctgagcctcctggtccaaaacctggcacctgcagagacgcatacctagaggaactctaaccccggtgtacctgtataaactgaactgtgaaactgtttcggttatctctgtcttttgaggatggctttgtcctgttgctggttaacattcaccttcctcttttgaggagtatttttccattatgtattcataataatgttaatttcaataaatgacattcatgcagcaatta

SEQ ID NO: 437273 - DNA, 2152 bp, Homo sapiens
ggaaacagcagccgtggccaagctgaccccagagcccttcccttcctggccctccctctgaatcatcgcgctccacttgtgacgtcgcggacgcccggctcgggcaggcgtggggggcccgcgcgtcccgggagccccgaggcggcagcgcgcgtttccacgccgcggtcccgcgggaaagccgggggcggcggcctggctgaggccaagctcggatccggtgccgagccaagcggggccgtgcgtcgccggggcttcgccttcgctcgcgtgacctccgccgtcctccccaaccctcgtcctctggccgcgcctgcggccgcacgcccagcgcccctcgcctaacctcgcgcccgggccgcgcctcctcctcctcctgctccccgccgcttccgtttctcgagggaaaggctgctgcctcctgctctgtcctcatccccggcttaggtaacacgttttcctccttacgacacccaccacagggtccccgcgccgctgcccctcctccttggatctggggcccgggctggtgagcggcgcgcgccgtcgcctcttcgcgggtaggtgagtcgatggcgccgggagggttcctcgcctctgcgcgccggcctgcgaggtccctgccccggcagcgaggccgcccccggccgggcccggccaggcatgcccggcatcgccgctgcagccagcgcggaggggagctcctgacggcccagagggtgggtgccaattccaccagcagctgcaactgaaaagcaaggttcagaaatgtcagatatcctccgggagctgctctgtgtctctgagaaggctgctaacattgcccgggcgtgcagacagcaggaagccctcttccagctgctgatcgaagaaaagaaagagggagaaaagaacaagaagtttgcagttgacttcaagacgctggctgatgtactggtacaggaagttataaaacagaatatggagaacaagtttccaggcttggaaaaaaatatttttggagaagaatccaatgagtttactaatgactggggggaaaagattaccttgaggttgtgttcaacagaggaagaaacagcagagcttcttagcaaagtcctcaatggtaacaaggtggcatctgaagcattagccagggttgttcatcaggatgttgcctttactgacccaactctggattccacagagatcaatgttccacaggacattttgggaatttgggtggaccccatagattcaacttatcagtatataaaaggttctgctgacattaaatccaaccagggaatcttcccctgtggacttcagtgtgtcaccattttaattggtgtctatgacatacagacaggggttcccctgatgggagtcatcaatcaaccttttgtgtcacgagatccaaacaccctcaggtggaaaggacagtgctattggggcctttcttacatggggaccaacatgcattcactacagctcaccatctctagaagaaacggcagtgaaacacacactggaaacaccggctctgaggcagcattctcccccagtttttcagccgtaattagtacaagtgaaaaggagactatcaaagctgcattgtcacgtgtgtgtggagatcgcatatttggggcagctggggctggttataagagcctatgtgttgtccaaggcctcgttgacatttacatcttttcagaagataccacattcaaatgggactcttgtgctgctcatgccatactgcgggccatgggtgggggaatagtagacttgaaagaatgcttagaaagaaatccagaaacagggcttgatttgccacagttggtgtaccacgtggaaaatgagggtgctgctggggtggatcggtgggccaacaagggaggactcattgcatacagatccaggaagcggctggagacattcctgagcctcctggtccaaaacctggcacctgcagagacgcatacctagaggaactctaaccccggtgtacctgtataaactgaactgtgaaactgtttcggttatctctgtcttttgaggatggctttgtcctgttgctggttaacattcaccttcctcttttgaggagtatttttccattatgtattcataataatgttaatttcaataaatgacattcatgcagcaatta

SEQ ID NO: 437274 - DNA, 2156 bp, Homo sapiens
ggaaacagcagccgtggccaagctgaccccagagcccttcccttcctggccctccctctgaatcatcgcgctccacttgtgacgtcgcggacgcccggctcgggcaggcgtggggggcccgcgcgtcccgggagccccgaggcggcagcgcgcgtttccacgccgcggtcccgcgggaaagccgggggcggcggcctggctgaggccaagctcggatccggtgccgagccaagcggggccgtgcgtcgccggggcttcgccttcgctcgcgtgacctccgccgtcctccccaaccctcgtcctctggccgcgcctgcggccgcacgcccagcgcccctcgcctaacctcgcgcccgggccgcgcctcctcctcctcctgctccccgccgcttccgtttctcgagggaaaggctgctgcctcctgctctgtcctcatccccggcttaggtaacacgttttcctccttacgacacccaccacagggtccccgcgccgctgcccctcctccttggatctggggcccgggctggtgagcggcgcgcgccgtcgcctcttcgcgggtagtccttcagagcttacatcatgtggccgagtttatatacctgattggcaaaacagagcctaagaaccagctctcctgtatcccaagcaaggctctttctaccgcacaccctgcaggcccatccaggcccatccagacaataaacactgacggcccagagggtgggtgccaattccaccagcagctgcaactgaaaagcaaggttcagaaatgtcagatatcctccgggagctgctctgtgtctctgagaaggctgctaacattgcccgggcgtgcagacagcaggaagccctcttccagctgctgatcgaagaaaagaaagagggagaaaagaacaagaagtttgcagttgacttcaagacgctggctgatgtactggtacaggaagttataaaacagaatatggagaacaagtttccaggcttggaaaaaaatatttttggagaagaatccaatgagtttactaatgactggggggaaaagattaccttgaggttgtgttcaacagaggaagaaacagcagagcttcttagcaaagtcctcaatggtaacaaggtggcatctgaagcattagccagggttgttcatcaggatgttgcctttactgacccaactctggattccacagagatcaatgttccacaggacattttgggaatttgggtggaccccatagattcaacttatcagtatataaaaggttctgctgacattaaatccaaccagggaatcttcccctgtggacttcagtgtgtcaccattttaattggtgtctatgacatacagacaggggttcccctgatgggagtcatcaatcaaccttttgtgtcacgagatccaaacaccctcaggtggaaaggacagtgctattggggcctttcttacatggggaccaacatgcattcactacagctcaccatctctagaagaaacggcagtgaaacacacactggaaacaccggctctgaggcagcattctcccccagtttttcagccgtaattagtacaagtgaaaaggagactatcaaagctgcattgtcacgtgtgtgtggagatcgcatatttggggcagctggggctggttataagagcctatgtgttgtccaaggcctcgttgacatttacatcttttcagaagataccacattcaaatgggactcttgtgctgctcatgccatactgcgggccatgggtgggggaatagtagacttgaaagaatgcttagaaagaaatccagaaacagggcttgatttgccacagttggtgtaccacgtggaaaatgagggtgctgctggggtggatcggtgggccaacaagggaggactcattgcatacagatccaggaagcggctggagacattcctgagcctcctggtccaaaacctggcacctgcagagacgcatacctagaggaactctaaccccggtgtacctgtataaactgaactgtgaaactgtttcggttatctctgtcttttgaggatggctttgtcctgttgctggttaacattcaccttcctcttttgaggagtatttttccattatgtattcataataatgttaatttcaataaatgacattcatgcagcaatta

SEQ ID NO: 437275 - DNA, 1686 bp, Homo sapiens
tctgacttgatgaagccccaccaggtgattctggcagtcagccaggcataggaactgctgggatggatatattgccctcaatctaagtgcacagcttttgattcactctctcactggctcactctctctctgtctctcttgcttgctctctcgctctctctgtctcaatctttgtctcattctctcgctgtctctctcgcttctgtctctctctgtgtctcttgctctgtctcgctctcttgctctgtctcactgtctctcgctcactgtctgtctcactcttttgctctctctcgctctctcgctctgtctcgctctctctcgctctcactctgtctcactctgtctcactctctctgtcttgctctctctgtctctcgctcttttgctgtgtctctcgctctctctgtgtgtctctctctcactctcttgctctgtctctctcgcttctctctctgtctctctctctcgctctctctgtctctctcactctttagctctctctctctgttctttctccactgaaactcttgaaatgtaatggcttatcgtgtggctttaccctaggggaaaagattaccttgaggttgtgttcaacagaggaagaaacagcagagcttcttagcaaagtcctcaatggtaacaaggtggcatctgaagcattagccagggttgttcatcaggatgttgcctttactgacccaactctggattccacagagatcaatgttccacaggacattttgggaatttgggtggaccccatagattcaacttatcagtatataaaaggttctgctgacattaaatccaaccagggaatcttcccctgtggacttcagtgtgtcaccattttaattggtgtctatgacatacagacaggggttcccctgatgggagtcatcaatcaaccttttgtgtcacgagatccaaacaccctcaggtggaaaggacagtgctattggggcctttcttacatggggaccaacatgcattcactacagctcaccatctctagaagaaacggcagtgaaacacacactggaaacaccggctctgaggcagcattctcccccagtttttcagccgtaattagtacaagtgaaaaggagactatcaaagctgcattgtcacgtgtgtgtggagatcgcatatttggggcagctggggctggttataagagcctatgtgttgtccaaggcctcgttgacatttacatcttttcagaagataccacattcaaatgggactcttgtgctgctcatgccatactgcgggccatgggtgggggaatagtagacttgaaagaatgcttagaaagaaatccagaaacagggcttgatttgccacagttggtgtaccacgtggaaaatgagggtgctgctggggtggatcggtgggccaacaagggaggactcattgcatacagatccaggaagcggctggagacattcctgagcctcctggtccaaaacctggcacctgcagagacgcatacctagaggaactctaaccccggtgtacctgtataaactgaactgtgaaactgtttcggttatctctgtcttttgaggatggctttgtcctgttgctggttaacattcaccttcctcttttgaggagtatttttccattatgtattcataataatgttaatttcaataaatgacattcatgcagcaatta

SEQ ID NO: 437276 - DNA, 1381 bp, Homo sapiens
  misc_feature (1260)..(1260): n is a, c, g, or t
  misc_feature (1291)..(1292): n is a, c, g, or t
  misc_feature (1306)..(1306): n is a, c, g, or t
  misc_feature (1312)..(1312): n is a, c, g, or t
  misc_feature (1316)..(1316): n is a, c, g, or t
ggaaacagcagccgtggccaagctgaccccagagcccttcccttcctggccctccctctgaatcatcgcgctccacttgtgacgtcgcggacgcccggctcgggcaggcgtggggggcccgcgcgtcccgggagccccgaggcggcagcgcgcgtttccacgccgcggtcccgcgggaaagccgggggcggcggcctggctgaggccaagctcggatccggtgccgagccaagcggggccgtgcgtcgccggggcttcgccttcgctcgcgtgacctccgccgtcctccccaaccctcgtcctctggccgcgcctgcggccgcacgcccagcgcccctcgcctaacctcgcgcccgggccgcgcctcctcctcctcctgctccccgccgcttccgtttctcgagggaaaggctgctgcctcctgctctgtcctcatccccggcttagctgacggcccagagggtgggtgccaattccaccagcagctgcaactgaaaagcaaggttcagaaatgtcagatatcctccgggagctgctctgtgtctctgagaaggctgctaacattgcccgggcgtgcagacagcaggaagccctcttccagctgctgatcgaagaaaagaaagagggagaaaagaacaagaagtttgcagttgacttcaagacgctggctgatgtactggtacaggaagttataaaacagaatatggagaacaagtttccaggcttggaaaaaaatatttttggagaagaatccaatgagtttactaatgactggggggaaaagattaccttgaggttgtgttcaacagaggaagaaacagcagagcttcttagcaaagtcctcaatggtaacaaggtggcatctgaagcattagccagggttgttcatcaggatgttgcctttactgacccaactctggattccacagagatcaatgttccacaggacattttgggaatttgggtggaccccatagattcaacttatcagtatataaaaggttctgctgacattaaatccaaccagggaatcttcccctgtggacttcagtgtgtcaccattttaattggtgtctatgacatacagacaggggttcccctgatgggagtcatcaatcaaccttttgtgtcacgagatccaaacaccctcaggtggaaaggacagtgctattggggcctttcttacatggggaccaacatgcattcactacagctcaccatctctagaagaaacggcagtgaaacacacactggggaccnacatgcattcactacagctcaccatctctannagaacggcagtganacacanctgnaacaccggctctgggggagatgctgcctcagagatccatacaccccgaccggtaccagcctgctt

SEQ ID NO: 437277 - DNA, 1724 bp, Homo sapiens
gaattcatctgtccactgctacccctggctgaggccaagctcggatccggtgccgagccaagcggggccgtgcgtcgccggggcttcgccttcgctcgcgtgacctccgccgtcctccccaaccctcgtcctctggccgcgcctgcggccgcacgcccagcgcccctcgcctaacctcgcgcccgggccgcgcctcctcctcctcctgctccccgccgcttccgtttctcgagggaaaggctgctgcctcctgctctgtcctcatccccggcttagctgacggcccagagggtgggtgccaattccaccagcagctgcaactgaaaagcaaggttcagaaatgtcagatatcctccgggagctgctctgtgtctctgagaaggctgctaacattgcccgggcgtgcagacagcaggaagccctcttccagctgctgatcgaagaaaagaaagagggagaaaagaacaagaagtttgcagttgacttcaagacgctggctgatgtactggtacaggaagttataaaacagaatatggagaacaagtttccaggcttggaaaaaaatatttttggagaagaatccaatgagtttactaatgactggggggaaaagattaccttgaggttgtgttcaacagaggaagaaacagcagagcttcttagcaaagtcctcaatggtaacaaggtggcatctgaagcattagccagggttgttcatcaggatgttgcctttactgacccaactctggattccacagagatcaatgttccacaggacattttgggaatttgggtggaccccatagattcaacttatcagtatataaaaggttctgctgacattaaatccaaccagggaatcttcccctgtggacttcagtgtgtcaccattttaattggtgtctatgacatacagacaggggttcccctgatgggagtcatcaatcaaccttttgtgtcacgagatccaaacaccctcaggtggaaaggacagtgctattggggcctttcttacatggggaccaacatgcattcactacagctcaccatctctagaagaaacggcagtgaaacacacactggaaacaccggctctgaggcagcattctcccccagtttttcagccgtaattagtacaagtgaaaaggagactatcaaagctgcattgtcacgtgtgtgtggagatcgcatatttggggcagctggggctggttataagagcctatgtgttgtccaaggcctcgttgacatttacatcttttcagaagataccacattcaaatgggactcttgtgctgctcatgccatactgcgggccatgggtgggggaatagtagacttgaaagaatgcttagaaagaaatccagaaacagggcttgatttgccacagttggtgtaccacgtggaaaatgagggtgctgctggggtggatcggtgggccaacaagggaggactcattgcatacagatccaggaagcggctggagacattcctgagcctcctggtccaaaacctggcacctgcagagacgcatacctagaggaactctaaccccggtgtacctgtataaactgaactgtgaaactgtttcggttatctctgtcttttgaggatggctttgtcctgttgctggttaacattcaccttcctcttttgaggagtatttttccattatgtattcataataatgttaatttcaataaatgacattcatgcagcaatta

SEQ ID NO: 437278 - DNA, 2039 bp, Homo sapiens
ggaaacagcagccgtggccaagctgaccccagagcccttcccttcctggccctccctctgaatcatcgcgctccacttgtgacgtcgcggacgcccggctcgggcaggcgtggggggcccgcgcgtcccgggagccccgaggcggcagcgcgcgtttccacgccgcggtcccgcgggaaagccgggggcggcggcctggctgaggccaagctcggatccggtgccgagccaagcggggccgtgcgtcgccggggcttcgccttcgctcgcgtgacctccgccgtcctccccaaccctcgtcctctggccgcgcctgcggccgcacgcccagcgcccctcgcctaacctcgcgcccgggccgcgcctcctcctcctcctgctccccgccgcttccgtttctcgagggaaaggctgctgcctcctgctctgtcctcatccccggcttagtccttcagagcttacatcatgtggccgagtttatatacctgattggcaaaacagagcctaagaaccagctctcctgtatcccaagcaaggctctttctaccgcacaccctgcaggcccatccaggcccatccagacaataaacactgacggcccagagggtgggtgccaattccaccagcagctgcaactgaaaagcaaggttcagaaatgtcagatatcctccgggagctgctctgtgtctctgagaaggctgctaacattgcccgggcgtgcagacagcaggaagccctcttccagctgctgatcgaagaaaagaaagagggagaaaagaacaagaagtttgcagttgacttcaagacgctggctgatgtactggtacaggaagttataaaacagaatatggagaacaagtttccaggcttggaaaaaaatatttttggagaagaatccaatgagtttactaatgactggggggaaaagattaccttgaggttgtgttcaacagaggaagaaacagcagagcttcttagcaaagtcctcaatggtaacaaggtggcatctgaagcattagccagggttgttcatcaggatgttgcctttactgacccaactctggattccacagagatcaatgttccacaggacattttgggaatttgggtggaccccatagattcaacttatcagtatataaaaggttctgctgacattaaatccaaccagggaatcttcccctgtggacttcagtgtgtcaccattttaattggtgtctatgacatacagacaggggttcccctgatgggagtcatcaatcaaccttttgtgtcacgagatccaaacaccctcaggtggaaaggacagtgctattggggcctttcttacatggggaccaacatgcattcactacagctcaccatctctagaagaaacggcagtgaaacacacactggaaacaccggctctgaggcagcattctcccccagtttttcagccgtaattagtacaagtgaaaaggagactatcaaagctgcattgtcacgtgtgtgtggagatcgcatatttggggcagctggggctggttataagagcctatgtgttgtccaaggcctcgttgacatttacatcttttcagaagataccacattcaaatgggactcttgtgctgctcatgccatactgcgggccatgggtgggggaatagtagacttgaaagaatgcttagaaagaaatccagaaacagggcttgatttgccacagttggtgtaccacgtggaaaatgagggtgctgctggggtggatcggtgggccaacaagggaggactcattgcatacagatccaggaagcggctggagacattcctgagcctcctggtccaaaacctggcacctgcagagacgcatacctagaggaactctaaccccggtgtacctgtataaactgaactgtgaaactgtttcggttatctctgtcttttgaggatggctttgtcctgttgctggttaacattcaccttcctcttttgaggagtatttttccattatgtattcataataatgttaatttcaataaatgacattcatgcagcaatta

SEQ ID NO: 437279 - DNA, 1948 bp, Homo sapiens
ggaaacagcagccgtggccaagctgaccccagagcccttcccttcctggccctccctctgaatcatcgcgctccacttgtgacgtcgcggacgcccggctcgggcaggcgtggggggcccgcgcgtcccgggagccccgaggcggcagcgcgcgtttccacgccgcggtcccgcgggaaagccgggggcggcggcctggctgaggccaagctcggatccggtgccgagccaagcggggccgtgcgtcgccggggcttcgccttcgctcgcgtgacctccgccgtcctccccaaccctcgtcctctggccgcgcctgcggccgcacgcccagcgcccctcgcctaacctcgcgcccgggccgcgcctcctcctcctcctgctccccgccgcttccgtttctcgagggaaaggctgctgcctcctgctctgtcctcatccccggcttagggtgaaagaaagcactacttcaatattgctgctaagcatatgatcattctaagctgacggcccagagggtgggtgccaattccaccagcagctgcaactgaaaagcaaggttcagaaatgtcagatatcctccgggagctgctctgtgtctctgagaaggctgctaacattgcccgggcgtgcagacagcaggaagccctcttccagctgctgatcgaagaaaagaaagagggagaaaagaacaagaagtttgcagttgacttcaagacgctggctgatgtactggtacaggaagttataaaacagaatatggagaacaagtttccaggcttggaaaaaaatatttttggagaagaatccaatgagtttactaatgactggggggaaaagattaccttgaggttgtgttcaacagaggaagaaacagcagagcttcttagcaaagtcctcaatggtaacaaggtggcatctgaagcattagccagggttgttcatcaggatgttgcctttactgacccaactctggattccacagagatcaatgttccacaggacattttgggaatttgggtggaccccatagattcaacttatcagtatataaaaggttctgctgacattaaatccaaccagggaatcttcccctgtggacttcagtgtgtcaccattttaattggtgtctatgacatacagacaggggttcccctgatgggagtcatcaatcaaccttttgtgtcacgagatccaaacaccctcaggtggaaaggacagtgctattggggcctttcttacatggggaccaacatgcattcactacagctcaccatctctagaagaaacggcagtgaaacacacactggaaacaccggctctgaggcagcattctcccccagtttttcagccgtaattagtacaagtgaaaaggagactatcaaagctgcattgtcacgtgtgtgtggagatcgcatatttggggcagctggggctggttataagagcctatgtgttgtccaaggcctcgttgacatttacatcttttcagaagataccacattcaaatgggactcttgtgctgctcatgccatactgcgggccatgggtgggggaatagtagacttgaaagaatgcttagaaagaaatccagaaacagggcttgatttgccacagttggtgtaccacgtggaaaatgagggtgctgctggggtggatcggtgggccaacaagggaggactcattgcatacagatccaggaagcggctggagacattcctgagcctcctggtccaaaacctggcacctgcagagacgcatacctagaggaactctaaccccggtgtacctgtataaactgaactgtgaaactgtttcggttatctctgtcttttgaggatggctttgtcctgttgctggttaacattcaccttcctcttttgaggagtatttttccattatgtattcataataatgttaatttcaataaatgacattcatgcagcaatta

SEQ ID NO: 437280 - DNA, 1985 bp, Homo sapiens
ggaaacagcagccgtggccaagctgaccccagagcccttcccttcctggccctccctctgaatcatcgcgctccacttgtgacgtcgcggacgcccggctcgggcaggcgtggggggcccgcgcgtcccgggagccccgaggcggcagcgcgcgtttccacgccgcggtcccgcgggaaagccgggggcggcggcctggctgaggccaagctcggatccggtgccgagccaagcggggccgtgcgtcgccggggcttcgccttcgctcgcgtgacctccgccgtcctccccaaccctcgtcctctggccgcgcctgcggccgcacgcccagcgcccctcgcctaacctcgcgcccgggccgcgcctcctcctcctcctgctccccgccgcttccgtttctcgagggaaaggctgctgcctcctgctctgtcctcatccccggcttagctgacggcccagagggtgggtgccaattccaccagcagctgcaactgaaaagcaaggttcagaaatgtcagatatcctccgggagctgctctgtgtctctgagaaggctgctaacattgcccgggcgtgcagacagcaggaagccctcttccagctgctgatcgaagaaaagaaagagggagaaaagaacaagaagtttgcagttgacttcaagacgctggctgatgtactggtacaggaagttataaaacagaatatggagaacaagtttccaggcttggaaaaaaatatttttggagaagaatccaatgagtttactaatgactggggggaaaagattaccttgaggttgtgttcaacagaggaagaaacagcagagcttcttagcaaagtcctcaatggtaacaaggtggcatctgaagcattagccagggttgttcatcaggatgttgcctttactgacccaactctggattccacagagatcaatgttccacaggacattttgggaatttgggtggaccccatagattcaacttatcagtatataaaaggttctgctgacattaaatccaaccagggaatcttcccctgtggacttcagtgtgtcaccattttaattggtgtctatgacatacagacaggggttcccctgatgggagtcatcaatcaaccttttgtgtcacgagatccaaacaccctcaggtggaaaggacagtgctattggggcctttcttacatggggaccaacatgcattcactacagctcaccatctctagaagaaacggcagtgaaacacacactggaaacaccggctctgaggcagcattctcccccagtttttcagccgtaattagtacaagtgaaaaggagactatcaaagctgcattgtcacgtgtgtgtggagatcgcatatttggggcagctggggctggttataagagcctatgtgttgtccaaggcctcgttgacatttacatcttttcagaagataccacattcaaatgggactcttgtgctgctcatgccatactgcgggccatgggtgggggaatagtagacttgaaagaatgcttagaaagaaatccagaaacagggcttgatttgccacagttggtgtaccacgtggaaaatgagggtgctgctggggtggatcggtgggccaacaagggaggactcattgcatacagatccaggaagcggctggagacattcctgagcctcctggtccaaaacctggcacctgcagagacgcatacctagaggaactctaaccccggtgtacctgtataaactgaactgtgaaactgtttcggttatctctgtcttttgaggatggctttgtcctgttgctggttaacattcaccttcctcttttgaggagtatttttccattatgtattcataataatgttaatttcaataaatgacattcatgcagcaattatattggtgtatgaaattcttacagtgaatattgtgctgttagtgctgcttgaaacatttcaataaaatattgaccaggaaaagtggctca

SEQ ID NO: 437281 - DNA, 1666 bp, Homo sapiens
ggaaacagcagccgtggccaagctgaccccagagcccttcccttcctggccctccctctgaatcatcgcgctccacttgtgacgtcgcggacgcccggctcgggcaggcgtggggggcccgcgcgtcccgggagccccgaggcggcagcgcgcgtttccacgccgcggtcccgcgggaaagccgggggcggcggcctggctgaggccaagctcggatccggtgccgagccaagcggggccgtgcgtcgccggggcttcgccttcgctcgcgtgacctccgccgtcctccccaaccctcgtcctctggccgcgcctgcggccgcacgcccagcgcccctcgcctaacctcgcgcccgggccgcgcctcctcctcctcctgctccccgccgcttccgtttctcgagggaaaggctgctgcctcctgctctgtcctcatccccggcttagctgacggcccagagggtgggtgccaattccaccagcagctgcaactgaaaagcaaggttcagaaatgtcagatatcctccgggagctgctctgtgtctctgagaaggctgctaacattgcccgggcgtgcagacagcaggaagccctcttccagctgctgatcgaagaaaagaaagagggagaaaagaacaagaagtttgcagttgacttcaagacgctggctgatgtactggtacaggaagttataaaacagaatatggagaacaagtttccaggcttggaaaaaaatatttttggagaagaatccaatgagtttactaatgactggggggaaaagattaccttgaggttgtgttcaacagaggaagaaacagcagagcttcttagcaaagtcctcaatggtaacaaggtggcatctgaagcattagccagggttgttcatcaggatgttgcctttactgacccaactctggattccacagagatcaatgttccacaggacattttgggaatttgggtggaccccatagattcaacttatcagtatataaaaggttctgctgacattaaatccaaccagggaatcttcccctgtggacttcagtgtgtcaccattttaattggtgtctatgacatacagacaggggttcccctgatgggagtcatcaatcaaccttttgtgtcacgagatccaaacaccctcaggtggaaaggacagtgctattggggcctttcttacatggggaccaacatgcattcactacagctcaccatctctagaagaaacggcagtgaaacacacactggaaacaccggctctgaggcagcattctcccccagtttttcagccgtaattagtacaagtgaaaaggagactatcaaagctgcattgtcacgtgtgtgtggagatcgcatatttggggcagctggggctggttataagagcctatgtgttgtccaaggcctcgttgacatttacatcttttcagaagataccacattcaaatgggactcttgtgctgctcatgccatactgcgggccatgggtgggggaatagtagacttgaaagaatgcttagaaagaaatccagaaacagggcttgatttgccacagttggtgtaccacgtggaaaatgagggtgctgctggggtggatcgtacctgagcctcccggtactggaaactgtttcggtatccgtgtcctgtgcagtgtgcttcc

SEQ ID NO: 437282 - DNA, 265 bp, Homo sapiens
aggcggtggttgcagtgagctgaaatcacaccactgcactccagcctgggtgacagaacgagactccatctcaaaaaaaaaaaagaaaaaagaaaacaagagaaccttgaggattttggtatgtcaaaaatttggctataaggatgtggggtttattacacaactgatgtgtttagatagtttataacaaactgcttctgtgaaaattacaactgatggggaacaggaagagaaaattatcaggaaaggaaagcaggaaagatca

SEQ ID NO: 437283 - DNA, 1096 bp, Homo sapiens
acgcaaagcccggaggcgcgcgcgaccggcggctctttggcgcggattagggggtctcggcgagggagtcatcaagctttggtgtatgtgttggccggttctgaagtcttgaagaagctctgctgaggaagaccaaagcagcactcgttgccaattagggaatggaccgtttgggttcctttagcaatgatccctctgataagccaccttgccgaggctgctcctcctacctcatggagccttatatcaagtgtgctgaatgtgggccacctccttttttcctctgcttgcagtgtttcactcgaggctttgagtacaagaaacatcaaagcgatcatacttatgaaataatgacttcagattttcctgtccttgatcccagctggactgctcaagaagaaatggcccttttagaagctgtgatggactgtggctttggaaattggcaggatgtagccaatcaaatgtgcaccaagaccaaggaggagtgtgagaagcactatatgaagcatttcatcaataaccctctgtttgcatctaccctgctgaacctgaaacaagcagaggaagcaaaaactgctgacacagccattccatttcactctacagatgaccctccccgacctacctttgactccttgctttctcgggacatggccgggtacatgccagctcgagcagatttcattgaggaatttgacaattatgcagaatgggacttgagagacattgattttgttgaagatgactcggacattttacatgctctgaagatggctgtggtagatatctatcattccaggttaaaggagagacaaagacgaaaaaaaattataagagaccatggattaatcaaccttagaaagtttcaattaatggaacggcggtatcccaaggaggtccaggacctgtatgaaacaatgaggcgatttgcaagaattgtggggccagtggaacatgacaaattcattgaaagccatgcatgtaggtggtttttgagccttgagcagtatttgtgtgtgtatatttatataaataggagagataatggtgtgttttatgtgaagttctataaataaataaatggatatttctc

SEQ ID NO: 437284 - DNA, 2527 bp, Homo sapiens
atttttcccgctcagccctggagcgcgtagctctaccaagaatggccactgtgccagatgcccctgaccagcgttgcccatttgaatttcctagcaggccccccaaagtaggtatttcagtaccctgttagagctgaggcgcaggtaaaatgactggcccaggccggtcccaccccgtaaggatttgaacgttggctccacaactcgggagcctgcgcctttcctcctcccaacgtggactcctgcccggcgaagtgcctcacttccttctcccgggagtcatcaagctttggtgtatgtgttggccggttctgaagtcttgaagaagctctgctgaggaagaccaaagcagcactcgttgccaattagggaatggaccgtttgggttcctttagcaatgatccctctgataagccaccttgccgaggctgctcctcctacctcatggagccttatatcaagtgtgctgaatgtgggccacctccttttttcctctgcttgcagtgtttcactcgaggctttgagtacaagaaacatcaaagcgatcatacttatgaaataatgacttcagattttcctgtccttgatcccagctggactgctcaagaagaaatggcccttttagaagctgtgatggactgtggctttggaaattggcaggatgtagccaatcaaatgtgcaccaagaccaaggaggagtgtgagaagcactatatgaagcatttcatcaataaccctctgtttgcatctaccctgctgaacctgaaacaagcagaggaagcaaaaactgctgacacagccattccatttcactctacagatgaccctccccgacctacctttgactccttgctttctcgggacatggccgggtacatgccagctcgagcagatttcattgaggaatttgacaattatgcagaatgggacttgagagacattgattttgttgaagatgactcggacattttacatgctctgaagatggctgtggtagatatctatcattccaggttaaaggagagacaaagacgaaaaaaaattataagagaccatggattaatcaaccttagaaagtttcaattaatggaacggcggtatcccaaggaggtccaggacctgtatgaaacaatgaggcgatttgcaagaattgtggggccagtggaacatgacaaattcattgaaagccatgcattggaatttgaactccgaagggaaatcaagaggctccaagaatacaggacagcaggcattaccaatttttgtagtgccagaacctacgatcacctcaagaagacacgggaggaagagcgccttaaacgcactatgctctcagaagttctccagtatatccaggacagtagtgcttgccagcagtggctccgccggcaagctgacattgattccggcctgagtccttccattccaatggcttcgaattcaggtagacggagtgcaccacccttgaacctcactggcctccctggcacagagaagctgaatgaaaaagaaaaggagctctgtcagatggtgaggttggtccctggagcctatttagaatacaaatctgctctattgaacgaatgtaacaagcaaggaggcttaagactggcgcaggcaagagcactcatcaagatagatgtgaacaaaacccggaaaatctatgatttcctcatcagagaaggatacatcactaaaggctaaggctccaagagcttgggatcagaagtcagaagtttggaatgtggtgggtcaaaggacaatatgggtgggcattctggagagttgtttttcagctgaattctcatggtgaaaacaggggaaaggacaaaggaaaccttaagttgtattgtctactttcttctccatcctgctttaaaacactcctgttgttggtattatgctgcagagttgtgtgctacataagctattattaaatgtgagtgggcattcattcctaacacctcttgtaactaaaagaaccatagtacctcacatcacagtgctggtagaaatggaactaaaccacagtctgtaatcccaggagtccagctcagatccttatattgcgaggtaagtttgctgattatctgtcttgccttcaaacactgcagacagatttaaaataaagagaaaggttttagagcataagaaagctctcgttgaaggattttttaagctgacaactttttttttttttttttgagacagagtttgctcttgtcctccaggctggagtgtgatggcaagatctcagctcactacaacctctgcctcccaggagaattgcttgaacacaggaggcagaggttgcagcgagctgagatcacgccactgtgctccagcctgggcaacaaagtgagactctgtctcaaaaaaaaaaaaacaaaaaaaaacctttaatgtctggctttgtactttgcagtctgcctgtctaatctgcagtagtcttttgaggaggtggcaccggatataacatgtctctgttatttttagaattaattaaaatgttttgctatttaatttg

SEQ ID NO: 437285 - DNA, 2782 bp, Homo sapiens
acgcaaagcccggaggcgcgcgcgaccggcggctctttggcgcggattagggggtctcggcgagggagtcatcaagctttggtgtatgtgttggccggttctgaagtcttgaagaagctctgctgaggaagaccaaagcagcactcgttgccaattagggaatggaccgtttgggttcctttagcaatgatccctctgataagccaccttgccgaggctgctcctcctacctcatggagccttatatcaagtgtgctgaatgtgggccacctccttttttcctctgcttgcagtgtttcactcgaggctttgagtacaagaaacatcaaagcgatcatacttatgaaataatgacttcagattttcctgtccttgatcccagctggactgctcaagaagaaatggcccttttagaagctgtgatggactgtggctttggaaattggcaggatgtagccaatcaaatgtgcaccaagaccaaggaggagtgtgagaagcactatatgaagcatttcatcaataaccctctgtttgcatctaccctgctgaacctgaaacaagcagaggaagcaaaaactgctgacacagccattccatttcactctacagatgaccctccccgacctacctttgactccttgctttctcgggacatggccgggtacatgccagctcgagcagatttcattgaggaatttgacaattatgcagaatgggacttgagagacattgattttgttgaagatgactcggacattttacatgctctgaagatggctgtggtagatatctatcattccaggttaaaggagagacaaagacgaaaaaaaattataagagaccatggattaatcaaccttagaaagtttcaattaatggaacggcggtatcccaaggaggtccaggacctgtatgaaacaatgaggcgatttgcaagaattgtggggccagtggaacatgacaaattcattgaaagccatgcattggaatttgaactccgaagggaaatcaagaggctccaagaatacaggacagcaggcattaccaatttttgtagtgccagaacctacgatcacctcaagaagacacgggaggaagagcgccttaaacgcactatgctctcagaagttctccagtatatccaggacagtagtgcttgccagcagtggctccgccggcaagctgacattgattccggcctgagtccttccattccaatggcttcgaattcaggtagacggagtgcaccacccttgaacctcactggcctccctggcacagagaagctgaatgaaaaagaaaaggagctctgtcagatggtgaggttggtccctggagcctatttagaatacaaatctgctctattgaacgaatgtaacaagcaaggaggcttaagactggcgcaggcaagagcactcatcaagatagatgtgaacaaaacccggaaaatctatgatttcctcatcagagaaggatacatcactaaaggctaaggctccaagagcttgggatcagaagtcagaagtttggaatgtggtgggtcaaaggacaatatgggtgggcattctggagagttgtttttcagctgaattctcatggtgaaaacaggggaaaggacaaaggaaaccttaagttgtattgtctactttcttctccatcctgctttaaaacactcctgttgttggtattatgctgcagagttgtgtgctacataagctattattaaatgtgagtgggcattcattcctaacacctcttgtaactaaaagaaccatagtacctcacatcacagtgctggtagaaatggaactaaaccacagtctgtaatcccaggagtccagctcagatccttatattgcgaggtaagtttgctgattatctgtcttgccttcaaacactgcagacagatttaaaataaagagaaaggttttagagcataagaaagctctcgttgaaggattttttaagctgacaactttttttttttttttttgagacagagtttgctcttgtcctccaggctggagtgtgatggcaagatctcagctcactacaacctctgcctcccaggttcaagtgattctcctgcctcagcctcccgaatagctgggactacaggtgtccaccaccacacctggctaattttgtatttttagtagagacagggttttgtcatgttggccaggctggtcacaaactcctgacctcaggtgatctgcccgcctcagcctcccaaagtactaggattacaggcgtgagccatcgcgcccggcctaagctgacaacttttatgagtaaaggggaagaaaatatccttatgatggtcttatcccaaactgcatctttaacttcggccgggcaaggtggctcgcctgtaatcccagcactttgggaggctgaggtgggcggatcacgaagtcaggagttcaagaccagcctgaccaacatggtgaaacagtctctactggaaatacaaaaattagctgagtgtggtggcacacgcctgtagtcccagctactcgggaggctgaggcaggagaattgcttgaacacaggaggcagaggttgcagcgagctgagatcacgccactgtgctccagcctgggcaacaaagtgagactctgtctcaaaaaaaaaaaaacaaaaaaaaacctttaatgtctggctttgtactttgcagtctgcctgtctaatctgcagtagtcttttgaggaggtggcaccggatataacatgtctctgttatttttagaattaattaaaatgttttgctatttaatttg

SEQ ID NO: 437286 - DNA, 3002 bp, Homo sapiens
agtgcaatggcgccatctcaacacactgcaacttctgcctcccaggttcaagcgattctcctgcctcagcctcccaagtagctggattacaggcatacgccaccacgcccagctaattttgtatttttagtagagacagggtttctacatgttggtcaggctgatctcgaactgccgacttcaggtgatctgcctgcctcggcctgctaaagtgctgggattacaggcgtgagccactgcgtccagccttgacatctgtatttgaaatgacacagctatcccttggagtcatcaagctttggtgtatgtgttggccggttctgaagtcttgaagaagctctgctgaggaagaccaaagcagcactcgttgccaattagggaatggaccgtttgggttcctttagcaatgatccctctgataagccaccttgccgaggctgctcctcctacctcatggagccttatatcaagtgtgctgaatgtgggccacctccttttttcctctgcttgcagtgtttcactcgaggctttgagtacaagaaacatcaaagcgatcatacttatgaaataatgacttcagattttcctgtccttgatcccagctggactgctcaagaagaaatggcccttttagaagctgtgatggactgtggctttggaaattggcaggatgtagccaatcaaatgtgcaccaagaccaaggaggagtgtgagaagcactatatgaagcatttcatcaataaccctctgtttgcatctaccctgctgaacctgaaacaagcagaggaagcaaaaactgctgacacagccattccatttcactctacagatgaccctccccgacctacctttgactccttgctttctcgggacatggccgggtacatgccagctcgagcagatttcattgaggaatttgacaattatgcagaatgggacttgagagacattgattttgttgaagatgactcggacattttacatgctctgaagatggctgtggtagatatctatcattccaggttaaaggagagacaaagacgaaaaaaaattataagagaccatggattaatcaaccttagaaagtttcaattaatggaacggcggtatcccaaggaggtccaggacctgtatgaaacaatgaggcgatttgcaagaattgtggggccagtggaacatgacaaattcattgaaagccatgcattggaatttgaactccgaagggaaatcaagaggctccaagaatacaggacagcaggcattaccaatttttgtagtgccagaacctacgatcacctcaagaagacacgggaggaagagcgccttaaacgcactatgctctcagaagttctccagtatatccaggacagtagtgcttgccagcagtggctccgccggcaagctgacattgattccggcctgagtccttccattccaatggcttcgaattcaggtagacggagtgcaccacccttgaacctcactggcctccctggcacagagaagctgaatgaaaaagaaaaggagctctgtcagatggtgaggttggtccctggagcctatttagaatacaaatctgctctattgaacgaatgtaacaagcaaggaggcttaagactggcgcaggcaagagcactcatcaagatagatgtgaacaaaacccggaaaatctatgatttcctcatcagagaaggatacatcactaaaggctaaggctccaagagcttgggatcagaagtcagaagtttggaatgtggtgggtcaaaggacaatatgggtgggcattctggagagttgtttttcagctgaattctcatggtgaaaacaggggaaaggacaaaggaaaccttaagttgtattgtctactttcttctccatcctgctttaaaacactcctgttgttggtattatgctgcagagttgtgtgctacataagctattattaaatgtgagtgggcattcattcctaacacctcttgtaactaaaagaaccatagtacctcacatcacagtgctggtagaaatggaactaaaccacagtctgtaatcccaggagtccagctcagatccttatattgcgaggtaagtttgctgattatctgtcttgccttcaaacactgcagacagatttaaaataaagagaaaggttttagagcataagaaagctctcgttgaaggattttttaagctgacaactttttttttttttttttgagacagagtttgctcttgtcctccaggctggagtgtgatggcaagatctcagctcactacaacctctgcctcccaggttcaagtgattctcctgcctcagcctcccgaatagctgggactacaggtgtccaccaccacacctggctaattttgtatttttagtagagacagggttttgtcatgttggccaggctggtcacaaactcctgacctcaggtgatctgcccgcctcagcctcccaaagtactaggattacaggcgtgagccatcgcgcccggcctaagctgacaacttttatgagtaaaggggaagaaaatatccttatgatggtcttatcccaaactgcatctttaacttcggccgggcaaggtggctcgcctgtaatcccagcactttgggaggctgaggtgggcggatcacgaagtcaggagttcaagaccagcctgaccaacatggtgaaacagtctctactggaaatacaaaaattagctgagtgtggtggcacacgcctgtagtcccagctactcgggaggctgaggcaggagaattgcttgaacacaggaggcagaggttgcagcgagctgagatcacgccactgtgctccagcctgggcaacaaagtgagactctgtctcaaaaaaaaaaaaacaaaaaaaaacctttaatgtctggctttgtactttgcagtctgcctgtctaatctgcagtagtcttttgaggaggtggcaccggatataacatgtctctgttatttttagaattaattaaaatgttttgctatttaatttg

SEQ ID NO: 437287 - DNA, 2911 bp, Homo sapiens
acgcaaagcccggaggcgcgcgcgaccggcggctctttggcgcggattagggggtctcggcgagggagtcatcaagctttggtgtatgtgttggccggttctgaagtcttgaagaagctctgctgaggaagaccaaagcagcactcgttgccaattagggaatggaccgtttgggttcctttagcaatgatccctctgataagccaccttgccgaggctgctcctcctacctcatggagccttatatcaagtgtgctgaatgtgggccacctccttttttcctctgcttgcagtgtttcactcgaggctttgagtacaagaaacatcaaagcgatcatacttatgaaataatgacttcagattttcctgtccttgatcccagctggactgctcaagaagaaatggcccttttagaagctgtgatggactgtggctttggaaattggtaagagcttggtgttaagagttgtcctgccctagtggactcagagaagaagctgttgttgaagagtaaaggaaggaacctcaggaagagaaagtatgtgttgctttcctatcaacccatgatttagaggcaggatgtagccaatcaaatgtgcaccaagaccaaggaggagtgtgagaagcactatatgaagcatttcatcaataaccctctgtttgcatctaccctgctgaacctgaaacaagcagaggaagcaaaaactgctgacacagccattccatttcactctacagatgaccctccccgacctacctttgactccttgctttctcgggacatggccgggtacatgccagctcgagcagatttcattgaggaatttgacaattatgcagaatgggacttgagagacattgattttgttgaagatgactcggacattttacatgctctgaagatggctgtggtagatatctatcattccaggttaaaggagagacaaagacgaaaaaaaattataagagaccatggattaatcaaccttagaaagtttcaattaatggaacggcggtatcccaaggaggtccaggacctgtatgaaacaatgaggcgatttgcaagaattgtggggccagtggaacatgacaaattcattgaaagccatgcattggaatttgaactccgaagggaaatcaagaggctccaagaatacaggacagcaggcattaccaatttttgtagtgccagaacctacgatcacctcaagaagacacgggaggaagagcgccttaaacgcactatgctctcagaagttctccagtatatccaggacagtagtgcttgccagcagtggctccgccggcaagctgacattgattccggcctgagtccttccattccaatggcttcgaattcaggtagacggagtgcaccacccttgaacctcactggcctccctggcacagagaagctgaatgaaaaagaaaaggagctctgtcagatggtgaggttggtccctggagcctatttagaatacaaatctgctctattgaacgaatgtaacaagcaaggaggcttaagactggcgcaggcaagagcactcatcaagatagatgtgaacaaaacccggaaaatctatgatttcctcatcagagaaggatacatcactaaaggctaaggctccaagagcttgggatcagaagtcagaagtttggaatgtggtgggtcaaaggacaatatgggtgggcattctggagagttgtttttcagctgaattctcatggtgaaaacaggggaaaggacaaaggaaaccttaagttgtattgtctactttcttctccatcctgctttaaaacactcctgttgttggtattatgctgcagagttgtgtgctacataagctattattaaatgtgagtgggcattcattcctaacacctcttgtaactaaaagaaccatagtacctcacatcacagtgctggtagaaatggaactaaaccacagtctgtaatcccaggagtccagctcagatccttatattgcgaggtaagtttgctgattatctgtcttgccttcaaacactgcagacagatttaaaataaagagaaaggttttagagcataagaaagctctcgttgaaggattttttaagctgacaactttttttttttttttttgagacagagtttgctcttgtcctccaggctggagtgtgatggcaagatctcagctcactacaacctctgcctcccaggttcaagtgattctcctgcctcagcctcccgaatagctgggactacaggtgtccaccaccacacctggctaattttgtatttttagtagagacagggttttgtcatgttggccaggctggtcacaaactcctgacctcaggtgatctgcccgcctcagcctcccaaagtactaggattacaggcgtgagccatcgcgcccggcctaagctgacaacttttatgagtaaaggggaagaaaatatccttatgatggtcttatcccaaactgcatctttaacttcggccgggcaaggtggctcgcctgtaatcccagcactttgggaggctgaggtgggcggatcacgaagtcaggagttcaagaccagcctgaccaacatggtgaaacagtctctactggaaatacaaaaattagctgagtgtggtggcacacgcctgtagtcccagctactcgggaggctgaggcaggagaattgcttgaacacaggaggcagaggttgcagcgagctgagatcacgccactgtgctccagcctgggcaacaaagtgagactctgtctcaaaaaaaaaaaaacaaaaaaaaacctttaatgtctggctttgtactttgcagtctgcctgtctaatctgcagtagtcttttgaggaggtggcaccggatataacatgtctctgttatttttagaattaattaaaatgttttgctatttaatttg

SEQ ID NO: 437288 - DNA, 1259 bp, Homo sapiens
atttttcccgctcagccctggagcgcgtagctctaccaagaatggccactgtgccagatgcccctgaccagcgttgcccatttgaatttcctagcaggccccccaaagtaggtatttcagtaccctgttagagctgaggcgcaggtaaaatgactggcccaggccggtcccaccccgtaaggatttgaacgttggctccacaactcgggagcctgcgcctttcctcctcccaacgtggactcctgcccggcgaagtgcctcacttccttctcccgggagtcatcaagctttggtgtatgtgttggccggttctgaagtcttgaagaagctctgctgaggaagaccaaagcagcactcgttgccaattagggaatggaccgtttgggttcctttagcaatgatccctctgataagccaccttgccgaggctgctcctcctacctcatggagccttatatcaagtgtgctgaatgtgggccacctccttttttcctctgcttgcagtgtttcactcgaggctttgagtacaagaaacatcaaagcgatcatacttatgaaataatgacttcagattttcctgtccttgatcccagctggactgctcaagaagaaatggcccttttagaagctgtgatggactgtggctttggaaattggcaggatgtagccaatcaaatgtgcaccaagaccaaggaggagtgtgagaagcactatatgaagcatttcatcaataaccctctgtttgcatctaccctgctgaacctgaaacaagcagaggaagcaaaaactgctgacacagccattccatttcactgtaagtgcctccctatcttgataagatatacttagctcatccttgggccctgtttcagtagcagataaagagtgatttgatgacttggacagctaatgatatcacggaagataggaggagttagtatggcagctattgagagtcaggatcgacccagcatggtggcttgtgcctgtggtcccagcaccttgggaggctgaggcgggtaaatcacttgaggccaggagttcaagaccagcctggccaacatggcgaaaccctgtctcaactaaaagtataaagattagctggacgtggtggcagacacctgtaatcccagctactggggaggccaaggcaggagaatcacttgaaccgggtaggcggagattgcagtgagccaagatcacatcactgcactccaacctgggtgacagagtgagacttcatctcttaaaaaaaaaaa

SEQ ID NO: 437289 - DNA, 830 bp, Homo sapiens
agtgcaatggcgccatctcaacacactgcaacttctgcctcccaggttcaagcgattctcctgcctcagcctcccaagtagctggattacaggcatacgccaccacgcccagctaattttgtatttttagtagagacagggtttctacatgttggtcaggctgatctcgaactgccgacttcaggtgatctgcctgcctcggcctgctaaagtgctgggattacaggcgtgagccactgcgtccagccttgacatctgtatttgaaatgacacagctatcccttggagtcatcaagctttggtgtatgtgttggccggttctgaagtcttgaagaagctctgctgaggaagaccaaagcagcactcgttgccaattagggaatggaccgtttgggttcctttagcaatgatccctctgataagccaccttgccgaggctgctcctcctacctcatggagccttatatcaagtgtgctgaatgtgggccacctccttttttcctctgcttgcagctgcagacaagattaaatgaatccttaaaaaattgttgtccgggctcggtggctcacgcctgtaatcccagcactttgggaggccaagaaaggtgaatcacaagatcaggagttcgaggccagcctggccaaggtggtgaaatcccgtctctgctaaaaatacgaaaattagctgagtgttgtgccggctgcctgtaatcccagctactcgagaggctgaagcaggagaatcaacttgaacctgggaggcagaggttgcagtgagctgagatggcgccactctagcctgggtgaaagagcaagactccgtctcagaa

SEQ ID NO: 437290 - DNA, 411 bp, Homo sapiens
atatcaatttggaaatatgagagtatattatatggatgtgacttaaaatatgaaaagagcaaatgatgcttttagtattatgtgtaaatacaagtaccacttctctctttttcccacaatcctctaggcaggatgtagccaatcaaatgtgcaccaagaccaaggaggagtgtgagaagcactatatgaagcatttcatcaataaccctctgtttgcatctaccctgctgaacctgaaacaagcagaggaagcaaaaactgctgacacagccattccatttcactgtaagtgcctccctatcttgataagatatacttagctcatccttgggccctgtttcagtagcagataaagagtgatttgatgacttggacagctaatgatatcacggaagataggaggagttagta

SEQ ID NO: 437291 - DNA, 2993 bp, Homo sapiens
atttttcccgctcagccctggagcgcgtagctctaccaagaatggccactgtgccagatgcccctgaccagcgttgcccatttgaatttcctagcaggccccccaaagtaggtatttcagtaccctgttagagctgaggcgcaggtaaaatgactggcccaggccggtcccaccccgtaaggatttgaacgttggctccacaactcgggagcctgcgcctttcctcctcccaacgtggactcctgcccggcgaagtgcctcacttccttctcccgggagtcatcaagctttggtgtatgtgttggccggttctgaagtcttgaagaagctctgctgaggaagaccaaagcagcactcgttgccaattagggaatggaccgtttgggttcctttagcaatgatccctctgataagccaccttgccgaggctgctcctcctacctcatggagccttatatcaagtgtgctgaatgtgggccacctccttttttcctctgcttgcagtgtttcactcgaggctttgagtacaagaaacatcaaagcgatcatacttatgaaataatgacttcagattttcctgtccttgatcccagctggactgctcaagaagaaatggcccttttagaagctgtgatggactgtggctttggaaattggcaggatgtagccaatcaaatgtgcaccaagaccaaggaggagtgtgagaagcactatatgaagcatttcatcaataaccctctgtttgcatctaccctgctgaacctgaaacaagcagaggaagcaaaaactgctgacacagccattccatttcactctacagatgaccctccccgacctacctttgactccttgctttctcgggacatggccgggtacatgccagctcgagcagatttcattgaggaatttgacaattatgcagaatgggacttgagagacattgattttgttgaagatgactcggacattttacatgctctgaagatggctgtggtagatatctatcattccaggttaaaggagagacaaagacgaaaaaaaattataagagaccatggattaatcaaccttagaaagtttcaattaatggaacggcggtatcccaaggaggtccaggacctgtatgaaacaatgaggcgatttgcaagaattgtggggccagtggaacatgacaaattcattgaaagccatgcattggaatttgaactccgaagggaaatcaagaggctccaagaatacaggacagcaggcattaccaatttttgtagtgccagaacctacgatcacctcaagaagacacgggaggaagagcgccttaaacgcactatgctctcagaagttctccagtatatccaggacagtagtgcttgccagcagtggctccgccggcaagctgacattgattccggcctgagtccttccattccaatggcttcgaattcaggtagacggagtgcaccacccttgaacctcactggcctccctggcacagagaagctgaatgaaaaagaaaaggagctctgtcagatggtgaggttggtccctggagcctatttagaatacaaatctgctctattgaacgaatgtaacaagcaaggaggcttaagactggcgcaggcaagagcactcatcaagatagatgtgaacaaaacccggaaaatctatgatttcctcatcagagaaggatacatcactaaaggctaaggctccaagagcttgggatcagaagtcagaagtttggaatgtggtgggtcaaaggacaatatgggtgggcattctggagagttgtttttcagctgaattctcatggtgaaaacaggggaaaggacaaaggaaaccttaagttgtattgtctactttcttctccatcctgctttaaaacactcctgttgttggtattatgctgcagagttgtgtgctacataagctattattaaatgtgagtgggcattcattcctaacacctcttgtaactaaaagaaccatagtacctcacatcacagtgctggtagaaatggaactaaaccacagtctgtaatcccaggagtccagctcagatccttatattgcgaggtaagtttgctgattatctgtcttgccttcaaacactgcagacagatttaaaataaagagaaaggttttagagcataagaaagctctcgttgaaggattttttaagctgacaactttttttttttttttttgagacagagtttgctcttgtcctccaggctggagtgtgatggcaagatctcagctcactacaacctctgcctcccaggttcaagtgattctcctgcctcagcctcccgaatagctgggactacaggtgtccaccaccacacctggctaattttgtatttttagtagagacagggttttgtcatgttggccaggctggtcacaaactcctgacctcaggtgatctgcccgcctcagcctcccaaagtactaggattacaggcgtgagccatcgcgcccggcctaagctgacaacttttatgagtaaaggggaagaaaatatccttatgatggtcttatcccaaactgcatctttaacttcggccgggcaaggtggctcgcctgtaatcccagcactttgggaggctgaggtgggcggatcacgaagtcaggagttcaagaccagcctgaccaacatggtgaaacagtctctactggaaatacaaaaattagctgagtgtggtggcacacgcctgtagtcccagctactcgggaggctgaggcaggagaattgcttgaacacaggaggcagaggttgcagcgagctgagatcacgccactgtgctccagcctgggcaacaaagtgagactctgtctcaaaaaaaaaaaaacaaaaaaaaacctttaatgtctggctttgtactttgcagtctgcctgtctaatctgcagtagtcttttgaggaggtggcaccggatataacatgtctctgttatttttagaattaattaaaatgttttgctatttaatttg

SEQ ID NO: 437292 - DNA, 2457 bp, Homo sapiens
atttttcccgctcagccctggagcgcgtagctctaccaagaatggccactgtgccagatgcccctgaccagcgttgcccatttgaatttcctagcaggccccccaaagtaggtatttcagtaccctgttagagctgaggcgcaggtaaaatgactggcccaggccggtcccaccccgtaaggatttgaacgttggctccacaactcgggagcctgcgcctttcctcctcccaacgtggactcctgcccggcgaagtgcctcacttccttctcccgggagtcatcaagctttggtgtatgtgttggccggttctgaagtcttgaagaagctctgctgaggaagaccaaagcagcactcgttgccaattagggaatggaccgtttgggttcctttagcaatgatccctctgataagccaccttgccgaggctgctcctcctacctcatggagccttatatcaagtgtgctgaatgtgggccacctccttttttcctctgcttgcagtgtttcactcgaggctttgagtacaagaaacatcaaagcgatcatacttatgaaataatgacttcagattttcctgtccttgatcccagctggactgctcaagaagaaatggcccttttagaagctgtgatggactgtggctttggaaattggcaggatgtagccaatcaaatgtgcaccaagaccaaggaggagtgtgagaagcactatatgaagcatttcatcaataaccctctgtttgcatctaccctgctgaacctgaaacaagcagaggaagcaaaaactgctgacacagccattccatttcactctacagatgaccctccccgacctacctttgactccttgctttctcgggacatggccgggtacatgccagctcgagcagatttcattgaggaatttgacaattatgcagaatgggacttgagagacattgattttgttgaagatgactcggacattttacatgctctgaagatggctgtggtagatatctatcattccaggttaaaggagagacaaagacgaaaaaaaattataagagaccatggattaatcaaccttagaaagtttcaattaatggaacggcggtatcccaaggaggtccaggacctgtatgaaacaatgaggcgatttgcaagaattgtggggccagtggaacatgacaaattcattgaaagccatgcattggaatttgaactccgaagggaaatcaagaggctccaagaatacaggacagcaggcattaccaatttttgtagtgccagaacctacgatcacctcaagaagacacgggaggaagagcgccttaaacgcactatgctctcagaagttctccagtatatccaggacagtagtgcttgccagcagtggctccgccggcaagctgacattgattccggcctgagtccttccattccaatggcttcgaattcaggtagacggagtgcaccacccttgaacctcactggcctccctggcacagagaagctgaatgaaaaagaaaaggagctctgtcagatggtgaggttggtccctggagcctatttagaatacaaatctgctctattgaacgaatgtaacaagcaaggaggcttaagactggcgcaggcaagagcactcatcaagatagatgtgaacaaaacccggaaaatctatgatttcctcatcagagaaggatacatcactaaaggctaaggctccaagagcttgggatcagaagtcagaagtttggaatgtggtgggtcaaaggacaatatgggtgggcattctggagagttgtttttcagctgaattctcatggtgaaaacaggggaaaggacaaaggaaaccttaagttgtattgtctactttcttctccatcctgctttaaaacactcctgttgttggtattatgctgcagagttgtgtgctacataagctattattaaatgtgagtgggcattcattcctaacacctcttgtaactaaaagaaccatagtacctcacatcacagtgctggtagaaatggaactaaaccacagtctgtaatcccaggagtccagctcagatccttatattgcgaggtaagtttgctgattatctgtcttgccttcaaacactgcagacagatttaaaataaagagaaaggttttagagcataagaaagctctcgttgaaggattttttaagctgacaactttttttttttttttttgagacagagtttgctcttgtcctccaggctggaaggttgcagcgagctgagatcacgccactgtgctccagcctgggcaacaaagtgagactctgtctcaaaaaaaaaaaaacaaaaaaaaacctttaatgtctggctttgtactttgcagtctgcctgtctaatctgcagtagtcttttgaggaggtggcaccggatataacatgtctctgttatttttagaattaattaaaatgttttgctatttaatttg

SEQ ID NO: 437293 - DNA, 1519 bp, Homo sapiens
acgcaaagcccggaggcgcgcgcgaccggcggctctttggcgcggattagggggtctcggcgagggagtcatcaagctttggtgtatgtgttggccggttctgaagtcttgaagaagctctgctgaggaagaccaaagcagcactcgttgccaattagggaatggaccgtttgggttcctttagcaatgatccctctgataagccaccttgccgaggctgctcctcctacctcatggagccttatatcaagtgtgctgaatgtgggccacctccttttttcctctgcttgcagtgtttcactcgaggctttgagtacaagaaacatcaaagcgatcatacttatgaaataatgacttcagattttcctgtccttgatcccagctggactgctcaagaagaaatggcccttttagaagctgtgatggactgtggctttggaaattggcaggatgtagccaatcaaatgtgcaccaagaccaaggaggagtgtgagaagcactatatgaagcatttcatcaataaccctctgtttgcatctaccctgctgaacctgaaacaagcagaggaagcaaaaactgctgacacagccattccatttcactctacagatgaccctccccgacctacctttgactccttgctttctcgggacatggccgggtacatgccagctcgagcagatttcattgaggaatttgacaattatgcagaatgggacttgagagacattgattttgttgaagatgactcggacattttacatgctctgaagatggctgtggtagatatctatcattccaggttaaaggagagacaaagacgaaaaaaaattataagagaccatggattaatcaaccttagaaagtttcaattaatggaacggcggtatcccaaggaggtccaggacctgtatgaaacaatgaggcgatttgcaagaattgtggggccagtggaacatgacaaattcattgaaagccatgcattggaatttgaactccgaagggaaatcaagaggctccaagaatacaggacagcaggcattaccaatttttgtagtgccagaacctacgatcacctcaagaagacacgggaggaagagcgccttaaacgcactatgctctcagaagttctccagtatatccaggacagtagtgcttgccagcagtggctccgccggcaagctgacattgattccggcctgagtccttccattccaatggcttcgaattcaggtagacggagtgcaccacccttgaacctcactggcctccctggcacagagaagctgaatgaaaaagaaaaggagctctgtcagatggtgaggttggtccctggagcctatttagaatacaaatctgctctattgaacgaatgtaacaagcaaggaggcttaagactggcgcaggcaagagcactcatcaagatagatgtgaacaaaacccggaaaatctatgatttcctcatcagagaaggatacatcactaaagaattaattaaaatgttttgctatttaatttg

SEQ ID NO: 437294 - DNA, 983 bp, Homo sapiens
acgcaaagcccggaggcgcgcgcgaccggcggctctttggcgcggattagggggtctcggcgagggagtcatcaagctttggtgtatgtgttggccggttctgaagtcttgaagaagctctgctgaggaagaccaaagcagcactcgttgccaattagggaatggaccgtttgggttcctttagcaatgatccctctgataagccaccttgccgaggctgctcctcctacctcatggagccttatatcaagtgtgctgaatgtgggccacctccttttttcctctgcttgcagtgtttcactcgaggctttgagtacaagaaacatcaaagcgatcatacttatgaaataatgacttcagattttcctgtccttgatcccagctggactgctcaagaagaaatggcccttttagaagctgtgatggactgtggctttggaaattggcaggatgtagccaatcaaatgtgcaccaagaccaaggaggagtgtgagaagcactatatgaagcatttcatcaataaccctctgtttgcatctaccctgctgaacctgaaacaagcagaggaagcaaaaactgctgacacagccattccatttcactctacagatgaccctccccgacctacctttgactccttgctttctcgggacatggccgggtacatgccagctcgagcagatttcattgaggaatttgacaattatgcagaatgggacttgagagacattgattttgttgaagatgactcggacattttacatgctctgaagatggctgtggtagatatctatcattccaggttaaaggagagacaaagacgaaaaaaaaaaaaaaaaaaacaaaaaaaaacctttaatgtctggctttgtactttgcagtctgcctgtctaatctgcagtagtcttttgaggaggtggcaccggatataacatgtctctgttatttttagaattaattaaaatgttttgctatttaatttg

SEQ ID NO: 437295 - DNA, 1108 bp, Homo sapiens
caaaggacagcaaaagcactttactgccttagaaggaggggaggctttgccaggcctatgaaaccctcatctggatctggcctccagggcagcctcctgcctgcctctctggtgaggctcagcttctgctctgcctcaccagctcccctccagttcccctcactctgagggtgcagggagcagggtcccacgggagcattggtgtgagagggagctcccagcaccgagggagaagcaggactcactgaccaaaccatgtgtttgtgctggaagggcctcactgcaaacatgctcatcttatggaagaagaaaggaggttcagagagggaaaggcttgcctgaggtcacacggttcctggggatgcagctggagccgggctggtggaagcagcaggccgaagtgttttagaatcttcctgaacccagcaaagggatggcccgctgaatatggactccaacggtgccctaggggatggtggagccaccagatggaaggagcctggtgatcccgagaaggagagatgcctcgctgacctgaacatctttccagaactgttaactacagaaataacgaatgggtactgacagaaggaaaacctgctcaacaagtgaaaaaaagaaaaagcaaaatggtgtatttttaacaaaattatactaagggaatctaaggtaccccttgtagcaatataaaacattacttttggattgtgttttaccatatacaaaatgattgtatgtgtataatttcttttaattctcacagccatgtgaagaatgtatcattactagatgtgcaatgcctttattctctgcagaagctacatcaaaggttctgaatgtgtgctaaccacttacattgtctatacaaataatttcattgtatatcatcacctgtgaacaacatggccaataccagaaccaggagggagaagtgttggttaagtagtacagaaaacccaggtgctcaaaattaatataagaatccatcattatatggtgacttctgatgtgtgagttccagaaatgaaaaaatctaacaataactacagtatgtaaaaagtaaagtaatatatttaagaccaataaaaataaatcagaaatgtatgtt

SEQ ID NO: 437296 - DNA, 859 bp, Homo sapiens
caaaggacagcaaaagcactttactgccttagaaggaggggaggctttgccaggcctatgaaaccctcatctggatctggcctccagggcagcctcctgcctgcctctctggtgaggctcagcttctgctctgcctcaccagctcccctccagttcccctcactctgagggtgcagggagcagggtcccacgggagcattggtgtgagagggagctcccagcaccgagggagaagcaggactcactgaccaaaccatgtgtttgtgctggaagggcctcactgcaaacatgctcatcttatggaagaagaaaggaggttcagagagggaaaggcttgcctgaggtcacacggttcctggggatgcagctggagccgggctggtggaagcagcaggccgaagtgttttagaatcttcctgaacccagcaaagggatggcccgctgaatatggactccaacggtgccctaggggatggtggagccaccagatggaaggagcctggtgatcccgagaaggagagatgcctcgctgacctgaacatctttccagaactgttaaatgaagcctgcaggacaccagctgacagtggaaggactgaggaaggttgtataattttgtgcaaggtccaccacaaatccagctgaagaactgctccaaagtttaggtcatggcaagaacaagactggatcactccatgtcagtggaaacatgtccaccaacttcatcattgtctgttgtcatggttcactttagatgtaaacttgactggattaaggattccctaaagtgtcaggcctctgagcccaagctaagccatcatatcccctgtgacctgcatgtacacatccagatggccgg

SEQ ID NO: 437297 - DNA, 777 bp, Homo sapiens
agtaagggcacatgagaaaacactttaagaacctattcttccaaagatctttccagtatcttatgacaacacagtaaattatacccactccaaatgcaaaagctgaaactactctgctttctcacttacctacacttttgactttcgaaatacatttctctcttcggatatgagctgcaaactccttatataaaggctccaactctgcagccctaattattctagttggcccaagaaaaatcctaattgttttatctaaggagacggaattttccaatactgtagaggcatgtgtgtgtgtttgctttaaggaagctgttttggtaataaaaagtcactgagggtcataaattcatgttaacacatccagtgtacatgaagtaggcaccgagttaaactatttgtctactatatagcatgtcatcttaaaagccttattttttcctcaaaatattaactttatttttctccctgtaaaatcaagacacagttaaaatgtagccttcctcattttctgggaatactttctaacaagatatgcttctttccaattggacttctaaatttctagcaattctaacagtgcataaaagaggcaaccccaaaagtgtagcaggtactgaataacagatttgcagccttgggtatccacattaaaatttgaaatctaagtgaattacttcaagctgatttcttaggtcaaggagagattatggtccttaaatgcctgataaggtcacatacacaatttcaagtgcattatagtaaatccatgtg

SEQ ID NO: 437298 - DNA, 192 bp, Homo sapiens
ggtcaaggagagattatggtccttaaatgcctgataaggtcacatacacaatttcaagtgcattatagtaaatccatgtgacagctcctacagctactaacctgcttccgccctcacggtaacgtgcacaatcttcatcgcatgtcctgggtggtggtaggagcagtagaaaccccctgggtcatgtcagat

SEQ ID NO: 437299 - DNA, 2222 bp, Homo sapiens
ctctaaaagccgcagttagaggcgagatttaggaaaaacctctgccgagtgagcctctggttgggaatatgtatgagaaaaaaaaactggcaaggcgttagtcaagcaaagctgaaggcagaggaaatttgatatctggctggagtctagaggatttaatgcaaataagatactctgagggcagcgtggcaaaaaaagactacaattcccggtggtcacagcgtttgagaagcgatgctttctgagacttgtagtaactaggagctgtgtttgaactatccaggctcaggacagcctcttgaaaaaaaattttttattaataaagcggatttgagtgggatctttttcctaatcgattacgggcccacacgtatgggaagaattctaacaatgattaaagggacatgctacctttacgactatccttttctaatcgatgactcctaaatctaggagtaggtagtcgatgtttgtggtctgggcgtctgtagaagggcaacctcgtgctttctgcagaggagaccggagggcagaaggcagagtccaggcttagactgcagttcctcgcttacctgtgcagtctaattttgagctgcctctttgtagtcttaaaaggcaggagcttcgtgttgtgggtctgctaacccgtacgtttccgtgggcaagtcgtgtgtactcctcgccatggctcagctccaaacacgcttctacactgataacaagaaatatgccgtagatgatgttcccttctcaatccctgctgcctctgaaattgccgaccttagtaacatcatcaataaactactaaaggacaaaaatgagttccacaaacatgtggagtttgatttccttattaagggccagtttctgcgaatgcccttggacaaacacatggaaatggagaacatctcatcagaagaagttgtggaaatagaatacgtggagaagtatactgcaccccagccagagcaatgcatgttccatgatgactggatcagttcaattaaaggggcagaggaatggatcttgactggttcttatgataagacttctcggatctggtccttggaaggaaagtcaataatgacaattgtgggacatacggatgttgtaaaagatgtggcctgggtgaaaaaagatagtttgtcctgcttattattgagtgcttctatggatcagactattctcttatgggagtggaatgtagagagaaacaaagtgaaagccctacactgctgtagaggtcatgctggaagtgtagattctatagctgttgatggctcaggaactaaattttgcagtggctcctgggataagatgctaaagatctggtctacagtccctacagatgaagaagatgaaatggaggagtccacaaatcgaccaagaaagaaacagaagacagaacagttgggactaacaaggactcccatagtgaccctctctggccacatggaggcagtttcctcagttctgtggtcagatgctgaagaaatctgcagtgcatcttgggaccatacaattagagtgtgggatgttgagtctggcagtcttaagtcaactttgacaggaaataaagtgtttaattgtatttcctattctccactttgtaaacgtttagcatctggaagcacagataggcatatcagactgtgggatccccgaactaaagatggttctttggtgtcgctgtccctaacgtcacatactggttgggtgacatcagtaaaatggtctcctacccatgaacagcagctgatttcaggatctttagataacattgttaagctgtgggatacaagaagttgtaaggctcctctctatgatctggctgctcatgaagacaaagttctgagtgtagactggacagacacagggctacttctgagtggaggagcagacaataaattgtattcctacagatattcacctaccacttcccatgttggggcatgaaagtgaacaataatttgactatagagattatttctgtaaatgaaattggtagagaaccatgaaattacatagatgcagatgcagaaagcagccttttgaagtttatataatgttttcacccttcataacagctaacgtatcactttttcttattttgtatttataataagataggttgtgtttataaaatacaaactgtggcatacattctctatacaaacttgaaattaaactgagttttacatttctctttaaaggtaaaagtt

SEQ ID NO: 437300 - DNA, 2115 bp, Homo sapiens
ctctaaaagccgcagttagaggcgagatttaggaaaaacctctgccgagtgagcctctggttgggaatatgtatgagaaaaaaaaactggcaaggcgttagtcaagcaaagctgaaggcagaggaaatttgatatctggctggagtctagaggatttaatgcaaataagatactctgagggcagcgtggcaaaaaaagactacaattcccggtggtcacagcgtttgagaagcgatgctttctgagacttgtagtaactaggagctgtgtttgaactatccaggctcaggacagcctcttgaaaaaaaattttttattaataaagcggatttgagtgggatctttttcctaatcgattacgggcccacacgtatgggaagaattctaacaatgattaaagggacatgctacctttacgactatccttttctaatcgatgactcctaaatctaggagtaggtagtcgatgtttgtggtctgggcgtctgtagaagggcaacctcgtgctttctgcagaggagaccggagggcagaaggcagagtccaggcttagactgcagttcctcgcttacctgtgcagtctaattttgagctgcctctttgtagtcttaaaaggcaggagcttcgtgttgtgggtctgctaacccgtacgtttccgtgggcaagtcgtgtgtactcctcgccatggctcagctccaaacacgcttctacactgataacaagaaatatgccgtagatgatgttcccttctcaatccctgctgcctctgaaattgccgaccttagtaacatcatcaataaactactaaaggacaaaaatgagttccacaaacatgtggagtttgatttccttattaagggccagtttctgcgaatgcccttggacaaacacatggaaatggagaacatctcatcagatcttgactggttcttatgataagacttctcggatctggtccttggaaggaaagtcaataatgacaattgtgggacatacggatgttgtaaaagatgtggcctgggtgaaaaaagatagtttgtcctgcttattattgagtgcttctatggatcagactattctcttatgggagtggaatgtagagagaaacaaagtgaaagccctacactgctgtagaggtcatgctggaagtgtagattctatagctgttgatggctcaggaactaaattttgcagtggctcctgggataagatgctaaagatctggtctacagtccctacagatgaagaagatgaaatggaggagtccacaaatcgaccaagaaagaaacagaagacagaacagttgggactaacaaggactcccatagtgaccctctctggccacatggaggcagtttcctcagttctgtggtcagatgctgaagaaatctgcagtgcatcttgggaccatacaattagagtgtgggatgttgagtctggcagtcttaagtcaactttgacaggaaataaagtgtttaattgtatttcctattctccactttgtaaacgtttagcatctggaagcacagataggcatatcagactgtgggatccccgaactaaagatggttctttggtgtcgctgtccctaacgtcacatactggttgggtgacatcagtaaaatggtctcctacccatgaacagcagctgatttcaggatctttagataacattgttaagctgtgggatacaagaagttgtaaggctcctctctatgatctggctgctcatgaagacaaagttctgagtgtagactggacagacacagggctacttctgagtggaggagcagacaataaattgtattcctacagatattcacctaccacttcccatgttggggcatgaaagtgaacaataatttgactatagagattatttctgtaaatgaaattggtagagaaccatgaaattacatagatgcagatgcagaaagcagccttttgaagtttatataatgttttcacccttcataacagctaacgtatcactttttcttattttgtatttataataagataggttgtgtttataaaatacaaactgtggcatacattctctatacaaacttgaaattaaactgagttttacatttctctttaaaggtaaaagtt

SEQ ID NO: 437301 - DNA, 1943 bp, Homo sapiens
ctctaaaagccgcagttagaggcgagatttaggaaaaacctctgccgagtgagcctctggttgggaatatgtatgagaaaaaaaaactggcaaggcgttagtcaagcaaagctgaaggcagaggaaatttgatatctggctggagtctagaggatttaatgcaaataagatactctgagggcagcgtggcaaaaaaagactacaattcccggtggtcacagcgtttgagaagcgatgctttctgagacttgtagtaactaggagctgtgtttgaactatccaggctcaggacagcctcttgaaaaaaaattttttattaataaagcggatttgagtgggatctttttcctaatcgattacgggcccacacgtatgggaagaattctaacaatgattaaagggacatgctacctttacgactatccttttctaatcgatgactcctaaatctaggagtaggtagtcgatgtttgtggtctgggcgtctgtagaagggcaacctcgtgctttctgcagaggagaccggagggcagaaggcagagtccaggcttagactgcagttcctcgcttacctgtgcagtctaattttgagctgcctctttgtagtcttaaaaggcaggagcttcgtgttgtgggtctgctaacccgtacgtttccgtgggcaagtcgtgtgtactcctcgccatggctcagctccaaacacgcttctacactgataacaagaaatatgccgtagatgatgttcccttctcaatccctgctgcctctgaaattgccgaccttagtaacatcatcaataaactactaaaggacaaaaatgagttccacaaacatgtggagtttgatttccttattaagggccagtttctgcgaatgcccttggacaaacacatggaaatggagaacatctcatcagaagaagttgtggaaatagaatacgtggagaagtatactgcaccccagccagagcaatgcatgttccatgatgactggatcagttcaattaaaggggcagaggaatggatcttgactggttcttatgataagacttctcggatctggtccttggaaggaaagtcaataatgacaattgtgggacatacggatgttgtaaaagatgtggcctgggtgaaaaaagatagtttgtcctgcttattattgagtgcttctatggatcagactattctcttatgggagtggaatgtagagagaaacaaagtgaaagccctacactgctgtagaggtcatgctggaagtgtagattctatagctgttgatggctcaggaactaaattttgcagtggctcctgggataagatgctaaagatctggtctacagtccctacagatgaagaagatgaaatggaggagtccacaaatcgaccaagaaagaaacagaagacagaacagttgggactaacaaggactcccatagtgaccctctctggccacatggaggcagtttcctcagttctgtggtcagatgctgaagaaatctgcagtgcatcttgggaccatacaattagagtgtgggatgttgagtctggcagtcttaagtcaactttgacaggaaataaagtgtttaattgtatttcctattctccactttgtaaacgtttagcatctggaagcacagataggcatatcagactgtgggatccccgaactaaagatggttctttggtgtcgctgtccctaacgtcacatactggttgggtgacatcagtaaaatggtctcctacccatgaacagcagctgatttcaggatctttagataacattgttaagctgtgggatacaagaaggtaaattctatttatgatctataagagaaacatatcaattacctgttatagaaaggaaatgaatactgaaattcttatctaaaaccagaagagtaaaaaaagcctcatggttttgcaacctcatgtgacaaatactga

SEQ ID NO: 437302 - DNA, 1651 bp, Homo sapiens
ctctaaaagccgcagttagaggcgagatttaggaaaaacctctgccgagtgagcctctggttgggaatatgtatgagaaaaaaaaactggcaaggcgttagtcaagcaaagctgaaggcagaggaaatttgatatctggctggagtctagaggatttaatgcaaataagatactctgagggcagcgtggcaaaaaaagactacaattcccggtggtcacagcgtttgagaagcgatgctttctgagacttgtagtaactaggagctgtgtttgaactatccaggctcaggacagcctcttgaaaaaaaattttttattaataaagcggatttgagtgggatctttttcctaatcgattacgggcccacacgtatgggaagaattctaacaatgattaaagggacatgctacctttacgactatccttttctaatcgatgactcctaaatctaggagtaggtagtcgatgtttgtggtctgggcgtctgtagaagggcaacctcgtgctttctgcagaggagaccggagggcagaaggcagagtccaggcttagactgcagttcctcgcttacctgtgcagtctaattttgagctgcctctttgtagtcttaaaaggcaggagcttcgtgttgtgggtctgctaacccgtacgtttccgtgggcaagtcgtgtgtactcctcgccatggctcagctccaaacacgcttctacactgataacaagaaatatgccgtagatgatgttcccttctcaatccctgctgcctctgaaattgccgaccttagtaacatcatcaataaactactaaaggacaaaaatgagttccacaaacatgtggagtttgatttccttattaagggccagtttctgcgaatgcccttggacaaacacatggaaatggagaacatctcatcagaagaagttgtggaaatagaatacgtggagaagtatactgcaccccagccagagcaatgcatgttccatgatgactggatcagttcaattaaaggggcagaggaatggatcttgactggttcttatgataagacttctcggatctggtccttggaaggaaagtcaataatgacaattgtgggacatacggatgttgtaaaagatgtggcctgggtgaaaaaagatagtttgtcctgcttattattgagtgcttctatggatcagactattctcttatgggagtggaatgtagagagaaacaaagtgaaagccctacactgctgtagaggtcatgctggaagtgtagattctatagctgttgatggctcaggaactaaagtaagtagctagaatattattagtactctgttaaatttgaatttgagcttgttgctaaacattttcttctgcatatattcattgtgttggcctagtttcctaacaatcggtgacaaaagataggatttcaaagcaagagtaaatactcatacaataggagatagtcacttgctcagtttgaatccctggtttagaaccttatataaactccagaaattttaagaaatgaggtatgggccgggcgcggtggctcacgcctgtaatcccagcactttgggaggccgaggcgggcagatcacctgaggtcaggagttcaagaccagcctgacccacatggagaaaccctgtctctactaaa

SEQ ID NO: 437303 - DNA, 539 bp, Homo sapiens
ttctctctcacttcagattggctttcttcaaaagacatggcaataagcttggccttcaagatttcccagattttatgttctgtcctatctgcccctggaaaaaggctaatttcagttctgtggaacacaagttctttgaaaaggtcctgaatgaggaagagacctactgttgtaggcaaataatatgaatcatattacatatgtcttttcccttcatatacatctgtttagttttgcagtggctcctgggataagatgctaaagatctggtctacaggtaaattaaatatttattttaccttgacttaataatgttgtttcaaaaatttaaattcggaggctatatggtggcttacgcctataatctcagcacttcaggaagccagggtagaaggatcacttgaggccacgagttcaagagcagcctaggccacatagtgagaccccgtctctactaaaagtagaaaattaaaattagcaaggtgtggtggtatgcaccggtagtcctagctccttgggaggctgaggtaaggggattg

SEQ ID NO: 437304 - DNA, 2265 bp, Homo sapiens
ctctaaaagccgcagttagaggcgagatttaggaaaaacctctgccgagtgagcctctggttgggaatatgtatgagaaaaaaaaactggcaaggcgttagtcaagcaaagctgaaggcagaggaaatttgatatctggctggagtctagaggatttaatgcaaataagatactctgagggcagcgtggcaaaaaaagactacaattcccggtggtcacagcgtttgagaagcgatgctttctgagacttgtagtaactaggagctgtgtttgaactatccaggctcaggacagcctcttgaaaaaaaattttttattaataaagcggatttgagtgggatctttttcctaatcgattacgggcccacacgtatgggaagaattctaacaatgattaaagggacatgctacctttacgactatccttttctaatcgatgactcctaaatctaggagtaggtagtcgatgtttgtggtctgggcgtctgtagaagggcaacctcgtgctttctgcagaggagaccggagggcagaaggcagagtccaggcttagactgcagttcctcgcttacctgtgcagtctaattttgagctgcctctttgtagtcttaaaaggcaggagcttcgtgttgtgggtctgctaacccgtacgtttccgtgggcaagtcgtgtgtactcctcgccatggctcagctccaaacacgcttctacactgataacaagaaatatgccgtagatgatgttcccttctcaatccctgctgcctctgaaattgccgaccttagtaacatcatcaataaactactaaaggacaaaaatgagttccacaaacatgtggagtttgatttccttattaagggccagtttctgcgaatgcccttggacaaacacatggaaatggagaacatctcatcagaagaagttgtggaaatagaatacgtggagaagtatactgcaccccagccagagcaatgcatgttccatgatgactggatcagttcaattaaaggggcagaggaatggatcttgactggttcttatgataagacttctcggatctggtccttggaaggaaagtcaataatgacaattgtgggacatacggatgttgtaaaagatgtggcctgggtgaaaaaagatagtttgtcctgcttattattgagtgcttctatggatcagactattctcttatgggagtggaatgtagagagaaacaaagtgaaagccctacactgctgtagaggtcatgctggaagtgtagattctatagctgttgatggctcaggaactaaattttgcagtggctcctgggataagatgctaaagatctggtctacagtccctacagatgaagaagatgaaatggaggagtccacaaatcgaccaagaaagaaacagaagacagaacagttgggactaacaaggactcccatagtgaccctctctggccacatggaggcagtttcctcagttctgtggtcagatgctgaagaaatctgcagtgcatcttgggaccatacaattagagtgtgggatgttgagtctggcagtcttaagtcaactttgacaggaaataaagtgtttaattgtatttcctattctccactttgtaaacgtttagcatctggaagcacagataggcatatcagactgtgggatccccgaactaaagatggttctttggtgtcgctgtccctaacgtcacatactggttgggtgacatcagtaaaatggtctcctacccatgaacagcagctgatttcaggatctttagataacattgttaagctgtgggatacaagaagttgtaaggctcctctctatgatctggctgctcatgaagacaaagttctgagtgtagactggacagacacagggctacttctgagtggaggagcccgacccaaaattggttttctacctgatattcacctaccactttccaggtgggggactgacacgggcactctaactttgactattagcgcatcctttccgcaagctcaatccggctacagacacctgtacgttccttgtacgtccatgcccaaagcacccttccgcatgtactctctgtcgctcacccctcctacagctacgattcactttcctctctcggattctccacacccagctcgccacactccaccggcggaccatccccccacccaccaccagggttacgttcaccacaaccaaaggcccgacaccaccgccatctccactccctacgccccccagctcacgccgcgccctagctgctcg

SEQ ID NO: 437305 - DNA, 1932 bp, Homo sapiens
gaggatttacccagccgttgggcggcagctgttcaatggtcgcgtaggctggggatgggcggggtgacctgaagccccgccccagcatacctgcgcagccgcagtcgacaggctctggctgcccatcccttggcgggcgccggccgcggcactgaaacgagccttccctcagctggacatggaggagggctgacgtgctgacgtctacgcccgccccgcttttcgctgatggcgtcatttcctttcagctcagctgcagctggtgatctcctcatactgggcacggacctcggcaaggatgccatttaaatcgagggagtggctgttgtccatggacaggaccagggatgtgaccaagaactgggactacagctcacagatctcctcttcatacagctgaatgaggaagttgatcttgtcagtcagctcttccagatatgccgtagatgatgttcccttctcaatccctgctgcctctgaaattgccgaccttagtaacatcatcaataaactactaaaggacaaaaatgagttccacaaacatgtggagtttgatttccttattaagggccagtttctgcgaatgcccttggacaaacacatggaaatggagaacatctcatcagaagaagttgtggaaatagaatacgtggagaagtatactgcaccccagccagagcaatgcatgttccatgatgactggatcagttcaattaaaggggcagaggaatggatcttgactggttcttatgataagacttctcggatctggtccttggaaggaaagtcaataatgacaattgtgggacatacggatgttgtaaaagatgtggcctgggtgaaaaaagatagtttgtcctgcttattattgagtgcttctatggatcagactattctcttatgggagtggaatgtagagagaaacaaagtgaaagccctacactgctgtagaggtcatgctggaagtgtagattctatagctgttgatggctcaggaactaaattttgcagtggctcctgggataagatgctaaagatctggtctacagtccctacagatgaagaagatgaaatggaggagtccacaaatcgaccaagaaagaaacagaagacagaacagttgggactaacaaggactcccatagtgaccctctctggccacatggaggcagtttcctcagttctgtggtcagatgctgaagaaatctgcagtgcatcttgggaccatacaattagagtgtgggatgttgagtctggcagtcttaagtcaactttgacaggaaataaagtgtttaattgtatttcctattctccactttgtaaacgtttagcatctggaagcacagataggcatatcagactgtgggatccccgaactaaagatggttctttggtgtcgctgtccctaacgtcacatactggttgggtgacatcagtaaaatggtctcctacccatgaacagcagctgatttcaggatctttagataacattgttaagctgtgggatacaagaagttgtaaggctcctctctatgatctggctgctcatgaagacaaagttctgagtgtagactggacagacacagggctacttctgagtggaggagcagacaataaattgtattcctacagatattcacctaccacttcccatgttggggcatgaaagtgaacaataatttgactatagagattatttctgtaaatgaaattggtagagaaccatgaaattacatagatgcagatgcagaaagcagccttttgaagtttatataatgttttcacccttcataacagctaacgtatcactttttcttattttgtatttataataagataggttgtgtttataaaatacaaactgtggcatacattctctatacaaacttgaaattaaactgagttttacatttctctttaaaggtaaaagtt

SEQ ID NO: 437306 - DNA, 1068 bp, Homo sapiens
ccctggaaaaaggctaatttcagttctgtggaacacaagttctttgaaaaggtcctgaatgaggaagagacctactgttgtaggcaaataatatgaatcatattacatatgtcttttcccttcatatacatctgtttagttttgcagtggctcctgggataagatgctaaagatctggtctacagtccctacagatgaagaagatgaaatggaggagtccacaaatcgaccaagaaagaaacagaagacagaacagttgggactaacaaggactcccatagtgaccctctctggccacatggaggcagtttcctcagttctgtggtcagatgctgaagaaatctgcagtgcatcttgggaccatacaattagagtgtgggatgttgagtctggcagtcttaagtcaactttgacaggaaataaagtgtttaattgtatttcctattctccactttgtaaacgtttagcatctggaagcacagataggcatatcagactgtgggatccccgaactaaagatggttctttggtgtcgctgtccctaacgtcacatactggttgggtgacatcagtaaaatggtctcctacccatgaacagcagctgatttcaggatctttagataacattgttaagctgtgggatacaagaagttgtaaggctcctctctatgatctggctgctcatgaagacaaagttctgagtgtagactggacagacacagggctacttctgagtggaggagcagacaataaattgtattcctacagatattcacctaccacttcccatgttggggcatgaaagtgaacaataatttgactatagagattatttctgtaaatgaaattggtagagaaccatgaaattacatagatgcagatgcagaaagcagccttttgaagtttatataatgttttcacccttcataacagctaacgtatcactttttcttattttgtatttataataagataggttgtgtttataaaatacaaactgtggcatacattctctatacaaacttgaaattaaactgagttttacatttctctttaaaggtaaaagtt

SEQ ID NO: 437307 - DNA, 1018 bp, Homo sapiens
gcaggcaacactcccagcagctagagaatgaatgcctcagtctagaatggagatctgcatggtaaacgcagcttctactataatctgcataatatttgatgagatcagcctgggagagctaataggttgtccaaatagacgattggtttaaagttgacagtactttttcaaaattatattcatgattaagtttaggctttgcattctgactgacctgaatcatttgtgtttcatctctgtgtactacttgtgtaactttaatactgctaaacttctaagcctcaatttttatacagtgtagataacctacctcctagggttattgtgatgattaataagcagttatctttcggtgttttttttttttttgtcttaaattttagttggtttcaatacaagtagtaatttttatttccactcaggaattaaaaaaacttacacatattctaagttggaagaatagctttcactttgcgggatacaggaactcacatgcatcttctgatcagtggcactgattctaagcctgtctccaggacactcttgattttgaattcagtaaatatccagtgagcccatctaaggagtgttgcagcactggtctgagcaatcagcaaaccatggcctaagggccaaatctagtctgctgcctttgtacagcccagaagccagtaatggtttttacacctttaaagggttgtttaaaagcaaaacaaaataacagtaacacgtgacacaaacaggatgtagtttacagtctggctctttataaaaaagtttgatgaccctagcctagacctggaggcataaaagtaaacagttaaaacaaataggagtatgcattacaaagaaatgcctgagctagagaagcaacaaagtgacctcactttacatgtttagggtggtcagaggccatctcagagagtggcatttaaagctgagacctggcaggtgaggagctagccatgtgagtggctgcaaggctgatgtaatcagagtgaggaatgtagggaaaatg

SEQ ID NO: 437308 - DNA, 1231 bp, Homo sapiens
ggtccggaaaaggggggtaagatgcctatcctagtccctctcttcgggctcttcatctcaagaggaacaaacaagagcaaactcagtgttgagaggccccaaaccggactctcccacagagaggtgctcggtcccaagccccggaggcccgggaaggccgcctccggaggagcccccgcagacgccatactaaaagccaaaatggctgccccggaggaggcccgcaccgcgtagccagtgaaggttggggagcaagcttatgcgggaaagagggagggggactccaggaaaagccgttgagaggaccatcacaacctgagcagcacaggttccagttacagccatcccttgtcataacttttgaactgtatttggaaaaatactggccaggaaagaaaaatgataaaatttttcctcatggtgaataaacaagggcagactcgactttctaagtactatgaacatgtggatattaataagcgtacacttctggaaacagaagtcataaagagctgtctctctcgatccaatgaacaatgctctttcattgaatataaggattttaagctgatatatcggcagtatgcagctctcttcattgtggttggagttaatgacactgagaacgagatggctatttatgaattcattcataactttgtggaagttttagatgagtatttcagccgagtgagtgaattagatataatgtttaatttggataaagtacacatcattttggatgagatggtgttaaatggctgcattgtggaaactaacagggcaagaattcttgcccctctactaattcttgataagatgtcagaaagctgaaaggaagtctcttcgagacaatatggatttatcagaaatgcgagtaccgtggaatacatctcaacatgttaacccagaagaatctggaagaccacaattacaaaatggggtatccttccaaagacattataaataggcattttccacagttcctaaaaagaaaacacaactgtactttaaaatatgtacaaagaaaaaaatttctttaaactgagagagaagttttattttctaattgtaaacatatctgtcgcactttaaattctgttgagcacctaaggaacccttcttggtctatgcttcttttgcaaattgaattcaggaatagcaggatggtagtgggaagaaagtatggcagttttccgtcagccaataaagttttaaaatttaaacacaa

SEQ ID NO: 437309 - DNA, 646 bp, Homo sapiens
ggcctataattccagcactttgggaggccaagctggtcctgaactcctggccccaagccatcctctcaccttggcctcccaaagtgctaggattacggatatgaaccagcacatctggccaaaaaaaatcctagaagttaaggtttatctacatttcccccattgataaacatcttttaaacaagtgagtgatagaactgttctgaatatttgtcagtgggaggctactttcctcacattatcggttcactaagccacatgctctaaaacctgggacactgactggggaagttctatgtctgggtttacatggggaagcgacactaaaattgattgtaccctttccttccttttattgtagaacgagatggctatttatgaattcattcataactttgtggaagttttagatgagtatttcagccgagtgagtgaattgtctaatggctaaaaaatggtttacttcctcaacccagtttcccagaaattgagtctctttggatctatatcaagaacatgtgttaatacagagttttaataagtaaaagttaaaacttaagtgatgccaaattttctttatctttccttctggtttatccaaagtgttacaagcctatacatgcctgagatctttataaagaactgg

SEQ ID NO: 437310 - DNA, 1097 bp, Homo sapiens
taaatctcttcagtcgtttcataaatacagcatcgatcgtctggtttggtttttttatagataaagaaacggatgggggaaaggagatctagtggagagtactgtaaaaagaaaaattcagtgctgaaagcgttgatgagtcactaagtaaggaataactacagagaatccaagtgagtaaggcagcatctcaggttccagttacagccatcccttgtcataacttttgaactgtatttggaaaaatactggccaggaaagaaaaatgataaaatttttcctcatggtgaataaacaagggcagactcgactttctaagtactatgaacatgtggatattaataagcgtacacttctggaaacagaagtcataaagagctgtctctctcgatccaatgaacaatgctctttcattgaatataaggattttaagctgatatatcggcagtatgcagctctcttcattgtggttggagttaatgacactgagaacgagatggctatttatgaattcattcataactttgtggaagttttagatgagtatttcagccgagtgagtgaattagatataatgtttaatttggataaagtacacatcattttggatgagatggtgttaaatggctgcattgtggaaactaacagggcaagaattcttgcccctctactaattcttgataagatgtcagaaagctgaaaggaagtctcttcgagacaatatggatttatcagaaatgcgagtaccgtggaatacatctcaacatgttaacccagaagaatctggaagaccacaattacaaaatggggtatccttccaaagacattataaataggcattttccacagttcctaaaaagaaaacacaactgtactttaaaatatgtacaaagaaaaaaatttctttaaactgagagagaagttttattttctaattgtaaacatatctgtcgcactttaaattctgttgagcacctaaggaacccttcttggtctatgcttcttttgcaaattgaattcaggaatagcaggatggtagtgggaagaaagtatggcagttttccgtcagccaataaagttttaaaatttaaacacaa

SEQ ID NO: 437311 - DNA, 492 bp, Homo sapiens
ccaactacttgggaggctgtggtaggaggatcacttgaacccaggagacagaggttgcagtgagttgagatcgagattgtgccactgcactccagcctgggcacagagtgagattccgtctcaaaaaaaaaaaaaaaaaaaaaagtagaaagcaagaaagtgtctctgtacaggtaggcatgaaatgaatccttctcttcctcccctttactcctttaaccccttctcctgcaatgtcttgaagtaaattactgtcattacagaagagcaatgcactgcatccccccaaaacctttctatatgcttttgctaccccgttaacagaagaatatacagaactgtcttaggcgaaagtatgtacagtagtccctctcttatccactgtttcgcattctgtggtttgtgttactcatggtcaactgaggtcccaaaatattaaacagaaaattccagaaataaacaatgtataagttttaaactgcatgccattct

SEQ ID NO: 437312 - DNA, 849 bp, Homo sapiens
tgagaccctgtctctaaaaataagtaaataactaattaaaaagttagccagctgtggtggtgagcacctgtactcctaactactcaagaggctgagatgggagaattgatcaagcctaggagtttgaggctgcagtgaactatgatcacaacactgtactccaacctgggtaatggagtgaggccctgcctcaaaaacacaaaaacaaaacaaaaaaacttttataacatgtacctaacaaagatgcagagttaaattttatttgccagtttgtaaaagcctttgatactcattttaagggcacttagtaattacaatgccattatgtaattaactctatagagaacattactttcaaataatggatggtcagacattaagacagccccagagagcccctacagctatcctttatcccgttttttgtttgttttttggagacagcattccagcctgggcacagagtgagattccgtctcaaaaaaaaaaaaaaaaaaaaaagtagaaagcaagaaagtgtctctgtacaggtaggcatgaaatgaatccttctcttcctcccctttactcctttaaccccttctcctgcaatgtcttgaagtaaattactgtcattacagaagagcaatgcactgcatccccccaaaacctttctatatgcttttgctaccccgttaacagaagaatatacagaactgtcttaggcgaaagtatgtacagtagtccctctcttatccactgtttcgcattctgtggtttgtgttactcatggtcaactgaggtcccaaaatattaaacagaaaattccagaaataaacaatgtataagttttaaactgcatgccattct

SEQ ID NO: 437313 - DNA, 788 bp, Homo sapiens
tgagaccctgtctctaaaaataagtaaataactaattaaaaagttagccagctgtggtggtgagcacctgtactcctaactactcaagaggctgagatgggagaattgatcaagcctaggagtttgaggctgcagtgaactatgatcacaacactgtactccaacctgggtaatggagtgaggccctgcctcaaaaacacaaaaacaaaacaaaaaaacttttataacatgtacctaacaaagatgcagagttaaattttatttgccagtttgtaaaagcctttgatactcattttaagggcacttagtaattacaatgccattatgtaattaactctatagagaacattactttcaaataatggatggtcagacattaagacagccccagagagcccctacagctatcctttatcccgttttttgtttgttttttggagacagcatctccgtctcctaggctggagtgcagtggtgtgatcatgcctcactacagcctgtacctcctgggctcaggtgctcctcccacctcagcctcctgagtaactgggaccacaggtgcgcaccccctccacccagctaatttttgtattttgttgtagagatagggtttcactatgttgcccagactggtctcgaattcctgcagtcacatgatccatctgccttcgccttccaaagtgttgggattacaggcctgagccactgtgcccagtctttttatgccacattttaaaaggtttgcttattaataagcttactgttaatgaaatttagttcaaagttta

SEQ ID NO: 437314 - DNA, 1578 bp, Homo sapiens
gccgcagctaccggacacctgggctccgactctgacttttggaagcgaggcggccttaggcttcctggttatcagtttccttttagcaggccgtccccgggcgctgtttccttcccaggggtctctcacccgtgtcccggctttctgagctggttgttaacctggctggtcgctctggccgaccgcatcccgtctcggattcctgacgtttctttttcattctttgagtgtttcaggcagtcccaagggtgggccctctttcccttcctgtcactcgctctgcctctggtttcttagaaccagtcagttctctgctggcaaatagccaagatcctccggctgtggttactgattcctcgtctccgtcttgagcctgggctttggtcccatttctatgcgctcggtcgcccgtcgtaacttattccactttgcgtcccctcttctttccttttctggaatgggttgtgggggggttgggagagggggaggagcgattttttttttcttgggagaagaagaggtagtgaattcctttagatcttgacgatgatgggtagagggagagaagtttgaaggagactggctagactaacaatttgatacggtagaaatgaatgggctcacaaatattgtcatcaatagactattttgatcgaaacagaaaataaaagcactgttccagttacagccatcccttgtcataacttttgaactgtatttggaaaaatactggccaggaaagaaaaatgataaaatttttcctcatggtgaataaacaagggcagactcgactttctaagtactatgaacatgtggatattaataagcgtacacttctggaaacagaagtcataaagagctgtctctctcgatccaatgaacaatgctctttcattgaatataaggattttaagctgatatatcggcagtatgcagctctcttcattgtggttggagttaatgacactgagaacgagatggctatttatgaattcattcataactttgtggaagttttagatgagtatttcagccgagtgagtgaattagatataatgtttaatttggataaagtacacatcattttggatgagatggtgttaaatggctgcattgtggaaactaacagggcaagaattcttgcccctctactaattcttgataagatgtcagaaagctgaaaggaagtctcttcgagacaatatggatttatcagaaatgcgagtaccgtggaatacatctcaacatgttaacccagaagaatctggaagaccacaattacaaaatggggtatccttccaaagacattataaataggcattttccacagttcctaaaaagaaaacacaactgtactttaaaatatgtacaaagaaaaaaatttctttaaactgagagagaagttttattttctaattgtaaacatatctgtcgcactttaaattctgttgagcacctaaggaacccttcttggtctatgcttcttttgcaaattgaattcaggaatagcaggatggtagtgggaagaaagtatggcagttttccgtcagccaataaagttttaaaatttaaacacaa

SEQ ID NO: 437315 - DNA, 968 bp, Homo sapiens
ggcctataattccagcactttgggaggccaagctggtcctgaactcctggccccaagccatcctctcaccttggcctcccaaagtgctaggattacggatatgaaccagcacatctggccaaaaaaaatcctagaagttaaggtttatctacatttcccccattgataaacatcttttaaacaagtgagtgatagaactgttctgaatatttgtcagtgggaggctactttcctcacattatcggttcactaagccacatgctctaaaacctgggacactgactggggaagttctatgtctgggtttacatggggaagcgacactaaaattgattgtaccctttccttccttttattgtagaacgagatggctatttatgaattcattcataactttgtggaagttttagatgagtatttcagccgagtgagtgaattagatataatgtttaatttggataaagtacacatcattttggatgagatggtgttaaatggctgcattgtggaaactaacagggcaagaattcttgcccctctactaattcttgataagatgtcagaaagctgaaaggaagtctcttcgagacaatatggatttatcagaaatgcgagtaccgtggaatacatctcaacatgttaacccagaagaatctggaagaccacaattacaaaatggggtatccttccaaagacattataaataggcattttccacagttcctaaaaagaaaacacaactgtactttaaaatatgtacaaagaaaaaaatttctttaaactgagagagaagttttattttctaattgtaaacatatctgtcgcactttaaattctgttgagcacctaaggaacccttcttggtctatgcttcttttgcaaattgaattcaggaatagcaggatggtagtgggaagaaagtatggcagttttccgtcagccaataaagttttaaaatttaaacacaa

SEQ ID NO: 437316 - DNA, 1806 bp, Homo sapiens
  misc_feature (1569)..(1569): n is a, c, g, or t
  misc_feature (1597)..(1597): n is a, c, g, or t
ggtccggaaaaggggggtaagatgcctatcctagtccctctcttcgggctcttcatctcaagaggaacaaacaagagcaaactcagtgttgagaggccccaaaccggactctcccacagagaggtgctcggtcccaagccccggaggcccgggaaggccgcctccggaggagcccccgcagacgccatactaaaagccaaaatggctgccccggaggaggcccgcaccgcgtagccagtgaaggttggggagcaagcttatgcgggaaagagggagggggactccaggaaaagccgttgagaggaccatcacaacctgagcagcacaggttccagttacagccatcccttgtcataacttttgaactgtatttggaaaaatactggccaggaaagaaaaatgataaaatttttcctcatggtgaataaacaagggcagactcgactttctaagtactatgaacatgtggatattaataagcgtacacttctggaaacagaagtcataaagagctgtctctctcgatccaatgaacaatgctctttcattgaatataaggattttaagctgatatatcggcagtatgcagctctcttcattgtggttggagttaatgacactgagaacgagatggctatttatgaattcattcataactttgtggaagttttagatgagtatttcagccgagtgagtgaattagtgaattagatgtatcctttttcaatactgttttccacagtacttggcaaatgcactctggtccttatcaggaaccaattgatgaacttcccaaaatatgctcagccctggagccccagcagacttgcttttctccagacagttcatcattcaaaggagctgcctccaccacccccatctactgaatagccaggggagggcaccaatgaacagcacagtatgggagacacaccaactactcttcaaatcagtgcgtacctgctctacgcgtgaaggtacagaaaacctccacggccttttcagtatttggtgcctttaaagaggcctaaggacttagtttatttgggctagactggaatgcagcagtactgccttcaggcctggacagccaggggctcctcgggccctgtgctctagaaggcccattctatgtctgcttcgccagcaccctttccccatcatggggcagatgcccaccagccctcactatctactgcttgaccatcctctgacttcctgggcccctagaatttataaggtccctagatatcccagaacctgccaccatggcctctgcaagcctctcctccaccttcaccccaagactaggggcaggaatgataagaaggctgggtggtagctgggatgtcccacctacgtgcctggggagagaagcaagagcaggctggagtctctactttgtattcttgtgaggcacaaatataggctagaatccaggccccacaaatataggctagaatccggaatgttttcttgatttaaagacatctttagaccgggcacagtggctcacgccagtaatcccagcactttggagggctgaagcaggaggattgcttgaggccnggagtttgagaccagcctgggcaacatngggagacccagtctctacaaaaaaatttaaaaagccaggcattggtggtgtgtgcctatagtcccaactactagggaggctgaggtgggaggatcacttgagcctgggggactgaggctgcagtgagccatgattgtgctactgcactccaatctggcaacagagcgagaccttgtctttaaaaataaaaataaaaacatctttacaac

SEQ ID NO: 437317 - DNA, 649 bp, Homo sapiens
ggtccggaaaaggggggtaagatgcctatcctagtccctctcttcgggctcttcatctcaagaggaacaaacaagagcaaactcagtgttgagaggccccaaaccggactctcccacagagaggtgctcggtcccaagccccggaggcccgggaaggccgcctccggaggagcccccgcagacgccatactaaaagccaaaatggctgccccggaggaggcccgcaccgcgtagccagtgaaggttggggagcaagcttatgcgggaaagagggagggggactccaggaaaagccgttgagaggaccatcacaacctgagcagcacaggttccagttacagccatcccttgtcataacttttgaactgtatttggaaaaatactggccaggaaagaaaaatgataaaatttttcctcatggtgaataaacaagggcagactcgactttctaagtaatatgcttttgctaccccgttaacagaagaatatacagaactgtcttaggcgaaagtatgtacagtagtccctctcttatccactgtttcgcattctgtggtttgtgttactcatggtcaactgaggtcccaaaatattaaacagaaaattccagaaataaacaatgtataagttttaaactgcatgccattct

SEQ ID NO: 437318 - DNA, 909 bp, Homo sapiens
ggtccggaaaaggggggtaagatgcctatcctagtccctctcttcgggctcttcatctcaagaggaacaaacaagagcaaactcagtgttgagaggccccaaaccggactctcccacagagaggtgctcggtcccaagccccggaggcccgggaaggccgcctccggaggagcccccgcagacgccatactaaaagccaaaatggctgccccggaggaggcccgcaccgcgtagccagtgaaggttggggagcaagcttatgcgggaaagagggagggggactccaggaaaagccgttgagaggaccatcacaacctgagcagcacaggttccagttacagccatcccttgtcataacttttgaactgtatttggaaaaatactggccaggaaagaaaaatgataaaatttttcctcatggtgaataaacaagggcagactcgactttctaagtactatgaacatgtggatattaataagcgtacacttctggaaacagaagtcataaagagctgtctctctcgatccaatgaacaatgctctttcattgaatataaggattttaagctgatatatcggcagtatgcagctctcttcattgtggttggagttaatgacactgagaacgagatggctatttatgaattcattcataactttgtggaagttttagatgagtatttcagccgagtgagtgaattgtctaatggctaaaaaatggtttacttcctcaacccagtttcccagaaattgagtctctttggatctatatcaagaacatgtgttaatacagagttttaataagtaaaagttaaaacttaagtgatgccaaattttctttatctttccttctggtttatccaaagtgttacaagcctatacatgcctgagatctttataaagaactgg

SEQ ID NO: 437319 - DNA, 1041 bp, Homo sapiens
cgccccgctccgcccctatcgcggcgccccgagatcacccgcctccggcgcctggctccctgcaggcgaggagcggaagccgctatctggaggcggactccggcgccacagagccggggcagccgcggcaacggcgaggcgcgaggcaggggcgcccggcagaccccgagaccccgagccagcgggcgccccgagcgggcagcctcgccgggggaggcggaggcggcacggcggccgcgctcgggcgcccctcgcgcagcgctccatgcccgtgtggtgctgccgctgctccctggccggtcatttcagaaactatagtgacactgaaactgaaggagagatttttaattccttagtgcaatactttggtgacaacttggggcgaaaagttaaagcgatgccattagttgaagaaacttctttactggaagattcgtcagtgacttttcctgtggtaataataggaaatggaccctcaggaatatgcctttcttatatgttatcaggctacagaccgtatttatcatcagaagcaatacacccaaatacaatcttaaatagtaaattagaagaagcaagacatctttccattgttgatcaggacttagaatacttgtctgagggccttgagggccgatcatccaatccagttgcagtacttttcgatacacttcttcatccagatgctgactttgggtatgattatccatccgttttgcattggaaattagagcaacatcattatatccctcacgtagttcttggtaaaggtccacctggtggggcttggcataatatggaaggctccatgttgacaatcagctttggaagttggatggaactacctggacttaaatttaaggactgggtatcaagtaaacgaaggtaaagattgaactgtattaaaattctttggtgtacgttgaaaaagagaatgtggaaaaatttcaaaatatttgtgattttgtcatggctgaagaatataaatgtacgtctttcaaataaaaatgtgtccttgaagcagtgattataaaaaactag

SEQ ID NO: 437320 - DNA, 4394 bp, Homo sapiens
gagtacttttctaactccctattgcatcacaaacgcccgcaggggcttaaaaagcagcaggggttcctgcccttccccacactggccggtgtggtctggggcgggcctgatgagcacctggattttcacccggcgtgctggtaattcctacacttgtgggtgtttgagagacatgaagaggggaggatgacctcttcccggaagcgggacttccataaaagaagcgtggtgggcgggtcccgggcacctgtggtttggtgagtcctccaggtaactgtgatgcgggggtcagcgggagaggcacccggaagctcccggcgtctgcaccccggcagcgcgaggaaatgcccaaagaaactatagtgacactgaaactgaaggagagatttttaattccttagtgcaatactttggtgacaacttggggcgaaaagttaaagcgatgccattagttgaagaaacttctttactggaagattcgtcagtgacttttcctgtggtaataataggaaatggaccctcaggaatatgcctttcttatatgttatcaggctacagaccgtatttatcatcagaagcaatacacccaaatacaatcttaaatagtaaattagaagaagcaagacatctttccattgttgatcaggacttagaatacttgtctgagggccttgagggccgatcatccaatccagttgcagtacttttcgatacacttcttcatccagatgctgactttgggtatgattatccatccgttttgcattggaaattagagcaacatcattatatccctcacgtagttcttggtaaaggtccacctggtggggcttggcataatatggaaggctccatgttgacaatcagctttggaagttggatggaactacctggacttaaatttaaggactgggtatcaagtaaacgaaggagcctaaaaggggatcgagttatgccagaggaaatagctcgctactataaacattatgtaaaagtcatgggtcttcagaagaatttcagagagaatacttacataacttccgtatcaagactctacagagatcaagatgatgatgatattcaagacagagatatttcaacaaagcatttacagatagagaagtcaaactttatcaagagaaactgggaaattaggggttatcagcgaatagctgatggttctcatgttcccttctgcctctttgctgagaatgtagcgctggcaactggaacgctggattctcctgcccatctggaaattgaaggggaagattttccttttgtgtttcattcaatgcctgaatttggagctgctataaacaaaggaaagttgcgtggcaaagtggatccagtgttaattgtaggttctgggcttactgccgctgacgcagtactgtgtgcttacaacagtaatatccctgtgattcatgtgtttcgcagacgagtaactgatccaagcttaattttcaaacagcttcccaaaaagctgtatcctgaatatcataaagtctatcatatgatgtgtactcagtcatattctgtagactcaaatcttttatctgattataccagctttcccgagcaccgtgtgctttcctttaagtcggacatgaaatgtgttctccaaagcgtttctggattgaagaaaatatttaagctgtctgcagcagtagtattgataggttctcatcctaatctgtcttttctgaaggatcaagggtgttacctaggccataagtcaagccagccaatcacatgtaagggtaatcctgtggaaatagatacatatacctatgagtgtattaaagaagccaacctttttgcattgggtcctttggttggagacaattttgttcgatttttaaagggaggggcgctgggtgttacacgctgtttagctacaagacagaagaaaaagcatttgtttgttgaaagaggaggaggagatgggatagcttaaagcaagtttacaagtaattaaaatggacagtttgccattaaagatttttaatagtggttttgcagtgtactggcttgaattttctggacttgagttaactgaaggagagcctcaaactatagtaacttcatttttaaaagttactagaatttggtatcctgatttatattgcagtgtttcaaaggtgtcactgtcagacaaatagaaacactgccaacttggtgtaacttaagctttcatttaactaaaacattcttttcttgcaaaacttatttttcatgatcatttttggttatttattatacttgattccaaaatagtacagccttgaatctataaaactgtgcagtcattatgccagaaattatcttaaatatataatgggtcaccttgctgttcaaagggtggtgcaaggtcctgcagcatcttacatctgtagcttgttagaaatgtaaactctcaggccccacaacttacttcctgcattttaacaagatccccaagggatatgtatgctcataaaaatttgagacactggtttaaatgaaaatggatataaggtatgtataactgggggtggggtgagggtaggaggcatttacaactcagattttatttattttgaaattatcaattgtataaatctaatttattaccaaatagggtcttttaaaaaatatttttatcgttgaaaccttgacaggtacttcatattcttctaataatttaaacagtccaataatgtggtatacactttgacatccaagaactcaccaagatgtttttcagagatttattctcgatttaactatcatagcatttaatgaatctgatttgtagttcaataaattgtgggttgaactacttatccctgtgtgaacattgaattactttctgtcactgaaactgaggtatttgggtgtggtaagtacttcgaaaattgtaatactgtttgggcattgtctaaattattaaaggttaaaatagaaaataaagtcagaatttttcttttccattccaaaggtgtacttagagatctctattagtattcattcgagatgacatagcagctcatatcatggttgtttattggatttatctgttctaattatataagtgtgtttactgtctgtgttttcacacaaactgctagaatttttaatgttaagacgaaaacatctgaagttctccatggcaaattgaatttttcagtcattttcttttctttttttggtacaattacttcatctggaatgtcttcattgaactcgttattctatttttcttagaattaaaagtggattaatgtgggtttttctgttcattttattgcagtattaaatgcttaagcttattaggaccataattcactttaaatataattgtatagaatatatttgcgtcgatcaaataattgcttcagatgaattcttagactcttgataatatcacacctaatttaacttgattttacaagctgtacaatccagttttagttttctattgtgataataacttttttcaaaccagtttcacatcttaatgaaataacattctctgactgcacttgcttcagtactctcttgcctgcctgtttttgacctctgcatgagttggattagatgtttttcttactgtcacttctaaatagaaaatgacagtgttataaaaaagggaaggataaaacctttgacatccccttgtgtctcaaaagtccacagttattcaaacaatggctttttttgtgatgagagtatttgttaaaaaaaaaaaaagacttcaagaaaaataaaagttcagtggagctgcaaataaatctggtgaataatttcatctttggtaatctcccatttcctgagttcttcctcaatccaagctgtcctgtgtagtatataacatttgggcattttctctgatatactatactctcatgttctataaatttctgtcccgtaattctaacactttacattttttctttgctatcagctatagctattcatggaagggaagaatcactaaatacttgtctagttatagcatgatgtgagcatctcctccttatccctcgatgcctggcttggtgtctggcaaacagtccataattagcagatgttgaaagaccgtttacaaagcagaatttggggatttaaagtgcaatgatacaacaaaaagatttaattacagcttccagtgttttgactatgtgaaccatatccaactacttttttgaaaatctagttctatgtaatatatttctgtggcatcaaattttagttgattgtattagtcaataggaagtggtggaaaatttctaaataaattcaactattaaataaatgcaagttccactaaatcttagtgtttggaacactgaagaacccagaatgaaacaaaattagactgaatgtaaatgtcatttaaaaatctaact

SEQ ID NO: 437321 - DNA, 450 bp, Homo sapiens
gagtacttttctaactccctattgcatcacaaacgcccgcaggggcttaaaaagcagcaggggttcctgcccttccccacactggccggtgtggtctggggcgggcctgatgagcacctggattttcacccggcgtgctggtaattcctacacttgtgggtgtttgagagacatgaagaggggaggatgacctcttcccggaagcgggacccaaaggtgggttctcaggcgtgggaagctcgacccttcccggggtcctcggcgaagtggccgaggccgcgccttacgcagggaactccgccgggccatctgggtggcccgagttcgcagcagcttctcttccgctcgtccctcggccctctcgacgcgcacccaccggcctcaccaagtcgcacgcagaggggcggcggggcgctgaccgaggtctaggtctcgattgccgccggtcga

SEQ ID NO: 437322 - DNA, 4065 bp, Homo sapiens
cgacgattgtaaatacgactggccgagtgccagagctttgcatgacctgacaggtgcgactcatagatggatcacactagattgaacagacattggggcgaaaagttaaagcgatgccattagttgaagaaacttctttactggaagattcgtcagtgacttttcctgtggtaataataggaaatggaccctcaggaatatgcctttcttatatgttatcaggctacagaccgtatttatcatcagaagcaatacacccaaatacaatcttaaatagtaaattagaagaagcaagacatctttccattgttgatcaggacttagaatacttgtctgagggccttgagggccgatcatccaatccagttgcagtacttttcgatacacttcttcatccagatgctgactttgggtatgattatccatccgttttgcattggaaattagagcaacatcattatatccctcacgtagttcttggtaaaggtccacctggtggggcttggcataatatggaaggctccatgttgacaatcagctttggaagttggatggaactacctggacttaaatttaaggactgggtatcaagtaaacgaaggagcctaaaaggggatcgagttatgccagaggaaatagctcgctactataaacattatgtaaaagtcatgggtcttcagaagaatttcagagagaatacttacataacttccgtatcaagactctacagagatcaagatgatgatgatattcaagacagagatatttcaacaaagcatttacagatagagaagtcaaactttatcaagagaaactgggaaattaggggttatcagcgaatagctgatggttctcatgttcccttctgcctctttgctgagaatgtagcgctggcaactggaacgctggattctcctgcccatctggaaattgaaggggaagattttccttttgtgtttcattcaatgcctgaatttggagctgctataaacaaaggaaagttgcgtggcaaagtggatccagtgttaattgtaggttctgggcttactgccgctgacgcagtactgtgtgcttacaacagtaatatccctgtgattcatgtgtttcgcagacgagtaactgatccaagcttaattttcaaacagcttcccaaaaagctgtatcctgaatatcataaagtctatcatatgatgtgtactcagtcatattctgtagactcaaatcttttatctgattataccagctttcccgagcaccgtgtgctttcctttaagtcggacatgaaatgtgttctccaaagcgtttctggattgaagaaaatatttaagctgtctgcagcagtagtattgataggttctcatcctaatctgtcttttctgaaggatcaagggtgttacctaggccataagtcaagccagccaatcacatgtaagggtaatcctgtggaaatagatacatatacctatgagtgtattaaagaagccaacctttttgcattgggtcctttggttggagacaattttgttcgatttttaaagggaggggcgctgggtgttacacgctgtttagctacaagacagaagaaaaagcatttgtttgttgaaagaggaggaggagatgggatagcttaaagcaagtttacaagtaattaaaatggacagtttgccattaaagatttttaatagtggttttgcagtgtactggcttgaattttctggacttgagttaactgaaggagagcctcaaactatagtaacttcatttttaaaagttactagaatttggtatcctgatttatattgcagtgtttcaaaggtgtcactgtcagacaaatagaaacactgccaacttggtgtaacttaagctttcatttaactaaaacattcttttcttgcaaaacttatttttcatgatcatttttggttatttattatacttgattccaaaatagtacagccttgaatctataaaactgtgcagtcattatgccagaaattatcttaaatatataatgggtcaccttgctgttcaaagggtggtgcaaggtcctgcagcatcttacatctgtagcttgttagaaatgtaaactctcaggccccacaacttacttcctgcattttaacaagatccccaagggatatgtatgctcataaaaatttgagacactggtttaaatgaaaatggatataaggtatgtataactgggggtggggtgagggtaggaggcatttacaactcagattttatttattttgaaattatcaattgtataaatctaatttattaccaaatagggtcttttaaaaaatatttttatcgttgaaaccttgacaggtacttcatattcttctaataatttaaacagtccaataatgtggtatacactttgacatccaagaactcaccaagatgtttttcagagatttattctcgatttaactatcatagcatttaatgaatctgatttgtagttcaataaattgtgggttgaactacttatccctgtgtgaacattgaattactttctgtcactgaaactgaggtatttgggtgtggtaagtacttcgaaaattgtaatactgtttgggcattgtctaaattattaaaggttaaaatagaaaataaagtcagaatttttcttttccattccaaaggtgtacttagagatctctattagtattcattcgagatgacatagcagctcatatcatggttgtttattggatttatctgttctaattatataagtgtgtttactgtctgtgttttcacacaaactgctagaatttttaatgttaagacgaaaacatctgaagttctccatggcaaattgaatttttcagtcattttcttttctttttttggtacaattacttcatctggaatgtcttcattgaactcgttattctatttttcttagaattaaaagtggattaatgtgggtttttctgttcattttattgcagtattaaatgcttaagcttattaggaccataattcactttaaatataattgtatagaatatatttgcgtcgatcaaataattgcttcagatgaattcttagactcttgataatatcacacctaatttaacttgattttacaagctgtacaatccagttttagttttctattgtgataataacttttttcaaaccagtttcacatcttaatgaaataacattctctgactgcacttgcttcagtactctcttgcctgcctgtttttgacctctgcatgagttggattagatgtttttcttactgtcacttctaaatagaaaatgacagtgttataaaaaagggaaggataaaacctttgacatccccttgtgtctcaaaagtccacagttattcaaacaatggctttttttgtgatgagagtatttgttaaaaaaaaaaaaagacttcaagaaaaataaaagttcagtggagctgcaaataaatctggtgaataatttcatctttggtaatctcccatttcctgagttcttcctcaatccaagctgtcctgtgtagtatataacatttgggcattttctctgatatactatactctcatgttctataaatttctgtcccgtaattctaacactttacattttttctttgctatcagctatagctattcatggaagggaagaatcactaaatacttgtctagttatagcatgatgtgagcatctcctccttatccctcgatgcctggcttggtgtctggcaaacagtccataattagcagatgttgaaagaccgtttacaaagcagaatttggggatttaaagtgcaatgatacaacaaaaagatttaattacagcttccagtgttttgactatgtgaaccatatccaactacttttttgaaaatctagttctatgtaatatatttctgtggcatcaaattttagttgattgtattagtcaataggaagtggtggaaaatttctaaataaattcaactattaaataaatgcaagttccactaaatcttagtgtttggaacactgaagaacccagaatgaaacaaaattagactgaatgtaaatgtcatttaaaaatctaact

SEQ ID NO: 437323 - DNA, 3224 bp, Homo sapiens
  misc_feature (2938)..(2938): n is a, c, g, or t
  misc_feature (3065)..(3065): n is a, c, g, or t
  misc_feature (3070)..(3070): n is a, c, g, or t
cgccccgctccgcccctatcgcggcgccccgagatcacccgcctccggcgcctggctccctgcaggcgaggagcggaagccgctatctggaggcggactccggcgccacagagccggggcagccgcggcaacggcgaggcgcgaggcaggggcgcccggcagaccccgagaccccgagccagcgggcgccccgagcgggcagcctcgccgggggaggcggaggcggcacggcggccgcgctcgggcgcccctcgcgcagcgctccatgcccgtgtggtgctgccgctgctccctggccggtcatttcagaaactatagtgacactgaaactgaaggagagatttttaattccttagtgcaatactttggtgacaacttggggcgaaaagttaaagcgatgccattagttgaagaaacttctttactggaagattcgtcagtgacttttcctgtggtaataataggaaatggaccctcaggaatatgcctttcttatatgttatcaggctacagaccgtatttatcatcagaagcaatacacccaaatacaatcttaaatagtaaattagaagaagcaagacatctttccattgttgatcaggacttagaatacttgtctgagggccttgagggccgatcatccaatccagttgcagtacttttcgatacacttcttcatccagatgctgactttgggtatgattatccatccgttttgcattggaaattagagcaacatcattatatccctcacgtagttcttggtaaaggtccacctggtggggcttggcataatatggaaggctccatgttgacaatcagctttggaagttggatggaactacctggacttaaatttaaggactgggtatcaagtaaacgaaggagcctaaaaggggatcgagttatgccagaggaaatagctcgctactataaacattatgtaaaagtcatgggtcttcagaagaatttcagagagaatacttacataacttccgtatcaagactctacagagatcaagatgatgatgatattcaagacagagatatttcaacaaagcatttacagatagagaagtcaaactttatcaagagaaactgggaaattaggggttatcagcgaatagctgatggttctcatgttcccttctgcctctttgctgagaatgtagcgctggcaactggaacgctggattctcctgcccatctggaaattgaaggggaagattttccttttgtgtttcattcaatgcctgaatttggagctgctataaacaaaggaaagttgcgtggcaaagtggatccagtgttaattgtaggttctgggcttactgccgctgacgcagtactgtgtgcttacaacagtaatatccctgtgattcatgtgtttcgcagacgagtaactgatccaagcttaattttcaaacagcttcccaaaaagctgtatcctgaatatcataaagtctatcatatgatgtgtactcagtcatattctgtagactcaaatcttttatctgattataccagctttcccgagcaccgtgtgctttcctttaagtcggacatgaaatgtgttctccaaagcgtttctggattgaagaaaatatttaagctgtctgcagcagtagtattgataggttctcatcctaatctgtcttttctgaaggatcaagggtgttacctaggccataagtcaagccagccaatcacatgtaagggtaatcctgtggaaatagatacatatacctatgagtgtattaaagaagccaacctttttgcattgggtcctttggttggagacaattttgttcgatttttaaagggaggggcgctgggtgttacacgctgtttagctacaagacagaagaaaaagcatttgtttgttgaaagaggaggaggagatgggatagcttaaagcaagtttacaagtaattaaaatggacagtttgccattaaagatttttaatagtggttttgcagtgtactggcttgaattttctggacttgagttaactgaaggagagcctcaaactatagtaacttcatttttaaaagttactagaatttggtatcctgatttatattgcagtgtttcaaaggtgtcactgtcagacaaatagaaacactgccaacttggtgtaacttaagctttcatttaactaaaacattcttttcttgcaaaacttatttttcatgatcatttttggttatttattatacttgattccaaaatagtacagccttgaatctataaaactgtgcagtcattatgccagaaattatcttaaatatataatgggtcaccttgctgttcaaagggtggtgcaaggtcctgcagcatcttacatctgtagcttgttagaaatgtaaactctcaggccccacaacttacttcctgcattttaacaagatccccaagggatatgtatgctcataaaaatttgagacactggtttaaatgaaaatggatataaggtatgtataactgggggtggggtgagggtaggaggcatttacaactcagattttatttattttgaaattatcaattgtataaatctaatttattaccaaatagggtcttttaaaaaatatttttatcgttgaaaccttgacaggtacttcatattcttctaataatttaaacagtccaataatgtggtatacactttgacatccaagaactcaccaagatgtttttcagagatttattctcgatttaactatcataaggccccaaatttttaaacttgggaaaattccttgggaagttttggtagttcaataaatgtgggttgaactacttatccctgtgtgaacattgaatttacctttttttccccttgggtcactttggaaagaaacacctttgggaaggttaaattttctatgggctcgtagggtaagtaacttcgacaaaatcgttaatacttgttgngggcattgtctacaattattacaaggttaacaataggaaaaataaaagctccaagggaaaattttttttttcccttttttttttcccccaatttccccaaaagggtgtactttcacgagattctccntaatntacgtattcccattttcccggaaacgaaattggggaaaacccccaaatttttaaaagggggcccacaaaggggcctttcccaaatttaatttccaaaattgggggcttttgctgttctaactttcgggggaaacttttcttaattccttgggtc

SEQ ID NO: 437324 - DNA, 4349 bp, Homo sapiens
cgccccgctccgcccctatcgcggcgccccgagatcacccgcctccggcgcctggctccctgcaggcgaggagcggaagccgctatctggaggcggactccggcgccacagagccggggcagccgcggcaacggcgaggcgcgaggcaggggcgcccggcagaccccgagaccccgagccagcgggcgccccgagcgggcagcctcgccgggggaggcggaggcggcacggcggccgcgctcgggcgcccctcgcgcagcgctccatgcccgtgtggtgctgccgctgctccctggccggtcatttcagaaactatagtgacactgaaactgaaggagagatttttaattccttagtgcaatactttggtgacaacttggggcgaaaagttaaagcgatgccattagttgaagaaacttctttactggaagattcgtcagtgacttttcctgtggtaataataggaaatggaccctcaggaatatgcctttcttatatgttatcaggctacagaccgtatttatcatcagaagcaatacacccaaatacaatcttaaatagtaaattagaagaagcaagacatctttccattgttgatcaggacttagaatacttgtctgagggccttgagggccgatcatccaatccagttgcagtacttttcgatacacttcttcatccagatgctgactttgggtatgattatccatccgttttgcattggaaattagagcaacatcattatatccctcacgtagttcttggtaaaggtccacctggtggggcttggcataatatggaaggctccatgttgacaatcagctttggaagttggatggaactacctggacttaaatttaaggactgggtatcaagtaaacgaaggagcctaaaaggggatcgagttatgccagaggaaatagctcgctactataaacattatgtaaaagtcatgggtcttcagaagaatttcagagagaatacttacataacttccgtatcaagactctacagagatcaagatgatgatgatattcaagacagagatatttcaacaaagcatttacagatagagaagtcaaactttatcaagagaaactgggaaattaggggttatcagcgaatagctgatggttctcatgttcccttctgcctctttgctgagaatgtagcgctggcaactggaacgctggattctcctgcccatctggaaattgaaggggaagattttccttttgtgtttcattcaatgcctgaatttggagctgctataaacaaaggaaagttgcgtggcaaagtggatccagtgttaattgtaggttctgggcttactgccgctgacgcagtactgtgtgcttacaacagtaatatccctgtgattcatgtgtttcgcagacgagtaactgatccaagcttaattttcaaacagcttcccaaaaagctgtatcctgaatatcataaagtctatcatatgatgtgtactcagtcatattctgtagactcaaatcttttatctgattataccagctttcccgagcaccgtgtgctttcctttaagtcggacatgaaatgtgttctccaaagcgtttctggattgaagaaaatatttaagctgtctgcagcagtagtattgataggttctcatcctaatctgtcttttctgaaggatcaagggtgttacctaggccataagtcaagccagccaatcacatgtaagggtaatcctgtggaaatagatacatatacctatgagtgtattaaagaagccaacctttttgcattgggtcctttggttggagacaattttgttcgatttttaaagggaggggcgctgggtgttacacgctgtttagctacaagacagaagaaaaagcatttgtttgttgaaagaggaggaggagatgggatagcttaaagcaagtttacaagtaattaaaatggacagtttgccattaaagatttttaatagtggttttgcagtgtactggcttgaattttctggacttgagttaactgaaggagagcctcaaactatagtaacttcatttttaaaagttactagaatttggtatcctgatttatattgcagtgtttcaaaggtgtcactgtcagacaaatagaaacactgccaacttggtgtaacttaagctttcatttaactaaaacattcttttcttgcaaaacttatttttcatgatcatttttggttatttattatacttgattccaaaatagtacagccttgaatctataaaactgtgcagtcattatgccagaaattatcttaaatatataatgggtcaccttgctgttcaaagggtggtgcaaggtcctgcagcatcttacatctgtagcttgttagaaatgtaaactctcaggccccacaacttacttcctgcattttaacaagatccccaagggatatgtatgctcataaaaatttgagacactggtttaaatgaaaatggatataaggtatgtataactgggggtggggtgagggtaggaggcatttacaactcagattttatttattttgaaattatcaattgtataaatctaatttattaccaaatagggtcttttaaaaaatatttttatcgttgaaaccttgacaggtacttcatattcttctaataatttaaacagtccaataatgtggtatacactttgacatccaagaactcaccaagatgtttttcagagatttattctcgatttaactatcatagcatttaatgaatctgatttgtagttcaataaattgtgggttgaactacttatccctgtgtgaacattgaattactttctgtcactgaaactgaggtatttgggtgtggtaagtacttcgaaaattgtaatactgtttgggcattgtctaaattattaaaggttaaaatagaaaataaagtcagaatttttcttttccattccaaaggtgtacttagagatctctattagtattcattcgagatgacatagcagctcatatcatggttgtttattggatttatctgttctaattatataagtgtgtttactgtctgtgttttcacacaaactgctagaatttttaatgttaagacgaaaacatctgaagttctccatggcaaattgaatttttcagtcattttcttttctttttttggtacaattacttcatctggaatgtcttcattgaactcgttattctatttttcttagaattaaaagtggattaatgtgggtttttctgttcattttattgcagtattaaatgcttaagcttattaggaccataattcactttaaatataattgtatagaatatatttgcgtcgatcaaataattgcttcagatgaattcttagactcttgataatatcacacctaatttaacttgattttacaagctgtacaatccagttttagttttctattgtgataataacttttttcaaaccagtttcacatcttaatgaaataacattctctgactgcacttgcttcagtactctcttgcctgcctgtttttgacctctgcatgagttggattagatgtttttcttactgtcacttctaaatagaaaatgacagtgttataaaaaagggaaggataaaacctttgacatccccttgtgtctcaaaagtccacagttattcaaacaatggctttttttgtgatgagagtatttgttaaaaaaaaaaaaagacttcaagaaaaataaaagttcagtggagctgcaaataaatctggtgaataatttcatctttggtaatctcccatttcctgagttcttcctcaatccaagctgtcctgtgtagtatataacatttgggcattttctctgatatactatactctcatgttctataaatttctgtcccgtaattctaacactttacattttttctttgctatcagctatagctattcatggaagggaagaatcactaaatacttgtctagttatagcatgatgtgagcatctcctccttatccctcgatgcctggcttggtgtctggcaaacagtccataattagcagatgttgaaagaccgtttacaaagcagaatttggggatttaaagtgcaatgatacaacaaaaagatttaattacagcttccagtgttttgactatgtgaaccatatccaactacttttttgaaaatctagttctatgtaatatatttctgtggcatcaaattttagttgattgtattagtcaataggaagtggtggaaaatttctaaataaattcaactattaaataaatgcaagttccactaaatcttagtgtttggaacactgaagaacccagaatgaaacaaaattagactgaatgtaaatgtcatttaaaaatctaact

SEQ ID NO: 437325 - DNA, 3211 bp, Homo sapiens
tcatcagtcggtaccaacagacagtgtcttgaatggacaaaaaatcatgaatttcatatcagtttaatagcctgagctgggtaatggtcttactctgaccctgtggaaaagatgcctgaatttggagctgctataaacaaaggaaagttgcgtggcaaagtggatccagtgttaattgtaggttctgggcttactgccgctgacgcagtactgtgtgcttacaacagtaatatccctgtgattcatgtgtttcgcagacgagtaactgatccaagcttaattttcaaacagcttcccaaaaagctgtatcctgaatatcataaagtctatcatatgatgtgtactcagtcatattctgtagactcaaatcttttatctgattataccagctttcccgagcaccgtgtgctttcctttaagtcggacatgaaatgtgttctccaaagcgtttctggattgaagaaaatatttaagctgtctgcagcagtagtattgataggttctcatcctaatctgtcttttctgaaggatcaagggtgttacctaggccataagtcaagccagccaatcacatgtaagggtaatcctgtggaaatagatacatatacctatgagtgtattaaagaagccaacctttttgcattgggtcctttggttggagacaattttgttcgatttttaaagggaggggcgctgggtgttacacgctgtttagctacaagacagaagaaaaagcatttgtttgttgaaagaggaggaggagatgggatagcttaaagcaagtttacaagtaattaaaatggacagtttgccattaaagatttttaatagtggttttgcagtgtactggcttgaattttctggacttgagttaactgaaggagagcctcaaactatagtaacttcatttttaaaagttactagaatttggtatcctgatttatattgcagtgtttcaaaggtgtcactgtcagacaaatagaaacactgccaacttggtgtaacttaagctttcatttaactaaaacattcttttcttgcaaaacttatttttcatgatcatttttggttatttattatacttgattccaaaatagtacagccttgaatctataaaactgtgcagtcattatgccagaaattatcttaaatatataatgggtcaccttgctgttcaaagggtggtgcaaggtcctgcagcatcttacatctgtagcttgttagaaatgtaaactctcaggccccacaacttacttcctgcattttaacaagatccccaagggatatgtatgctcataaaaatttgagacactggtttaaatgaaaatggatataaggtatgtataactgggggtggggtgagggtaggaggcatttacaactcagattttatttattttgaaattatcaattgtataaatctaatttattaccaaatagggtcttttaaaaaatatttttatcgttgaaaccttgacaggtacttcatattcttctaataatttaaacagtccaataatgtggtatacactttgacatccaagaactcaccaagatgtttttcagagatttattctcgatttaactatcatagcatttaatgaatctgatttgtagttcaataaattgtgggttgaactacttatccctgtgtgaacattgaattactttctgtcactgaaactgaggtatttgggtgtggtaagtacttcgaaaattgtaatactgtttgggcattgtctaaattattaaaggttaaaatagaaaataaagtcagaatttttcttttccattccaaaggtgtacttagagatctctattagtattcattcgagatgacatagcagctcatatcatggttgtttattggatttatctgttctaattatataagtgtgtttactgtctgtgttttcacacaaactgctagaatttttaatgttaagacgaaaacatctgaagttctccatggcaaattgaatttttcagtcattttcttttctttttttggtacaattacttcatctggaatgtcttcattgaactcgttattctatttttcttagaattaaaagtggattaatgtgggtttttctgttcattttattgcagtattaaatgcttaagcttattaggaccataattcactttaaatataattgtatagaatatatttgcgtcgatcaaataattgcttcagatgaattcttagactcttgataatatcacacctaatttaacttgattttacaagctgtacaatccagttttagttttctattgtgataataacttttttcaaaccagtttcacatcttaatgaaataacattctctgactgcacttgcttcagtactctcttgcctgcctgtttttgacctctgcatgagttggattagatgtttttcttactgtcacttctaaatagaaaatgacagtgttataaaaaagggaaggataaaacctttgacatccccttgtgtctcaaaagtccacagttattcaaacaatggctttttttgtgatgagagtatttgttaaaaaaaaaaaaagacttcaagaaaaataaaagttcagtggagctgcaaataaatctggtgaataatttcatctttggtaatctcccatttcctgagttcttcctcaatccaagctgtcctgtgtagtatataacatttgggcattttctctgatatactatactctcatgttctataaatttctgtcccgtaattctaacactttacattttttctttgctatcagctatagctattcatggaagggaagaatcactaaatacttgtctagttatagcatgatgtgagcatctcctccttatccctcgatgcctggcttggtgtctggcaaacagtccataattagcagatgttgaaagaccgtttacaaagcagaatttggggatttaaagtgcaatgatacaacaaaaagatttaattacagcttccagtgttttgactatgtgaaccatatccaactacttttttgaaaatctagttctatgtaatatatttctgtggcatcaaattttagttgattgtattagtcaataggaagtggtggaaaatttctaaataaattcaactattaaataaatgcaagttccactaaatcttagtgtttggaacactgaagaacccagaatgaaacaaaattagactgaatgtaaatgtcatttaaaaatctaact

SEQ ID NO: 437326 - DNA, 6124 bp, Homo sapiens
tcaaaggggcacgagggccagcaatggcagcagcagcggcgggcagtctgcccaagtgtcttaggaaccaaaagcaaataaaagtgtttccatatatgccaccagccaagtggccatcctaattcagaaagaagctagcctttgagtgtctgtcatggtgcatccgtttcagtattatttcctaaaatgagaagcccctgtgtcaacaagatccaggggctggagcccaatgccaagcctgtgttgtccccagcgaccctgcagctgctcgctctgatgtaccctgtgccattcaaggagatgtggtccaggaaagtgagcctcatggttttcagagaagtcattgttctgtttacattttcataaaacctgtttaaaatagctccccgtctcaggctttcagcagtaacagtgagctgactggcaagttcgatgttagctcccgggacactcagcagcgatggtgagcattttggtttccttaaggcccagcaagacttccagggacatctctggtgaagccagaatggagacacccgtgacctcaggctgaaagtcactcgacattggtctcttgtgttgatagggaaggaaatcaggcattcctatttctttaaataacaaaaccactaattgccactcaatgctggaatattttgggtcacctaatcatagatttctcagggcatcaatactcaaatataggctgattatgccccagttcaaatgggaactattaacagagtgcatttcttgcttgctgggtttcaacagacatcagccaaaagaacaaaagagatgtcaggacagattccaggagtgtcggagcacatgtgtggcacccgctccctctggcagcgaatgtaggaagtcgccaaatttacccactcttcaacaagtcattgtttaaacacggtttttcattttctcaacttttaatagcaaaaagtgccaaagtcctcagagacctaacagccttggtctaccgtgctgaccagggtgaaggcacggcgagggactcctcccagacgtgcctcttgtgtgccagctggctgtggctcgggagcagacgcaggcctctccattgtccaggggagcctggcggcgcatccctcctctcccacctcctggcacttccagctgggtgtcccacatgttggattccgtccccaccacacttccagagaccggagaactgtgcagggcctaaggccgtttggatgaattgtcaaaacaagatgcttccagttacagcggcaggagcgggactgggagcacgggctgacggctgctggtgcctttcttcccacctcgcttgcctgtttccgcttgacccttcctccagctccgatgagaagagtataaagcatcttcctaacgggtgtgtttgctatacgaacataatggacgtgaagtggggcagaaacccagaactcagcattcaaggatgcccaggagagctgtccctgttttaaagagctgtgttttgttttgtttcgcatttagagagcagacaaggcacccttctgctgcgctgatacgtttcttacactgggccattttagacccccagggaaacagccttcctggagcgttgtctggaggttccagggacagggcagcctcccagagccgagcaagagctcaaggtacaaatgagagatttgctataccgtgagaagtcaacaacttagccaccacttccccgcaatggaccatgtaacaaatacctcagcaggccctgcaaaaggccatgctagagctgaggcgcacagcctgtggcctctgtagttagggcaggtgggatggagactccttgagtgcacacacctgagcctgcccacacacaggggagcagcatctcgtatgacgtctggaaggaacttcggttgtgtaaagggagccttgaagatacgtgcaaaaggtgctaccccaatttggtgaaactgacattgggcacgtcttgggcttaggagaagcggccgatggtcccggcctgcagtgacaaacccccctccccgcaccgcccccagcaccccctctcctcttcacctcttcctgctggccacgaggaagccacttcctcagagagaccctaccagatgcggatggaaacagatgcaccaaagcaagccctgatgaaaccgcgacttcctaaggtctgtctcctctgaacttgcacctgggcctctctgtgtttggttccaagcacttcccacctcaaactcccattttcaaaccactgtatctctgcgcacatctgctacttaccagccgcatacatgatggagggttttttggtcctgatccagtggccacacctgtctttgaaatgtctcactgaactccagttttaaaatagattcattgcttcaacacagcaagcccaatgcacccagctaagactggcttgaccgacagcctggcctttggtggggggcttcctggggcctggggaaagctggccaccttcaacagctggtacctcttcaacagtgtggcctttcaaaatgcagatgccaccaggagaacatgcccacagctcaccacctatggatgccatggctctgggcagctttcaaagcaggttcctgtggtctcctcagctgtttgagggggtaacagcaaatcagcctccattttaaaatgaaaacaccagcctccagatgtagggcctgctgggtgttgctagccgctggtccccaggcacggtgcactttctccacctcctgcagcctccctgttgtttctagactcttgcacctggtgagtgcaaggataggtgacccaggggcctgcagccttgtcctcagctcccatctcctggactgccagcctcaccctctgcagttagcatggttggcctgatgcagggatcccgagggattactttttagaccttctttcacattcagaaaagtagtatagattcaggagaggcaagaaaattatgctgtccatagaagtcacccatgaagactgatgccaccacctgaaggctcatgattgttaaaaatgtccacgggaacctctcgtccacaggaggtttgtctcaacacttcccatttttacggcattggcattgccaagcatggggaagtatctgctcttctcatgttaaaagtggcccagcttttcttaactcagtccaagctgacttgtttagctgcactggaatttcttaccaaccaaatatttgcatcgagcaaagggggctgtgtgcacctccctaatggcagcgatgatggctgctgtcattcaagcccatcttcagacgtcacagtctggaagtgaaatgtccacaaacatctgtggcagaaaaggctatacggaccacccagttgtgctgcagctttacagagcaaggaagggttgtggcaaataaatgattaacctgcctcgactgtgctgagggcaacaaaggccatctcaccaaaggattattcgatgccattaaatcatcccgtgaccttcctgcttccgagtccatggcctttgcccagggcatgtactcccctgagaggccttctgcctagaaagatctatgactgggttccaaagttgaggcctaggtttttgctgggatttagatattttcaggcaccattttgacagcattcaggaaaacggttattgaccccatagactagggtaagaataaaggcaataaatttggtctgactcagaatataggagatccatatatttctctggaaaccacagtgtacactaaaatgtgaaattgaaggttttgttaaaaagaaaaagataatgagcttcatgctttgtttaattacataatgatttccattacgctatttctgtgaaatgcagcaggttcttaaacgttatttcagtggcatgggctggaagcttatcacaaaaagccatgtgtgtggccttatcagaacagaaagagacaggctggtgcccaaggctgctgcctgctccaccttttgccagctctggacatctgaggacgtcccggcagatctggaatggggccctcaactgaccatttgcttctcagaatttcagtttgagacatgagaggtataatcagttacttttctccccccagagaaacccttttgtgaggggagaggagctatggtatgtggttcagctgaaacacatacaactgcatccttttggagtcctttgccaacaaaaacagaccaacagaccagatggtgtccatgttcaatatcatgtcttgatggacgcagctgatgacctcaaatacttgagtggtctcatggctgttagatggattatttgaaaaaaaaaaaaaaaaaagagagaaaaaataattgatttttacatcagagatagcaaactaagacctggggaggggggtcagcttttattttattttattttttttaagtttgctagttgggtcaaatgtgaggaggagggagtctacctgccacctcttctcttgcccctcttctgcccacacatccagcatccaaaatccattcatttaatgaattgataaagtgccgtgcaaactggtgcacaaacaggcccccagtccacgcagcctggctcctaggaaaagtggtgaccgggcgtgggggggcatgccgcagccctgggacacagtcgggcaccttccccggacccccaggccttggctgtgcctcaagtcagagagggtcagccttcaggccccggagacgagtgactggccgatcatttcacaataaaatcactcacttttggcaacttcactttttttaaggcacagtcagttccttttctcatgtacctcacaaaagatgaagaccatgtagtactctttttggtaaagttacagtgttcatgttaaatatcacttttttctacattgtgtggtaaaaagaactacgttaatagctatatcttaaatactgtgatttgactttttgaaaaatatcctaatacaaatattttactaacttacaatcactcatttaataagaaacatttggattcttttgaaatcagtgttaattgactcatattcttaaaagcctggctcttgaccctattggaaacacaaaggaagctgaaatcaaacatctaaaatacactgcgtacacgtgtgcgtgcacacacacacacacacacacacacacacagctcttcatttctcctgagccatgcagaatttactttcaatgtggaaatctgttccctttaccacactgtatatgcacagagcacaagagaggctatctctagtcacttccaccagcgaggccttaggactccgtattagaggccaccgatttcatacaacagtgtttcgctaaagacccttcactattcttgtttagtaaatagctgtctgctcttcagggaactgttacctatgggttattaccaaagaacgctggcaattggaaatgtcctgatggaaattctttgcacgtgccggttctctggcatcctccaggtggcccaacccaaagcagaaagcagaaaccacagaccccgtgagtctccccataccttgtttccaataacttggcaaaacttcttggtgcatattggttacaccctctgggattcataatgccattaggctaaaaccctaagagagagggttgacagaaacacacgcgagaatgaggcagatcccagagcaaggactgggcccagactctccacatgtgctctactagtgagtgccttatactctcagtattttggggcttacagcttcttatttgtgctaaaaaggtgcagttccaaagtaggaactgccacacaggccccagcatcctctctccaacttcatacctctctcctggtggggggagcgggcatccaggacctccggaatcaaggatgtgcagagaagagcgaaagtaatttttctagtcacatgaactgattggttccaggcaattagaaaatggctataaaataaccttaattttaaaaaaaaatcttgggtcttcgttttcctattaggagactgaactgaccacatgtattgatttatatcctgaatatatgggaacttctgtgtttgggatgtcctactgtaagactgatgaatgtacagagttaatttcagggtacagttttgccttaatggttttaaaaaataaactattttttaaaattt

SEQ ID NO: 437327 - DNA, 6070 bp, Homo sapiens
tcaaaggggcacgagggccagcaatggcagcagcagcggcgggcagtctgcccaagtgtcttaggaaccaaaagcaaataaaagtgtttccatatatgccaccagccaagtggccatcctaattcagaaagaagctagcctttgagtgtctgtcatggtgcatccgtttcagtattatttcctaaaatgagaagcccctgtgtcaacaagatccaggggctggagcccaatgccaagcctgtgttgtccccagcgaccctgcagctgctcgctctgatgtaccctgtgccattcaaggagatgtggtccaggaaagtgagcctcatggttttcagagaagtcattgttctgtttacattttcataaaacctgtttaaaatagctccccgtctcaggctttcagcagtaacagtgagctgactggcaagttcgatgttagctcccgggacactcagcagcgatggtgagcattttggtttccttaaggcccagcaagacttccagggacatctctggtgaagccagaatggagacacccgtgacctcaggctgaaagtcactcgacattggtctcttgtgttgatagggaaggaaatcaggcattcctatttctttaaataacaaaaccactaattgccactcaatgctggaatattttgggtcacctaatcatagatttctcagggcatcaatactcaaatataggctgattatgccccagttcaaatgggaactattaacagagtgcatttcttgcttgctgggtttcaacagacatcagccaaaagaacaaaagagatgtcaggacagattccaggagtgtcggagcacatgtgtggcacccgctccctctggcagcgaatgtaggaagtcgccaaatttacccactcttcaacaagtcattgtttaaacacggtttttcattttctcaacttttaatagcaaaaagtgccaaagtcctcagagacctaacagccttggtctaccgtgctgaccagggtgaaggcacggcgagggactcctcccagacgtgcctcttgtgtgccagctggctgtggctcgggagcagacgcaggcctctccattgtccaggggagcctggcggcgcatccctcctctcccacctcctggcacttccagctgggtgtcccacatgttggattccgtccccaccacacttccagagaccggagaactgtgcagggcctaaggccgtttggatgaattgtcaaaacaagatgcttccagttacagcggcaggagcgggactgggagcacgggctgacggctgctggtgcctttcttcccacctcgcttgcctgtttccgcttgacccttcctccagctccgatgagaagagtataaagcatcttcctaacgggtgtgtttgctatacgaacataatggacgtgaagtggggcagaaacccagaactcagcattcaaggatgcccaggagagctgtccctgttttaaagagctgtgttttgttttgtttcgcatttagagagcagacaaggcacccttctgctgcgctgatacgtttcttacactgggccattttagacccccagggaaacagccttcctggagcgttgtctggaggttccagggacagggcagcctcccagagccgagcaagagctcaaggtacaaatgagagatttgctataccgtgagaagtcaacaacttagccaccacttccccgcaatggaccatgtaacaaatacctcagcaggccctgcaaaaggccatgctagagctgaggcgcacagcctgtggcctctgtagttagggcaggtgggatggagactccttgagtgcacacacctgagcctgcccacacacaggggagcagcatctcgtatgacgtctggaaggaacttcggttgtgtaaagggagccttgaagatacgtgcaaaaggtgctaccccaatttggtgaaactgacattgggcacgtcttgggcttaggagaagcggccgatggtcccggcctgcagtgacaaacccccctccccgcaccgcccccagcaccccctctcctcttcacctcttcctgctggccacgaggaagccacttcctcagagagaccctaccagatgcggatggaaacagatgcaccaaagcaagccctgatgaaaccgcgacttcctaaggtctgtctcctctgaacttgcacctgggcctctctgtgtttggttccaagcacttcccacctcaaactcccattttcaaaccactgtatctctgcgcacatctgctacttaccagccgcatacatgatggagggttttttggtcctgatccagtggccacacctgtctttgaaatgtctcactgaactccagttttaaaatagattcattgcttcaacacagcaagcccaatgcacccagctaagactggcttgaccgacagcctggcctttggtggggggcttcctggggcctggggaaagctggccaccttcaacagctggtacctcttcaacagtgtggcctttcaaaatgcagatgccaccaggagaacatgcccacagctcaccacctatggatgccatggctctgggcagctttcaaagcaggttcctgtggtctcctcagctgtttgagggggtaacagcaaatcagcctccattttaaaatgaaaacaccagcctccagatgtagggcctgctgggtgttgctagccgctggtccccaggcacggtgcactttctccacctcctgcagcctccctgttgtttctagactcttgcacctggtgagtgcaaggataggtgacccaggggcctgcagccttgtcctcagctcccatctcctggactgccagcctcaccctctgcagttagcatggttggcctgatgcagggatcccgagggattactttttagaccttctttcacattcagaaaagtagtatagattcaggagaggcaagaaaattatgctgtccatagaagtcacccatgaagactgatgccaccacctgaaggctcatgattgttaaaaatgtccacgggaacctctcgtccacaggaggtttgtctcaacacttcccatttttacggcattggcattgccaagcatggggaagtatctgctcttctcatgttaaaagtggcccagcttttcttaactcagtccaagctgacttgtttagctgcactggaatttcttaccaaccaaatatttgcatcgagcaaagggggctgtgtgcacctccctaatggcagcgatgatggctgctgtcattcaagcccatcttcagacgtcacagtctggaagtgaaatgtccacaaacatctgtggcagaaaaggctatacggaccacccagttgtgctgcagctttacagagcaaggaagggttgtggcaaataaatgattaacctgcctcgactgtgctgagggcaacaaaggccatctcaccaaaggattattcgatgccattaaatcatcccgtgaccttcctgcttccgagtccatggcctttgcccagggcatgtactcccctgagaggccttctgcctagaaagatctatgactgggttccaaagttgaggcctaggtttttgctgggatttagatattttcaggcaccattttgacagcattcaggaaaacggttattgaccccatagactagggtaagaataaaggcaataaatttggtctgactcagaatataggagatccatatatttctctggaaaccacagtgtacactaaaatgtgaaattgaaggttttgttaaaaagaaaaagataatgagcttcatgctttgtttaattacataatgatttccattacgctatttctgtgaaatgcagcaggttcttaaacgttatttcagtggcatgggctggaagcttatcacaaaaagccatgtgtgtggccttatcagaacagaaagagacaggctggtgcccaaggctgctgcctgctccaccttttgccagctctggacatctgaggacgtcccggcagatctggaatggggccctcaactgaccatttgcttctcagaatttcagtttgagacatgagaggtataatcagttacttttctccccccagagaaacccttttgtgaggggagaggagctatggtatgtggttcagctgaaacacatacaactgcatccttttggagtcctttgccaacaaaaacagaccaacagaccagatggtgtccatgttcaatatcatgtcttgatggacgcagctgatgacctcaaatacttgagtggtctcatggctgttagatggattatttgaaaaaaaaaaaaaaaaaagagagaaaaaataattgatttttacatcagagatagcaaactaagacctggggaggggggtcagcttttattttattttattttttttaagtttgctagttgggtcaaatgtgaggaggagggagtctacctgccacctcttctcttgcccctcttctgcccacacatccagcatccaaaatccattcatttaatgaattgataaagtgccgtgcaaactggtgcacaaacaggcccccagtccacgcagcctggctcctaggcaccttccccggacccccaggccttggctgtgcctcaagtcagagagggtcagccttcaggccccggagacgagtgactggccgatcatttcacaataaaatcactcacttttggcaacttcactttttttaaggcacagtcagttccttttctcatgtacctcacaaaagatgaagaccatgtagtactctttttggtaaagttacagtgttcatgttaaatatcacttttttctacattgtgtggtaaaaagaactacgttaatagctatatcttaaatactgtgatttgactttttgaaaaatatcctaatacaaatattttactaacttacaatcactcatttaataagaaacatttggattcttttgaaatcagtgttaattgactcatattcttaaaagcctggctcttgaccctattggaaacacaaaggaagctgaaatcaaacatctaaaatacactgcgtacacgtgtgcgtgcacacacacacacacacacacacacacacagctcttcatttctcctgagccatgcagaatttactttcaatgtggaaatctgttccctttaccacactgtatatgcacagagcacaagagaggctatctctagtcacttccaccagcgaggccttaggactccgtattagaggccaccgatttcatacaacagtgtttcgctaaagacccttcactattcttgtttagtaaatagctgtctgctcttcagggaactgttacctatgggttattaccaaagaacgctggcaattggaaatgtcctgatggaaattctttgcacgtgccggttctctggcatcctccaggtggcccaacccaaagcagaaagcagaaaccacagaccccgtgagtctccccataccttgtttccaataacttggcaaaacttcttggtgcatattggttacaccctctgggattcataatgccattaggctaaaaccctaagagagagggttgacagaaacacacgcgagaatgaggcagatcccagagcaaggactgggcccagactctccacatgtgctctactagtgagtgccttatactctcagtattttggggcttacagcttcttatttgtgctaaaaaggtgcagttccaaagtaggaactgccacacaggccccagcatcctctctccaacttcatacctctctcctggtggggggagcgggcatccaggacctccggaatcaaggatgtgcagagaagagcgaaagtaatttttctagtcacatgaactgattggttccaggcaattagaaaatggctataaaataaccttaattttaaaaaaaaatcttgggtcttcgttttcctattaggagactgaactgaccacatgtattgatttatatcctgaatatatgggaacttctgtgtttgggatgtcctactgtaagactgatgaatgtacagagttaatttcagggtacagttttgccttaatggttttaaaaaataaactattttttaaaattt

SEQ ID NO: 437328 - DNA, 6070 bp, Homo sapiens
tcaaaggggcacgagggccagcaatggcagcagcagcggcgggcagtctgcccaagtgtcttaggaaccaaaagcaaataaaagtgtttccatatatgccaccagccaagtggccatcctaattcagaaagaagctagcctttgagtgtctgtcatggtgcatccgtttcagtattatttcctaaaatgagaagcccctgtgtcaacaagatccaggggctggagcccaatgccaagcctgtgttgtccccagcgaccctgcagctgctcgctctgatgtaccctgtgccattcaaggagatgtggtccaggaaagtgagcctcatggttttcagagaagtcattgttctgtttacattttcataaaacctgtttaaaatagctccccgtctcaggctttcagcagtaacagtgagctgactggcaagttcgatgttagctcccgggacactcagcagcgatggtgagcattttggtttccttaaggcccagcaagacttccagggacatctctggtgaagccagaatggagacacccgtgacctcaggctgaaagtcactcgacattggtctcttgtgttgatagggaaggaaatcaggcattcctatttctttaaataacaaaaccactaattgccactcaatgctggaatattttgggtcacctaatcatagatttctcagggcatcaatactcaaatataggctgattatgccccagttcaaatgggaactattaacagagtgcatttcttgcttgctgggtttcaacagacatcagccaaaagaacaaaagagatgtcaggacagattccaggagtgtcggagcacatgtgtggcacccgctccctctggcagcgaatgtaggaagtcgccaaatttacccactcttcaacaagtcattgtttaaacacggtttttcattttctcaacttttaatagcaaaaagtgccaaagtcctcagagacctaacagccttggtctaccgtgctgaccagggtgaaggcacggcgagggactcctcccagacgtgcctcttgtgtgccagctggctgtggctcgggagcagacgcaggcctctccattgtccaggggagcctggcggcgcatccctcctctcccacctcctggcacttccagctgggtgtcccacatgttggattccgtccccaccacacttccagagaccggagaactgtgcagggcctaaggccgtttggatgaattgtcaaaacaagatgcttccagttacagcggcaggagcgggactgggagcacgggctgacggctgctggtgcctttcttcccacctcgcttgcctgtttccgcttgacccttcctccagctccgatgagaagagtataaagcatcttcctaacgggtgtgtttgctatacgaacataatggacgtgaagtggggcagaaacccagaactcagcattcaaggatgcccaggagagctgtccctgttttaaagagctgtgttttgttttgtttcgcatttagagagcagacaaggcacccttctgctgcgctgatacgtttcttacactgggccattttagacccccagggaaacagccttcctggagcgttgtctggaggttccagggacagggcagcctcccagagccgagcaagagctcaaggtacaaatgagagatttgctataccgtgagaagtcaacaacttagccaccacttccccgcaatggaccatgtaacaaatacctcagcaggccctgcaaaaggccatgctagagctgaggcgcacagcctgtggcctctgtagttagggcaggtgggatggagactccttgagtgcacacacctgagcctgcccacacacaggggagcagcatctcgtatgacgtctggaaggaacttcggttgtgtaaagggagccttgaagatacgtgcaaaaggtgctaccccaatttggtgaaactgacattgggcacgtcttgggcttaggagaagcggccgatggtcccggcctgcagtgacaaacccccctccccgcaccgcccccagcaccccctctcctcttcacctcttcctgctggccacgaggaagccacttcctcagagagaccctaccagatgcggatggaaacagatgcaccaaagcaagccctgatgaaaccgcgacttcctaaggtctgtctcctctgaacttgcacctgggcctctctgtgtttggttccaagcacttcccacctcaaactcccattttcaaaccactgtatctctgcgcacatctgctacttaccagccgcatacatgatggagggttttttggtcctgatccagtggccacacctgtctttgaaatgtctcactgaactccagttttaaaatagattcattgcttcaacacagcaagcccaatgcacccagctaagactggcttgaccgacagcctggcctttggtggggggcttcctggggcctggggaaagctggccaccttcaacagctggtacctcttcaacagtgtggcctttcaaaatgcagatgccaccaggagaacatgcccacagctcaccacctatggatgccatggctctgggcagctttcaaagcaggttcctgtggtctcctcagctgtttgagggggtaacagcaaatcagcctccattttaaaatgaaaacaccagcctccagatgtagggcctgctgggtgttgctagccgctggtccccaggcacggtgcactttctccacctcctgcagcctccctgttgtttctagactcttgcacctggtgagtgcaaggataggtgacccaggggcctgcagccttgtcctcagctcccatctcctggactgccagcctcaccctctgcagttagcatggttggcctgatgcagggatcccgagggattactttttagaccttctttcacattcagaaaagtagtatagattcaggagaggcaagaaaattatgctgtccatagaagtcacccatgaagactgatgccaccacctgaaggctcatgattgttaaaaatgtccacgggaacctctcgtccacaggaggtttgtctcaacacttcccatttttacggcattggcattgccaagcatggggaagtatctgctcttctcatgttaaaagtggcccagcttttcttaactcagtccaagctgacttgtttagctgcactggaatttcttaccaaccaaatatttgcatcgagcaaagggggctgtgtgcacctccctaatggcagcgatgatggctgctgtcattcaagcccatcttcagacgtcacagtctggaagtgaaatgtccacaaacatctgtggcagaaaaggctatacggaccacccagttgtgctgcagctttacagagcaaggaagggttgtggcaaataaatgattaacctgcctcgactgtgctgagggcaacaaaggccatctcaccaaaggattattcgatgccattaaatcatcccgtgaccttcctgcttccgagtccatggcctttgcccagggcatgtactcccctgagaggccttctgcctagaaagatctatgactgggttccaaagttgaggcctaggtttttgctgggatttagatattttcaggcaccattttgacagcattcaggaaaacggttattgaccccatagactagggtaagaataaaggcaataaatttggtctgactcagaatataggagatccatatatttctctggaaaccacagtgtacactaaaatgtgaaattgaaggttttgttaaaaagaaaaagataatgagcttcatgctttgtttaattacataatgatttccattacgctatttctgtgaaatgcagcaggttcttaaacgttatttcagtggcatgggctggaagcttatcacaaaaagccatgtgtgtggccttatcagaacagaaagagacaggctggtgcccaaggctgctgcctgctccaccttttgccagctctggacatctgaggacgtcccggcagatctggaatggggccctcaactgaccatttgcttctcagaatttcagtttgagacatgagaggtataatcagttacttttctccccccagagaaacccttttgtgaggggagaggagctatggtatgtggttcagctgaaacacatacaactgcatccttttggagtcctttgccaacaaaaacagaccaacagaccagatggtgtccatgttcaatatcatgtcttgatggacgcagctgatgacctcaaatacttgagtggtctcatggctgttagatggattatttgaaaaaaaaaaaaaaaaaagagagaaaaaataattgatttttacatcagagatagcaaactaagacctggggaggggggtcagcttttattttattttattttttttaagtttgctagttgggtcaaatgtgaggaggagggagtctacctgccacctcttctcttgcccctcttctgcccacacatccagcatccaaaatccattcatttaatgaattgataaagtgccgtgcaaactggtgcacaaacaggcccccagtccacgcagcctggctcctaggaaaagtggtgaccgggcgtgggggggcatgccgcagccctgggacacagtcgggcaccttccccggacccccaggccttggctgtgcctcaagtcagagagggtcagccttcaggccccggagacgagtgactggccgatcatttcacaataaaatcactcacttttggcaacttcactttttttaaggcacagtcagttccttttctcatgtacctcacaaaagatgaagaccatgtagtactctttttggtaaagttacagtgttcatgttaaatatcacttttttctacattgtgtggtaaaaagaactacgttaatagctatatcttaaatactgtgatttgactttttgaaaaatatcctaatacaaatattttactaacttacaatcactcatttaataagaaacatttggattcttttgaaatcagtgttaattgactcatattcttaaaagcctggctcttgaccctattggaaacacaaaggaagctgaaatcaaacatctaaaatacactgcgtacacgtgtgcgtgcacacacacacacacacacacacacacacagctcttcatttctcctgagccatgcagaatttactttcaatgtggaaatctgttccctttaccacactgtatatgcacagagcacaagagaggctatctctagtcacttccaccagcgaggccttaggactccgtattagaggccaccgatttcatacaacagtgtttcgctaaagacccttcactattcttgtttagtaaatagctgtctgctcttcagggaactgttacctatgggttattaccaaagaacgctggcaattggaaatgtcctgatggaaattctttgcacgtgccggttctctggcatcctccaggtggcccaacccaaagcagaaagcagaaaccacagaccccgtgagtctccccataccttgtttccaataacttggcaaaacttcttggtgcatattggttacaccctctgggattcataatgccattaggctaaaaccctaagagagagggttgacagaaacacacgcgagaatgaggcagatcccagagcaaggactgggcccagactctccacatgtgctctactagtgagtgccttatactctcagtattttggggcttacagcttcttatttgtgctaaaaaggtgcagttccaaagtaggaactgccacacaggccccagcatcctctctccaacttcatacctctctcctggtggggggagcgggcatccaggacctccggaatcaaggatgtgcagagaagagcgaaagtaatttttctagtcacatgaactgattggttccaggcaattagaaaatggctataaaataaccttaattttaaaaaatttatatcctgaatatatgggaacttctgtgtttgggatgtcctactgtaagactgatgaatgtacagagttaatttcagggtacagttttgccttaatggttttaaaaaataaactattttttaaaattt

SEQ ID NO: 437329 - DNA, 4305 bp, Homo sapiens
  misc_feature (4258)..(4259): n is a, c, g, or t
tcaaaggggcacgagggccagcaatggcagcagcagcggcgggcagtctgcccaagtgtcttaggaaccaaaagcaaataaaagtgtttccatatatgccaccagccaagtggccatcctaattcagaaagaagctagcctttgagtgtctgtcatggtgcatccgtttcagtattatttcctaaaatgagaagcccctgtgtcaacaagatccaggggctggagcccaatgccaagcctgtgttgtccccagcgaccctgcagctgctcgctctgatgtaccctgtgccattcaaggagatgtggtccaggaaagtgagcctcatggttttcagagaagtcattgttctgtttacattttcataaaacctgtttaaaatagctccccgtctcaggctttcagcagtaacagtgagctgactggcaagttcgatgttagctcccgggacactcagcagcgatggtgagcattttggtttccttaaggcccagcaagacttccagggacatctctggtgaagccagaatggagacacccgtgacctcaggctgaaagtcactcgacattggtctcttgtgttgatagggaaggaaatcaggcattcctatttctttaaataacaaaaccactaattgccactcaatgctggaatattttgggtcacctaatcatagatttctcagggcatcaatactcaaatataggctgattatgccccagttcaaatgggaactattaacagagtgcatttcttgcttgctgggtttcaacagacatcagccaaaagaacaaaagagatgtcaggacagattccaggagtgtcggagcacatgtgtggcacccgctccctctggcagcgaatgtaggaagtcgccaaatttacccactcttcaacaagtcattgtttaaacacggtttttcattttctcaacttttaatagcaaaaagtgccaaagtcctcagagacctaacagccttggtctaccgtgctgaccagggtgaaggcacggcgagggactcctcccagacgtgcctcttgtgtgccagctggctgtggctcgggagcagacgcaggcctctccattgtccaggggagcctggcggcgcatccctcctctcccacctcctggcacttccagctgggtgtcccacatgttggattccgtccccaccacacttccagagaccggagaactgtgcagggcctaaggccgtttggatgaattgtcaaaacaagatgcttccagttacagcggcaggagcgggactgggagcacgggctgacggctgctggtgcctttcttcccacctcgcttgcctgtttccgcttgacccttcctccagctccgatgagaagagtataaagcatcttcctaacgggtgtgtttgctatacgaacataatggacgtgaagtggggcagaaacccagaactcagcattcaaggatgcccaggagagctgtccctgttttaaagagctgtgttttgttttgtttcgcatttagagagcagacaaggcacccttctgctgcgctgatacgtttcttacactgggccattttagacccccagggaaacagccttcctggagcgttgtctggaggttccagggacagggcagcctcccagagccgagcaagagctcaaggtacaaatgagagatttgctataccgtgagaagtcaacaacttagccaccacttccccgcaatggaccatgtaacaaatacctcagcaggccctgcaaaaggccatgctagagctgaggcgcacagcctgtggcctctgtagttagggcaggtgggatggagactccttgagtgcacacacctgagcctgcccacacacaggggagcagcatctcgtatgacgtctggaaggaacttcggttgtgtaaagggagccttgaagatacgtgcaaaaggtgctaccccaatttggtgaaactgacattgggcacgtcttgggcttaggagaagcggccgatggtcccggcctgcagtgacaaacccccctccccgcaccgcccccagcaccccctctcctcttcacctcttcctgctggccacgaggaagccacttcctcagagagaccctaccagatgcggatggaaacagatgcaccaaagcaagccctgatgaaaccgcgacttcctaaggtctgtctcctctgaacttgcacctgggcctctctgtgtttggttccaagcacttcccacctcaaactcccattttcaaaccactgtatctctgcgcacatctgctacttaccagccgcatacatgatggagggttttttggtcctgatccagtggccacacctgtctttgaaatgtctcactgaactccagttttaaaatagattcattgcttcaacacagcaagcccaatgcacccagctaagactggcttgaccgacagcctggcctttggtggggggcttcctggggcctggggaaagctggccaccttcaacagctggtacctcttcaacagtgtggcctttcaaaatgcagatgccaccaggagaacatgcccacagctcaccacctatggatgccatggctctgggcagctttcaaagcaggttcctgtggtctcctcagctgtttgagggggtaacagcaaatcagcctccattttaaaatgaaaacaccagcctccagatgtagggcctgctgggtgttgctagccgctggtccccaggcacggtgcactttctccacctcctgcagcctccctgttgtttctagactcttgcacctggtgagtgcaaggataggtgacccaggggcctgcagccttgtcctcagctcccatctcctggactgccagcctcaccctctgcagttagcatggttggcctgatgcagggatcccgagggattactttttagaccttctttcacattcagaaaagtagtatagattcaggagaggcaagaaaattatgctgtccatagaagtcacccatgaagactgatgccaccacctgaaggctcatgattgttaaaaatgtccacgggaacctctcgtccacaggaggtttgtctcaacacttcccatttttacggcattggcattgccaagcatggggaagtatctgctcttctcatgttaaaagtggcccagcttttcttaactcagtccaagctgacttgtttagctgcactggaatttcttaccaaccaaatatttgcatcgagcaaagggggctgtgtgcacctccctaatggcagcgatgatggctgctgtcattcaagcccatcttcagacgtcacagtctggaagtgaaatgtccacaaacatctgtggcagaaaaggctatacggaccacccagttgtgctgcagctttacagagcaaggaagggttgtggcaaataaatgattaacctgcctcgactgtgctgagggcaacaaaggccatctcaccaaaggattattcgatgccattaaatcatcccgtgaccttcctgcttccgagtccatggcctttgcccagggcatgtactcccctgagaggccttctgcctagaaagatctatgactgggttccaaagttgaggcctaggtttttgctgggatttagatattttcaggcaccattttgacagcattcaggaaaacggttattgaccccatagactagggtaagaataaaggcaataaatttggtctgactcagaatataggagatccatatatttctctggaaaccacagtgtacactaaaatgtgaaattgaaggttttgttaaaaagaaaaagataatgagcttcatgctttgtttaattacataatgatttccattacgctatttctgtgaaatgcagcaggttcttaaacgttatttcagtggcatgggctggaagcttatcacaaaaagccatgtgtgtggccttatcagaacagaaagagacaggctggtgcccaaggctgctgcctgctccaccttttgccagctctggacatctgaggacgtcccggcagatctggaatggggccctcaactgaccatttgcttctcagaatttcagtttgagacatgagaggtataatcagttacttttctccccccagagaaacccttttgtgaggggagaggagctatggtatgtggttcagctgaaacacatacaactgcatccttttggagtcctttttcaaataatccatctaacagccatgagaccactcaagtatttgaggtcatcagctgcgtccatcaagacatgatattgaacatggacaccatcnngtctgttggtctgtttttgttggcaaaggtcgacgcggccgcgaat

SEQ ID NO: 437330 - DNA, 6070 bp, Homo sapiens
tcaaaggggcacgagggccagcaatggcagcagcagcggcgggcagtctgcccaagtgtcttaggaaccaaaagcaaataaaagtgtttccatatatgccaccagccaagtggccatcctaattcagaaagaagctagcctttgagtgtctgtcatggtgcatccgtttcagtattatttcctaaaatgagaagcccctgtgtcaacaagatccaggggctggagcccaatgccaagcctgtgttgtccccagcgaccctgcagctgctcgctctgatgtaccctgtgccattcaaggagatgtggtccaggaaagtgagcctcatggttttcagagaagtcattgttctgtttacattttcataaaacctgtttaaaatagctccccgtctcaggctttcagcagtaacagtgagctgactggcaagttcgatgttagctcccgggacactcagcagcgatggtgagcattttggtttccttaaggcccagcaagacttccagggacatctctggtgaagccagaatggagacacccgtgacctcaggctgaaagtcactcgacattggtctcttgtgttgatagggaaggaaatcaggcattcctatttctttaaataacaaaaccactaattgccactcaatgctggaatattttgggtcacctaatcatagatttctcagggcatcaatactcaaatataggctgattatgccccagttcaaatgggaactattaacagagtgcatttcttgcttgctgggtttcaacagacatcagccaaaagaacaaaagagatgtcaggacagattccaggagtgtcggagcacatgtgtggcacccgctccctctggcagcgaatgtaggaagtcgccaaatttacccactcttcaacaagtcattgtttaaacacggtttttcattttctcaacttttaatagcaaaaagtgccaaagtcctcagagacctaacagccttggtctaccgtgctgaccagggtgaaggcacggcgagggactcctcccagacgtgcctcttgtgtgccagctggctgtggctcgggagcagacgcaggcctctccattgtccaggggagcctggcggcgcatccctcctctcccacctcctggcacttccagctgggtgtcccacatgttggattccgtccccaccacacttccagagaccggagaactgtgcagggcctaaggccgtttggatgaattgtcaaaacaagatgcttccagttacagcggcaggagcgggactgggagcacgggctgacggctgctggtgcctttcttcccacctcgcttgcctgtttccgcttgacccttcctccagctccgatgagaagagtataaagcatcttcctaacgggtgtgtttgctatacgaacataatggacgtgaagtggggcagaaacccagaactcagcattcaaggatgcccaggagagctgtccctgttttaaagagctgtgttttgttttgtttcgcatttagagagcagacaaggcacccttctgctgcgctgatacgtttcttacactgggccattttagacccccagggaaacagccttcctggagcgttgtctggaggttccagggacagggcagcctcccagagccgagcaagagctcaaggtacaaatgagagatttgctataccgtgagaagtcaacaacttagccaccacttccccgcaatggaccatgtaacaaatacctcagcaggccctgcaaaaggccatgctagagctgaggcgcacagcctgtggcctctgtagttagggcaggtgggatggagactccttgagtgcacacacctgagcctgcccacacacaggggagcagcatctcgtatgacgtctggaaggaacttcggttgtgtaaagggagccttgaagatacgtgcaaaaggtgctaccccaatttggtgaaactgacattgggcacgtcttgggcttaggagaagcggccgatggtcccggcctgcagtgacaaacccccctccccgcaccgcccccagcaccccctctcctcttcacctcttcctgctggccacgaggaagccacttcctcagagagaccctaccagatgcggatggaaacagatgcaccaaagcaagccctgatgaaaccgcgacttcctaaggtctgtctcctctgaacttgcacctgggcctctctgtgtttggttccaagcacttcccacctcaaactcccattttcaaaccactgtatctctgcgcacatctgctacttaccagccgcatacatgatggagggttttttggtcctgatccagtggccacacctgtctttgaaatgtctcactgaactccagttttaaaatagattcattgcttcaacacagcaagcccaatgcacccagctaagactggcttgaccgacagcctggcctttggtggggggcttcctggggcctggggaaagctggccaccttcaacagctggtacctcttcaacagtgtggcctttcaaaatgcagatgccaccaggagaacatgcccacagctcaccacctatggatgccatggctctgggcagctttcaaagcaggttcctgtggtctcctcagctgtttgagggggtaacagcaaatcagcctccattttaaaatgaaaacaccagcctccagatgtagggcctgctgggtgttgctagccgctggtccccaggcacggtgcactttctccacctcctgcagcctccctgttgtttctagactcttgcacctggtgagtgcaaggataggtgacccaggggcctgcagccttgtcctcagctcccatctcctggactgccagcctcaccctctgcagttagcatggttggcctgatgcagggatcccgagggattactttttagaccttctttcacattcagaaaagtagtatagattcaggagaggcaagaaaattatgctgtccatagaagtcacccatgaagactgatgccaccacctgaaggctcatgattgttaaaaatgtccacgggaacctctcgtccacaggaggtttgtctcaacacttcccatttttacggcattggcattgccaagcatggggaagtatctgctcttctcatgttaaaagtggcccagcttttcttaactcagtccaagctgacttgtttagctgcactggaatttcttaccaaccaaatatttgcatcgagcaaagggggctgtgtgcacctccctaatggcagcgatgatggctgctgtcattcaagcccatcttcagacgtcacagtctggaagtgaaatgtccacaaacatctgtggcagaaaaggctatacggaccacccagttgtgctgcagctttacagagcaaggaagggttgtggcaaataaatgattaacctgcctcgactgtgctgagggcaacaaaggccatctcaccaaaggattattcgatgccattaaatcatcccgtgaccttcctgcttccgagtccatggcctttgcccagggcatgtactcccctgagaggccttctgcctagaaagatctatgactgggttccaaagttgaggcctaggtttttgctgggatttagatattttcaggcaccattttgacagcattcaggaaaacggttattgaccccatagactagggtaagaataaaggcaataaatttggtctgactcagaatataggagatccatatatttctctggaaaccacagtgtacactaaaatgtgaaattgaaggttttgttaaaaagaaaaagataatgagcttcatgctttgtttaattacataatgatttccattacgctatttctgtgaaatgcagcaggttcttaaacgttatttcagtggcatgggctggaagcttatcacaaaaagccatgtgtgtggccttatcagaacagaaagagacaggctggtgcccaaggctgctgcctgctccaccttttgccagctctggacatctgaggacgtcccggcagatctggaatggggccctcaactgaccatttgcttctcagaatttcagtttgagacatgagaggtataatcagttacttttctccccccagagaaacccttttgtgaggggagaggagctatggtatgtggttcagctgaaacacatacaactgcatccttttggagtcctttgccaacaaaaacagaccaacagaccagatggtgtccatgttcaatatcatgtcttgatggacgcagctgatgacctcaaatacttgagtggtctcatggctgttagatggattatttgaaaaaaaaaaaaaaaaaagagagaaaaaataattgatttttacatcagagatagcaaactaagacctggggaggggggtcagcttttattttattttattttttttaagtttgctagttgggtcaaatgtgaggaggagggagtctacctgccacctcttctcttgcccctcttctgcccacacatccagcatccaaaatccattcatttaatgaattgataaagtgccgtgcaaactggtgcacaaacaggcccccagtccacgcagcctggctcctaggaaaagtggtgaccgggcgtgggggggcatgccgcagccctgggacacagtcgggcaccttccccggacccccaggccttggctgtgcctcaagtcagagagggtcagccttcaggccccggagacgagtgactggccgatcatttcacaataaaatcactcacttttggcaacttcactttttttaaggcacagtcagttccttttctcatgtacctcacaaaagatgaagaccatgtagtactctttttggtaaagttacagtgttcatgttaaatatcacttttttctacattgtgtggtaaaaagaactacgttaatagctatatcttaaatactgtgatttgactttttgaaaaatatcctaatacaaatattttactaacttacaatcactcatttaataagaaacatttggattcttttgaaatcagtgttaattgactcatattcttaaaagcctggctcttgaccctattggaaacacaaaggaagctgaaatcaaacatctacagctcttcatttctcctgagccatgcagaatttactttcaatgtggaaatctgttccctttaccacactgtatatgcacagagcacaagagaggctatctctagtcacttccaccagcgaggccttaggactccgtattagaggccaccgatttcatacaacagtgtttcgctaaagacccttcactattcttgtttagtaaatagctgtctgctcttcagggaactgttacctatgggttattaccaaagaacgctggcaattggaaatgtcctgatggaaattctttgcacgtgccggttctctggcatcctccaggtggcccaacccaaagcagaaagcagaaaccacagaccccgtgagtctccccataccttgtttccaataacttggcaaaacttcttggtgcatattggttacaccctctgggattcataatgccattaggctaaaaccctaagagagagggttgacagaaacacacgcgagaatgaggcagatcccagagcaaggactgggcccagactctccacatgtgctctactagtgagtgccttatactctcagtattttggggcttacagcttcttatttgtgctaaaaaggtgcagttccaaagtaggaactgccacacaggccccagcatcctctctccaacttcatacctctctcctggtggggggagcgggcatccaggacctccggaatcaaggatgtgcagagaagagcgaaagtaatttttctagtcacatgaactgattggttccaggcaattagaaaatggctataaaataaccttaattttaaaaaaaaatcttgggtcttcgttttcctattaggagactgaactgaccacatgtattgatttatatcctgaatatatgggaacttctgtgtttgggatgtcctactgtaagactgatgaatgtacagagttaatttcagggtacagttttgccttaatggttttaaaaaataaactattttttaaaattt

SEQ ID NO: 437331 - DNA, 3686 bp, Homo sapiens
tcaaaggggcacgagggccagcaatggcagcagcagcggcgggcagtctgcccaagtgtcttaggaaccaaaagcaaataaaagtgtttccatatatgccaccagccaagtggccatcctaattcagaaagaagctagcctttgagtgtctgtcatggtgcatccgtttcagtattatttcctaaaatgagaagcccctgtgtcaacaagatccaggggctggagcccaatgccaagcctgtgttgtccccagcgaccctgcagctgctcgctctgatgtaccctgtgccattcaaggagatgtggtccaggaaagtgagcctcatggttttcagagaagtcattgttctgtttacattttcataaaacctgtttaaaatagctccccgtctcaggctttcagcagtaacagtgagctgactggcaagttcgatgttagctcccgggacactcagcagcgatggtgagcattttggtttccttaaggcccagcaagacttccagggacatctctggtgaagccagaatggagacacccgtgacctcaggctgaaagtcactcgacattggtctcttgtgttgatagggaaggaaatcaggcattcctatttctttaaataacaaaaccactaattgccactcaatgctggaatattttgggtcacctaatcatagatttctcagggcatcaatactcaaatataggctgattatgccccagttcaaatgggaactattaacagagtgcatttcttgcttgctgggtttcaacagacatcagccaaaagaacaaaagagatgtcaggacagattccaggagtgtcggagcacatgtgtggcacccgctccctctggcagcgaatgtaggaagtcgccaaatttacccactcttcaacaagtcattgtttaaacacggtttttcattttctcaacttttaatagcaaaaagtgccaaagtcctcagagacctaacagccttggtctaccgtgctgaccagggtgaaggcacggcgagggactcctcccagacgtgcctcttgtgtgccagctggctgtggctcgggagcagacgcaggcctctccattgtccaggggagcctggcggcgcatccctcctctcccacctcctggcacttccagctgggtgtcccacatgttggattccgtccccaccacacttccagagaccggagaactgtgcagggcctaaggccgtttggatgaattgtcaaaacaagatgcttccagttacagcggcaggagcgggactgggagcacgggctgacggctgctggtgcctttcttcccacctcgcttgcctgtttccgcttgacccttcctccagctccgatgagaagagtataaagcatcttcctaacgggtgtgtttgctatacgaacataatggacgtgaagtggggcagaaacccagaactcagcattcaaggatgcccaggagagctgtccctgttttaaagagctgtgttttgttttgtttcgcatttagagagcagacaaggcacccttctgctgcgctgatacgtttcttacactgggccattttagacccccagggaaacagccttcctggagcgttgtctggaggttccagggacagggcagcctcccagagccgagcaagagctcaaggtacaaatgagagatttgctataccgtgagaagtcaacaacttagccaccacttccccgcaatggaccatgtaacaaatacctcagcaggccctgcaaaaggccatgctagagctgaggcgcacagcctgtggcctctgtagttagggcaggtgggatggagactccttgagtgcacacacctgagcctgcccacacacaggggagcagcatctcgtatgacgtctggaaggaacttcggttgtgtaaagggagccttgaagatacgtgcaaaaggtgctaccccaatttggtgaaactgacattgggcacgtcttgggcttaggagaagcggccgatggtcccggcctgcagtgacaaacccccctccccgcaccgcccccagcaccccctctcctcttcacctcttcctgctggccacgaggaagccacttcctcagagagaccctaccagatgcggatggaaacagatgcaccaaagcaagccctgatgaaaccgcgacttcctaaggtctgtctcctctgaacttgcacctgggcctctctgtgtttggttccaagcacttcccacctcaaactcccattttcaaaccactgtatctctgcgcacatctgctacttaccagccgcatacatgatggagggttttttggtcctgatccagtggccacacctgtctttgaaatgtctcactgaactccagttttaaaatagattcattgcttcaacacagcaagcccaatgcacccagctaagactggcttgaccgacagcctggcctttggtggggggcttcctggggcctggggaaagctggccaccttcaacagctggtacctcttcaacagtgtggcctttcaaaatgcagatgccaccaggagaacatgcccacagctcaccacctatggatgccatggctctgggcagctttcaaagcaggttcctgtggtctcctcagctgtttgagggggtaacagcaaatcagcctccattttaaaatgaaaacaccagcctccagatgtagggcctgctgggtgttgctagccgctggtccccaggcacggtgcactttctccacctcctgcagcctccctgttgtttctagactcttgcacctggtgagtgcaaggataggtgacccaggggcctgcagccttgtcctcagctcccatctcctggactgccagcctcaccctctgcagttagcatggttggcctgatgcagggatcccgagggattactttttagaccttctttcacattcagaaaagtagtatagattcaggagaggcaagaaaattatgctgtccatagaagtcacccatgaagactgatgccaccacctgaaggctcatgattgttaaaaatgtccacgggaacctctcgtccacaggaggtttgtctcaacacttcccatttttacggcattggcattgccaagcatggggaagtatctgctcttctcatgttaaaagtggcccagcttttcttaactcagtccaagctgacttgtttagctgcactggaatttcttaccaaccaaatatttgcatcgagcaaagggggctgtgtgcacctccctaatggcagcgatgatggctgctgtcattcaagcccatcttcagacgtcacagtctggaagtgaaatgtccacaaacatctgtggcagaaaaggctatacggaccacccagttgtgctgcagctttacagagcaaggaagggttgtggcaaataaatgattaacctgcctcgactgtgctgagggcaacaaaggccatctcaccaaaggattattcgatgccattaaatcatcccgtgaccttcctgcttccgagtccatggcctttgcccagggcatgtactcccctgagaggccttctgcctagaaagatctatgactgggttccaaagttgaggcctaggtttttgctgggatttagatattttcaggcaccattttgacagcattcaggaaaacggttattgaccccatagactagggtaagaataaaggcaataaatttggtctgactcag

SEQ ID NO: 437332 - DNA, 761 bp, Homo sapiens
agcgggcgaacgaacgagccgagagggtggcggccgcctccctcctcccccggcctgaccgcagcccgacgccatggcgcgggtccccccgacgggccagtttcgattccgggcaccgcatcagcctgctcaaccctttaaatttacaatttccgaatcctgtgatcggattaaggaagagtttcagtttttacaggctcaataccacagtctgaagctggaatgtgagaaactcgccagtgagaagacagagatgcagcggcattatgtcatgtattatgaaatgtcctatgggttgaatatagaaatgcacaagcaggcagagattgtcaagaggctgaatgctatctgtgcacaagtcattcctttcctgtcccaagagcaccagcaacaagtggtgcaggctgtggaacgggccaagcaggtgaccatggcagaactgaacgccatcattggggtacgtggcctttccattttagctctgatcttagtgtttgtcatcagctctctcgctctctctttttacattttgttccgccaaaggggcaaaaagcaatagatgactacaaaatgaaattaagcactttgccttcaatctcctgtgaaatttgatggctgccttagaaactttggatcacattctcaccaatttaagtggatgtgttcatgaaaactctcctctaaggagactggatagctctttttcatatttctttgctttgcaatcagcttgtgttgctaacctaggccaaaaaaaaaaa

SEQ ID NO: 437333 - DNA, 521 bp, Homo sapiens
  misc_feature (479)..(479): n is a, c, g, or t
ctcgcgaacgtgttatccctcgcgtacgtcttatctctcgcgaacgtgttatctctcgcgaacgtgttatctctcgcgaacgtgttatctctcgcgaacgtgttatccctcgcgaacgtgttatcccaaccacctgtccagaccttggtgaggcaattccagggccacacagatggagccagctgtattgacatttctaatgatggcaccaagctctggacaggtggtttggacaacacggtcaggtcctgggacctgcgcgaggggcggcagctgcagcagcacgacttcacctcccagatcttttctctgggctactgcccaactggagagtggcttgcagtggggatggagaacagcaatgtggaagttttgcatgtcaccaagccagacaaataccaactacatcttcatgagagctgtgtgctgtcgctcaagtttgcccattgtggcaatggtttgtaagcatctggaagaanccttctgatgcctgatacacgttcgcgaggaccggctgctca

SEQ ID NO: 437334 - DNA, 296 bp, Homo sapiens
atcaaggcctccttccttaggcaggtgtaaataaattaaacatttcttctaccgtaaataaaaagaaggcagaacaatcgaaactggggagacttggaaaacgctgaggccaaactttcgatattgatttattggggccgggagaatgaaaggttgggaagattctggggccttttgacatccttggttctttattactccggacttgattccttctcacttttttctgccattccactgaagagctgagagcccagggaagtcggagtgagcgatttcattacttttatgctaaa

SEQ ID NO: 437335 - DNA, 4153 bp, Homo sapiens
cgcggcgggccagtgacgcccgcggggaatgcggagcggcccggcagccggcacccagccgccgccgcgcgttcctgccgcccgtgtcacgcgagacccggcgggggccgggaccgcccgagccgcccctcagaccgagccggccgcctccgctgccgcggccgcctcctcttcggggtcattaaagccaatgagccgcgcgcctctgccgagcgcagccaactaaatcggcttggatgattcgcgacctgagcaagatgtacccgcagaccagacacccggcaccgcatcagcctgctcaaccctttaaatttacaatttccgaatcctgtgatcggattaaggaagagtttcagtttttacaggctcaataccacagtctgaagctggaatgtgagaaactcgccagtgagaagacagagatgcagcggcattatgtcatgtattatgaaatgtcctatgggttgaatatagaaatgcacaagcaggcagagattgtcaagaggctgaatgctatctgtgcacaagtcattcctttcctgtcccaagagcaccagcaacaagtggtgcaggctgtggaacgggccaagcaggtgaccatggcagaactgaacgccatcattgggcaacaactccaggcccagcatttatcacatggacatggtctccccgtacctctgactccacacccttcagggctccagccccctgccattccacccatcggtagcagtgccgggcttctggccctctccagtgctctaggaggtcagtcccatcttccaattaaagatgagaagaagcaccatgacaatgatcaccaaagagacagagactccatcaagagctcttcagtatccccatcagccagtttccgaggtgctgagaagcacagaaactccgcagactactcctcagagagcaaaaagcagaaaactgaagaaaaggaaattgcagctcgttatgacagcgatggtgagaaaagtgatgacaacttggtggttgacgtttccaatgaggatccatcttcccctcgagggagcccagcacattcccccagagagaatggcctagacaagacacgcctgctcaagaaagatgccccgattagtccagcctctattgcatcttccagcagtactccctcctccaaatccaaagaacttagccttaatgaaaaatctactactcccgtctcaaagtccaatacccctactccacgaactgatgcgcccaccccaggcagtaactctactcccggattgaggcctgtacctggaaaaccaccaggagttgaccctttggcctcaagcctaaggaccccaatggcagtaccttgtccatatccaactccatttgggattgtgccccatgctggaatgaacggagagctgaccagccccggagcggcctacgctgggctccacaacatctcccctcagatgagcgcagctgctgccgccgccgctgctgctgctgcctatgggagatcaccagtggtgggatttgatccacaccatcacatgcgtgtgccagcaatacctccaaacctgacaggcattccaggaggaaaaccagcatactccttccatgttagcgcagatggtcagatgcagcctgtcccttttccacccgacgccctcatcggacctggaatcccccggcatgctcgccagatcaacaccctcaaccacggggaggtggtgtgcgcggtgaccatcagcaaccccacgagacacgtgtacacgggtgggaagggctgcgtcaaggtctgggacatcagccacccaggcaataagagtcctgtctcccagctcgactgtctgaacagggataactacatccgttcctgcagattgctccctgatggtcgcaccctaattgttggaggggaagccagtactttgtccatttgggacctggcggctccaaccccacgcatcaaggcagagctgacatcctcggcccccgcctgctatgccctggccatcagccccgattccaaggtctgcttctcatgctgcagcgacggcaacatcgctgtgtgggatctgcacaaccagaccttggtgaggcaattccagggccacacagatggagccagctgtattgacatttctaatgatggcaccaagctctggacaggtggtttggacaacacggtcaggtcctgggacctgcgcgaggggcggcagctgcagcagcacgacttcacctcccagatcttttctctgggctactgcccaactggagagtggcttgcagtggggatggagaacagcaatgtggaagttttgcatgtcaccaagccagacaaataccaactacatcttcatgagagctgtgtgctgtcgctcaagtttgcccattgtggcaaatggtttgtaagcactggaaaggacaaccttctgaatgcctggagaacaccttatggggccagtatattccagtccaaagaatcctcatcggtgcttagctgtgacatctccgtggacgacaaatacattgtcactggctctggggataagaaggccacagtttatgaagttatttattaaagacaaatcttcatgcagactggacttctcctcctggtagcactttgctctgtcatcctttttgttcacccccatccccgcatctaaaaccaaggatttcagatactcattgcagttgtggagtttaatcccctttcttaacctcacttcccacttgctattgaattgtgaatagtcattaaaaacctgtgataccaaatcttcagctgtctacttggaagaacatggaataagcatacttaacagtgaaaagaatctttaattatgtattatatctgtaatatatttattttgtttaaagaaggctttctaacaatgactgactaaataaagctgtctgctcctgcattgataatgaaggtgcgttgtatttgatacccctccccccctttttttggcaaaggaggggaaaggaaggtttaaaataattgatttaaaatgtcactaagtgtagactgatgactgtatagagatgtgaaatgtataattacacatggaagcaatatgttgctgtgttgttattaggttttttttgtttttgttttctacatcttttaaagacttttggaaatttggctgaacaattagaacacaacaggccaactcatactcatttggatctatttagacaacgttaaccaatatatctatagctttagattatattcgataaaagtaattggactttttttctttttttgactcgttgacaagtgtctttgtaatatgtttttagttccctttttttgttgtattataggcagatgaacaaattaaatttggcctcaaagagagaacttactcccttctggatatttttgccacatttctttgcaaaaggagatatatatatctttagtcagttttgttgttatgagaaattatgggttattttgtggcatgctctttgggagctgcacagttatggggaggactcccactgctgtgcaagttaagtcttttacaaaacaaggacagcagaggagggtttgcagagacctccctctgaaaaacacaaagaatggactctctcctgggatgaggacttgctttctttacctccggttctttccatgtcttagttggatgtccctgaaatggacacaggctgtgccattgtgccagaaacattgtgttatcttttatgttgttgttgttgctgttaaactataatatgtgacttctttttttattattttttgtttgaatgctttaaaaatcttttaagtctgtggatctgctgatgtacagtgcctttgctgctatggatcaaaatcaaaagaaccgtgtagatatactttattgtataagtagaaaattacttaatttcatactagaaatggatggatgctgcaagttgaaatggactgtccattgacgttcctaatgtggtagcagaaaaaaatggtgtcttaagtgcttagtgtttgatgtcattaacagtttcgtaaaactctacagtgtagaaagattttgatactaaactgtgcgttgtacatagttctaatgcattgtattgaccaccagtacttctataatggtagattgtttgtgaattcagacttttaagcattaaacataaataacttctagta

SEQ ID NO: 437336 - DNA, 4096 bp, Homo sapiens
cgcggcgggccagtgacgcccgcggggaatgcggagcggcccggcagccggcacccagccgccgccgcgcgttcctgccgcccgtgtcacgcgagacccggcgggggccgggaccgcccgagccgcccctcagaccgagccggccgcctccgctgccgcggccgcctcctcttcggggtcattaaagccaatgagccgcgcgcctctgccgagcgcagccaactaaatcggcttggatgattcgcgacctgagcaagatgtacccgcagaccagacacccggcaccgcatcagcctgctcaaccctttaaatttacaatttccgaatcctgtgatcggattaaggaagagtttcagtttttacaggctcaataccacagtctgaagctggaatgtgagaaactcgccagtgagaagacagagatgcagcggcattatgtcatgtattatgaaatgtcctatgggttgaatatagaaatgcacaagcaggcagagattgtcaagaggctgaatgctatctgtgcacaagtcattcctttcctgtcccaagagcaccagcaacaagtggtgcaggctgtggaacgggccaagcaggtgaccatggcagaactgaacgccatcattgggcaacaactccaggcccagcatttatcacatggacatggtctccccgtacctctgactccacacccttcagggctccagccccctgccattccacccatcggtagcagtgccgggcttctggccctctccagtgctctaggaggtcagtcccatcttccaattaaagatgagaagaagcaccatgacaatgatcaccaaagagacagagactccatcaagagctcttcagtatccccatcagccagtttccgaggtgctgagaagcacagaaactccgcagactactcctcagagagcaaaaagcagaaaactgaagaaaaggaaattgcagctcgttatgacagcgatggtgagaaaagtgatgacaacttggtggttgacgtttccaatgagaagagggatatggggaaattgagtgaaacacgtcttagcgaagatgaacaatgcacattggggttacagagatggttttgtcgcctgtggtttatgaatgaaaaatctactactcccgtctcaaagtccaatacccctactccacgaactgatgcgcccaccccaggcagtaactctactcccggattgaggcctgtacctggaaaaccaccaggagttgaccctttggcctcaagcctaaggaccccaatggcagtaccttgtccatatccaactccatttgggattgtgccccatgctggaatgaacggagagctgaccagccccggagcggcctacgctgggctccacaacatctcccctcagatgagcgcagctgctgccgccgccgctgctgctgctgcctatgggagatcaccagtggtgggatttgatccacaccatcacatgcgtgtgccagcaatacctccaaacctgacaggcattccaggaggaaaaccagcatactccttccatgttagcgcagatggtcagatgcagcctgtcccttttccacccgacgccctcatcggacctggaatcccccggcatgctcgccagatcaacaccctcaaccacggggaggtggtgtgcgcggtgaccatcagcaaccccacgagacacgtgtacacgggtgggaagggctgcgtcaaggtctgggacatcagccacccaggcaataagagtcctgtctcccagctcgactgtctgaacagggataactacatccgttcctgcagattgctccctgatggtcgcaccctaattgttggaggggaagccagtactttgtccatttgggacctggcggctccaaccccacgcatcaaggcagagctgacatcctcggcccccgcctgctatgccctggccatcagccccgattccaaggtctgcttctcatgctgcagcgacggcaacatcgctgtgtgggatctgcacaaccagaccttggtgaggcaattccagggccacacagatggagccagctgtattgacatttctaatgatggcaccaagctctggacaggtggtttggacaacacggtcaggtcctgggacctgcgcgaggggcggcagctgcagcagcacgacttcacctcccagatcttttctctgggctactgcccaactggagagtggcttgcagtggggatggagaacagcaatgtggaagttttgcatgtcaccaagccagacaaataccaactacatcttcatgagagctgtgtgctgtcgctcaagtttgcccattgtggcaaatggtttgtaagcactggaaaggacaaccttctgaatgcctggagaacaccttatggggccagtatattccagtccaaagaatcctcatcggtgcttagctgtgacatctccgtggacgacaaatacattgtcactggctctggggataagaaggccacagtttatgaagttatttattaaagacaaatcttcatgcagactggacttctcctcctggtagcactttgctctgtcatcctttttgttcacccccatccccgcatctaaaaccaaggatttcagatactcattgcagttgtggagtttaatcccctttcttaacctcacttcccacttgctattgaattgtgaatagtcattaaaaacctgtgataccaaatcttcagctgtctacttggaagaacatggaataagcatacttaacagtgaaaagaatctttaattatgtattatatctgtaatatatttattttgtttaaagaaggctttctaacaatgactgactaaataaagctgtctgctcctgcattgataatgaaggtgcgttgtatttgatacccctccccccctttttttggcaaaggaggggaaaggaaggtttaaaataattgatttaaaatgtcactaagtgtagactgatgactgtatagagatgtgaaatgtataattacacatggaagcaatatgttgctgtgttgttattaggttttttttgtttttgttttctacatcttttaaagacttttggaaatttggctgaacaattagaacacaacaggccaactcatactcatttggatctatttagacaacgttaaccaatatatctatagctttagattatattcgataaaagtaattggactttttttctttttttgactcgttgacaagtgtctttgtaatatgtttttagttccctttttttgttgtattataggcagatgaacaaattaaatttggcctcaaagagagaacttactcccttctggatatttttgccacatttctttgcaaaaggagatatatatatctttagtcagttttgttgttatgagaaattatgggttattttgtggcatgctctttgggagctgcacagttatggggaggactcccactgctgtgcaagttaagtcttttacaaaacaaggacagcagaggagggtttgcagagacctccctctgaaaaacacaaagaatggactctctcctgggatgaggacttgctttctttacctccggttctttccatgtcttagttggatgtccctgaaatggacacaggctgtgccattgtgccagaaacattgtgttatcttttatgttgttgttgttgctgttaaactataatatgtgacttctttttttattattttttgtttgaatgctttaaaaatcttttaagtctgtggatctgctgatgtacagtgcctttgctgctatggatcaaaatcaaaagaaccgtgtagatatactttattgtataagtagaaaattacttaatttcatactagaaatggatggatgctgcaagttgaaatggactgtccattgacgttcctaatgtggtagcagaaaaaaatggtgtcttaagtgcttagtgtttgatgtcattaacagtttcgtaaaactctacagtgtagaaagattttgatactaaactgtgcgttgtacatagttctaatgcattgtattgaccaccagtacttctataatggtagattgtttgtgaattcagacttttaagcattaaacataaataacttctagta

SEQ ID NO: 437337 - DNA, 4228 bp, Homo sapiens
cgcggcgggccagtgacgcccgcggggaatgcggagcggcccggcagccggcacccagccgccgccgcgcgttcctgccgcccgtgtcacgcgagacccggcgggggccgggaccgcccgagccgcccctcagaccgagccggccgcctccgctgccgcggccgcctcctcttcggggtcattaaagccaatgagccgcgcgcctctgccgagcgcagccaactaaatcggcttggatgattcgcgacctgagcaagatgtacccgcagaccagacacccggcaccgcatcagcctgctcaaccctttaaatttacaatttccgaatcctgtgatcggattaaggaagagtttcagtttttacaggctcaataccacagtctgaagctggaatgtgagaaactcgccagtgagaagacagagatgcagcggcattatgtcatgtattatgaaatgtcctatgggttgaatatagaaatgcacaagcaggcagagattgtcaagaggctgaatgctatctgtgcacaagtcattcctttcctgtcccaagagcaccagcaacaagtggtgcaggctgtggaacgggccaagcaggtgaccatggcagaactgaacgccatcattgggcaacaactccaggcccagcatttatcacatggacatggtctccccgtacctctgactccacacccttcagggctccagccccctgccattccacccatcggtagcagtgccgggcttctggccctctccagtgctctaggaggtcagtcccatcttccaattaaagatgagaagaagcaccatgacaatgatcaccaaagagacagagactccatcaagagctcttcagtatccccatcagccagtttccgaggtgctgagaagcacagaaactccgcagactactcctcagagagcaaaaagcagaaaactgaagaaaaggaaattgcagctcgttatgacagcgatggtgagaaaagtgatgacaacttggtggttgacgtttccaatgaggatccatcttcccctcgagggagcccagcacattcccccagagagaatggcctagacaagacacgcctgctcaagaaagatgccccgattagtccagcctctattgcatcttccagcagtactccctcctccaaatccaaagaacttagccttaatgaaaaatctactactcccgtctcaaagtccaatacccctactccacgaactgatgcgcccaccccaggcagtaactctactcccggattgaggcctgtacctggaaaaccaccaggagttgaccctttggcctcaagcctaaggaccccaatggcagtaccttgtccatatccaactccatttgggattgtgccccatgctggaatgaacggagagctgaccagccccggagcggcctacgctgggctccacaacatctcccctcagatgagcgcagctgctgccgccgccgctgctgctgctgcctatgggagatcaccagtggtgggatttgatccacaccatcacatgcgtgtgccagcaatacctccaaacctgacaggcattccaggaggaaaaccgaccaaatgcttttaccacctgagggctttccctggaaatgaactggagatggaactgccaagagatactcacagagcatactccttccatgttagcgcagatggtcagatgcagcctgtcccttttccacccgacgccctcatcggacctggaatcccccggcatgctcgccagatcaacaccctcaaccacggggaggtggtgtgcgcggtgaccatcagcaaccccacgagacacgtgtacacgggtgggaagggctgcgtcaaggtctgggacatcagccacccaggcaataagagtcctgtctcccagctcgactgtctgaacagggataactacatccgttcctgcagattgctccctgatggtcgcaccctaattgttggaggggaagccagtactttgtccatttgggacctggcggctccaaccccacgcatcaaggcagagctgacatcctcggcccccgcctgctatgccctggccatcagccccgattccaaggtctgcttctcatgctgcagcgacggcaacatcgctgtgtgggatctgcacaaccagaccttggtgaggcaattccagggccacacagatggagccagctgtattgacatttctaatgatggcaccaagctctggacaggtggtttggacaacacggtcaggtcctgggacctgcgcgaggggcggcagctgcagcagcacgacttcacctcccagatcttttctctgggctactgcccaactggagagtggcttgcagtggggatggagaacagcaatgtggaagttttgcatgtcaccaagccagacaaataccaactacatcttcatgagagctgtgtgctgtcgctcaagtttgcccattgtggcaaatggtttgtaagcactggaaaggacaaccttctgaatgcctggagaacaccttatggggccagtatattccagtccaaagaatcctcatcggtgcttagctgtgacatctccgtggacgacaaatacattgtcactggctctggggataagaaggccacagtttatgaagttatttattaaagacaaatcttcatgcagactggacttctcctcctggtagcactttgctctgtcatcctttttgttcacccccatccccgcatctaaaaccaaggatttcagatactcattgcagttgtggagtttaatcccctttcttaacctcacttcccacttgctattgaattgtgaatagtcattaaaaacctgtgataccaaatcttcagctgtctacttggaagaacatggaataagcatacttaacagtgaaaagaatctttaattatgtattatatctgtaatatatttattttgtttaaagaaggctttctaacaatgactgactaaataaagctgtctgctcctgcattgataatgaaggtgcgttgtatttgatacccctccccccctttttttggcaaaggaggggaaaggaaggtttaaaataattgatttaaaatgtcactaagtgtagactgatgactgtatagagatgtgaaatgtataattacacatggaagcaatatgttgctgtgttgttattaggttttttttgtttttgttttctacatcttttaaagacttttggaaatttggctgaacaattagaacacaacaggccaactcatactcatttggatctatttagacaacgttaaccaatatatctatagctttagattatattcgataaaagtaattggactttttttctttttttgactcgttgacaagtgtctttgtaatatgtttttagttccctttttttgttgtattataggcagatgaacaaattaaatttggcctcaaagagagaacttactcccttctggatatttttgccacatttctttgcaaaaggagatatatatatctttagtcagttttgttgttatgagaaattatgggttattttgtggcatgctctttgggagctgcacagttatggggaggactcccactgctgtgcaagttaagtcttttacaaaacaaggacagcagaggagggtttgcagagacctccctctgaaaaacacaaagaatggactctctcctgggatgaggacttgctttctttacctccggttctttccatgtcttagttggatgtccctgaaatggacacaggctgtgccattgtgccagaaacattgtgttatcttttatgttgttgttgttgctgttaaactataatatgtgacttctttttttattattttttgtttgaatgctttaaaaatcttttaagtctgtggatctgctgatgtacagtgcctttgctgctatggatcaaaatcaaaagaaccgtgtagatatactttattgtataagtagaaaattacttaatttcatactagaaatggatggatgctgcaagttgaaatggactgtccattgacgttcctaatgtggtagcagaaaaaaatggtgtcttaagtgcttagtgtttgatgtcattaacagtttcgtaaaactctacagtgtagaaagattttgatactaaactgtgcgttgtacatagttctaatgcattgtattgaccaccagtacttctataatggtagattgtttgtgaattcagacttttaagcattaaacataaataacttctagta

SEQ ID NO: 437338 - DNA, 4290 bp, Homo sapiens
cgcggcgggccagtgacgcccgcggggaatgcggagcggcccggcagccggcacccagccgccgccgcgcgttcctgccgcccgtgtcacgcgagacccggcgggggccgggaccgcccgagccgcccctcagaccgagccggccgcctccgctgccgcggccgcctcctcttcggggtcattaaagccaatgagccgcgcgcctctgccgagcgcagccaactaaatcggcttggatgattcgcgacctgagcaagatgtacccgcagaccagacacccggcaccgcatcagcctgctcaaccctttaaatttacaatttccgaatcctgtgatcggattaaggaagagtttcagtttttacaggctcaataccacagtctgaagctggaatgtgagaaactcgccagtgagaagacagagatgcagcggcattatgtcatgtattatgaaatgtcctatgggttgaatatagaaatgcacaagcaggcagagattgtcaagaggctgaatgctatctgtgcacaagtcattcctttcctgtcccaagagcaccagcaacaagtggtgcaggctgtggaacgggccaagcaggtgaccatggcagaactgaacgccatcattgggcaacaactccaggcccagcatttatcacatggacatggtctccccgtacctctgactccacacccttcagggctccagccccctgccattccacccatcggtagcagtgccgggcttctggccctctccagtgctctaggaggtcagtcccatcttccaattaaagatgagaagaagcaccatgacaatgatcaccaaagagacagagactccatcaagagctcttcagtatccccatcagccagtttccgaggtgctgagaagcacagaaactccgcagactactcctcagagagcaaaaagcagaaaactgaagaaaaggaaattgcagctcgttatgacagcgatggtgagaaaagtgatgacaacttggtggttgacgtttccaatgaggatccatcttcccctcgagggagcccagcacattcccccagagagaatggcctagacaagacacgcctgctcaagaaagatgccccgattagtccagcctctattgcatcttccagcagtactccctcctccaaatccaaagaacttagccttaatgaaaaatctactactcccgtctcaaagtccaatacccctactccacgaactgatgcgcccaccccaggcagtaactctactcccggattgaggcctgtacctggaaaaccaccaggagttgaccctttggcctcaagcctaaggaccccaatggcagtaccttgtccatatccaactccatttgggattgtgccccatgctggaatgaacggagagctgaccagccccggagcggcctacgctgggctccacaacatctcccctcagatgagcgcagctgctgccgccgccgctgctgctgctgcctatgggagatcaccagtggtgggatttgatccacaccatcacatgcgtgtgccagcaatacctccaaacctgacaggcattccaggaggaaaaccagcatactccttccatgttagcgcagatggtcagatgcagcctgtcccttttccacccgacgccctcatcggacctggaatcccccggcatgctcgccagatcaacaccctcaaccacggggaggtggtgtgcgcggtgaccatcagcaaccccacgagacacgtgtacacgggtgggaagggctgcgtcaaggtctgggacatcagccacccaggcaataagagtcctgtctcccagctcgactgtctgaacagggataactacatccgttcctgcagattgctccctgatggtcgcaccctaattgttggaggggaagccagtactttgtccatttgggacctggcggctccaaccccacgcatcaaggcagagctgacatcctcggcccccgcctgctatgccctggccatcagccccgattccaaggtctgcttctcatgctgcagcgacggcaacatcgctgtgtgggatctgcacaaccagaccttggtgaggcaattccagggccacacagatggagccagctgtattgacatttctaatgatggcaccaagctctggacaggtggtttggacaacacggtcaggtcctgggacctgcgcgaggggcggcagctgcagcagcacgacttcacctcccagatcttttctctgggctactgcccaactggagagtggcttgcagtggggatggagaacagcaatgtggaagttttgcatgtcaccaagccagacaaataccaactacatcttcatgagagctgtgtgctgtcgctcaagtttgcccattgtggcaaatggtttgtaagcactggaaaggacaaccttctgaatgcctggagaacaccttatggggccagtatattccagtccaaagaatcctcatcggtgcttagctgtgacatctccgtggacgacaaatacattgtcactggctctggggataagaaggccacagtttatgaagttatttattaaagacaaatcttcatgcagactggacttctcctcctggtagcactttgctctgtcatcctttttgttcacccccatccccgcatctaaaaccaaggatttcagatactcattgcagttgtggagtttaatcccctttcttaacctcacttcccacttgctattgaattgtgaatagtcattaaaaacctgtgataccaaatcttcagctgtctacttggaagaacatggaataagcatacttaacagtgaaaagaatctttaattatgtattatatctgtaatatatttattttgtttaaagaaggctttctaacaatgactgactaaataaagctgtctgctcctgcattgataatgaaggtgcgttgtatttgatacccctccccccctttttttggcaaaggaggggaaaggaaggtttaaaataattgatttaaaatgtcactaagtgtagactgatgactgtatagagatgtgaaatgtataattacacatggaagcaatatgttgctgtgttgttattaggttttttttgtttttgttttctacatcttttaaagacttttggaaatttggctgaacaattagaacacaacaggccaactcatactcatttggatctatttagacaacgttaaccaatatatctatagctttagattatattcgataaaagtaattggactttttttctttttttgactcgttgacaagtgtctttgtaatatgtttttagttccctttttttgttgtattataggcagatgaacaaattaaatttggcctcaaagagagaacttactcccttctggatatttttgccacatttctttgcaaaaggagatatatatatctttagtcagttttgttgttatgagaaattatgggttattttgtggcatgctctttgggagctgcacagttatggggaggactcccactgctgtgcaagttaagtcttttacaaaacaaggacagcagaggagggtttgcagagacctccctctgaaaaacacaaagaatggactctctcctgggatgaggacttgctttctttacctccggttctttccatgtcttagttggatgtccctgaaatggacacaggctgtgccattgtgccagaaacattgtgttatcttttatgttgttgttgttgctgttaaactataatatgtgacttctttttttattattttttgtttgaatgctttaaaaatcttttaagtctgtggatctgctgatgtacagtgcctttgctgctatggatcaaaatcaaaagaaccgtgtagatatactttattgtataagtagaaaattacttaatttcatactagaaatggatggatgctgcaagttgaaatggactgtccattgacgttcctaatgtggtagcagaaaaaaatggtgtcttaagtgcttagtgtttgatgtcattaacagtttcgtaaaactctacagtgtagaaagattttgatactaaactgtgcgttgtacatagttctaatgcattgtattgaccaccagtacttctataatggtagattgtttgtgaattcagacttttaagcattaaacataaataacttctagtatgcttatttttctaattctttgtcttgatgacattagtttattttttatctttggctgtgccactcctatatattaaaaatgcctagttttttcaagggagattgttgttaaagtaaagtggttttttttgttgtta

SEQ ID NO: 437339 - DNA, 4193 bp, Homo sapiens
cgcggcgggccagtgacgcccgcggggaatgcggagcggcccggcagccggcacccagccgccgccgcgcgttcctgccgcccgtgtcacgcgagacccggcgggggccgggaccgcccgagccgcccctcagaccgagccggccgcctccgctgccgcggccgcctcctcttcggggtcattaaagccaatgagccgcgcgcctctgccgagcgcagccaactaaatcggcttggatgattcgcgacctgagcaagatgtacccgcagaccagacacccggcaccgcatcagcctgctcaaccctttaaatttacaatttccgaatcctgtgatcggattaaggaagagtttcagtttttacaggctcaataccacagtctgaagctggaatgtgagaaactcgccagtgagaagacagagatgcagcggcattatgtcatgtattatgaaatgtcctatgggttgaatatagaaatgcacaagcaggcagagattgtcaagaggctgaatgctatctgtgcacaagtcattcctttcctgtcccaagagcaccagcaacaagtggtgcaggctgtggaacgggccaagcaggtgaccatggcagaactgaacgccatcattgggcaacaactccaggcccagcatttatcacatggacatggtctccccgtacctctgactccacacccttcagggctccagccccctgccattccacccatcggtagcagtgccgggcttctggccctctccagtgctctaggaggtcagtcccatcttccaattaaagatgagaagaagcaccatgacaatgatcaccaaagagacagagactccatcaagagctcttcagtatccccatcagccagtttccgaggtgctgagaagcacagaaactccgcagactactcctcagagagcaaaaagcagaaaactgaagaaaaggaaattgcagctcgttatgacagcgatggtgagaaaagtgatgacaacttggtggttgacgtttccaatgaggatccatcttcccctcgagggagcccagcacattcccccagagagaatggcctagacaagacacgcctgctcaagaaagatgccccgattagtccagcctctattgcatcttccagcagtactccctcctccaaatccaaagaacttagccttaatgaaaaatctactactcccgtctcaaagtccaatacccctactccacgaactgatgcgcccaccccaggcagtaactctactcccggattgaggcctgtacctggaaaaccaccaggagttgaccctttggcctcaagcctaaggaccccaatggcagtaccttgtccatatccaactccatttgggattgtgccccatgctggaatgaacggagagctgaccagccccggagcggcctacgctgggctccacaacatctcccctcagatgagcgcagctgctgccgccgccgctgctgctgctgcctatgggagatcaccagtggtgggatttgatccacaccatcacatgcgtgtgccagcaatacctccaaacctgacaggcattccaggaggaaaaccagcatactccttccatgttagcgcagatggtcagatgcagcctgtcccttttccacccgacgccctcatcggacctggaatcccccggcatgctcgccagatcaacaccctcaaccacggggaggtggtgtgcgcggtgaccatcagcaaccccacgagacacgtgtacacgggtgggaagggctgcgtcaaggtctgggacatcagccacccaggcaataagagtcctgtctcccagctcgactgtctgaacagggataactacatccgttcctgcagattgctccctgatggtcgcaccctaattgttggaggggaagccagtactttgtccatttgggacctggcggctccaaccccacgcatcaaggcagagctgacatcctcggcccccgcctgctatgccctggccatcagccccgattccaaggtctgcttctcatgctgcagcgacggcaacatcgctgtgtgggatctgcacaaccagaccttggtgaggcaattccagggccacacagatggagccagctgtattgacatttctaatgatggcaccaagctctggacaggtggtttggacaacacggtcaggtcctgggacctgctgctgcctatgggagatcaccagtggtgggattgatccacaccatcacatgcgtgtgccagcagcacgacttcaccttccaatcttttctctgggctactgcccaactggagagtggcttgcagtggggatggagaacagcaatgtggaagttttgcatgtcaccaagccagacaaataccaactacatcttcatgagagctgtgtgctgtcgctcaagtttgcccattgtggcaaatggtttgtaagcactggaaaggacaaccttctgaatgcctggagaacaccttatggggccagtatattccagtccaaagaatcctcatcggtgcttagctgtgacatctccgtggacgacaaatacattgtcactggctctggggataagaaggccacagtttatgaagttatttattaaagacaaatcttcatgcagactggacttctcctcctggtagcactttgctctgtcatcctttttgttcacccccatccccgcatctaaaaccaaggatttcagatactcattgcagttgtggagtttaatcccctttcttaacctcacttcccacttgctattgaattgtgaatagtcattaaaaacctgtgataccaaatcttcagctgtctacttggaagaacatggaataagcatacttaacagtgaaaagaatctttaattatgtattatatctgtaatatatttattttgtttaaagaaggctttctaacaatgactgactaaataaagctgtctgctcctgcattgataatgaaggtgcgttgtatttgatacccctccccccctttttttggcaaaggaggggaaaggaaggtttaaaataattgatttaaaatgtcactaagtgtagactgatgactgtatagagatgtgaaatgtataattacacatggaagcaatatgttgctgtgttgttattaggttttttttgtttttgttttctacatcttttaaagacttttggaaatttggctgaacaattagaacacaacaggccaactcatactcatttggatctatttagacaacgttaaccaatatatctatagctttagattatattcgataaaagtaattggactttttttctttttttgactcgttgacaagtgtctttgtaatatgtttttagttccctttttttgttgtattataggcagatgaacaaattaaatttggcctcaaagagagaacttactcccttctggatatttttgccacatttctttgcaaaaggagatatatatatctttagtcagttttgttgttatgagaaattatgggttattttgtggcatgctctttgggagctgcacagttatggggaggactcccactgctgtgcaagttaagtcttttacaaaacaaggacagcagaggagggtttgcagagacctccctctgaaaaacacaaagaatggactctctcctgggatgaggacttgctttctttacctccggttctttccatgtcttagttggatgtccctgaaatggacacaggctgtgccattgtgccagaaacattgtgttatcttttatgttgttgttgttgctgttaaactataatatgtgacttctttttttattattttttgtttgaatgctttaaaaatcttttaagtctgtggatctgctgatgtacagtgcctttgctgctatggatcaaaatcaaaagaaccgtgtagatatactttattgtataagtagaaaattacttaatttcatactagaaatggatggatgctgcaagttgaaatggactgtccattgacgttcctaatgtggtagcagaaaaaaatggtgtcttaagtgcttagtgtttgatgtcattaacagtttcgtaaaactctacagtgtagaaagattttgatactaaactgtgcgttgtacatagttctaatgcattgtattgaccaccagtacttctataatggtagattgtttgtgaattcagacttttaagcattaaacataaataacttctagta

SEQ ID NO: 437340 - DNA, 4078 bp, Homo sapiens
cgcggcgggccagtgacgcccgcggggaatgcggagcggcccggcagccggcacccagccgccgccgcgcgttcctgccgcccgtgtcacgcgagacccggcgggggccgggaccgcccgagccgcccctcagaccgagccggccgcctccgctgccgcggccgcctcctcttcggggtcattaaagccaatgagccgcgcgcctctgccgagcgcagccaactaaatcggcttggatgattcgcgacctgagcaagatgtacccgcagaccagacacccggcaccgcatcagcctgctcaaccctttaaatttacaatttccgaatcctgtgatcggattaaggaagagtttcagtttttacaggctcaataccacagtctgaagctggaatgtgagaaactcgccagtgagaagacagagatgcagcggcattatgtcatgtattatgaaatgtcctatgggttgaatatagaaatgcacaagcaggcagagattgtcaagaggctgaatgctatctgtgcacaagtcattcctttcctgtcccaagagcaacaactccaggcccagcatttatcacatggacatggtctccccgtacctctgactccacacccttcagggctccagccccctgccattccacccatcggtagcagtgccgggcttctggccctctccagtgctctaggaggtcagtcccatcttccaattaaagatgagaagaagcaccatgacaatgatcaccaaagagacagagactccatcaagagctcttcagtatccccatcagccagtttccgaggtgctgagaagcacagaaactccgcagactactcctcagagagcaaaaagcagaaaactgaagaaaaggaaattgcagctcgttatgacagcgatggtgagaaaagtgatgacaacttggtggttgacgtttccaatgaggatccatcttcccctcgagggagcccagcacattcccccagagagaatggcctagacaagacacgcctgctcaagaaagatgccccgattagtccagcctctattgcatcttccagcagtactccctcctccaaatccaaagaacttagccttaatgaaaaatctactactcccgtctcaaagtccaatacccctactccacgaactgatgcgcccaccccaggcagtaactctactcccggattgaggcctgtacctggaaaaccaccaggagttgaccctttggcctcaagcctaaggaccccaatggcagtaccttgtccatatccaactccatttgggattgtgccccatgctggaatgaacggagagctgaccagccccggagcggcctacgctgggctccacaacatctcccctcagatgagcgcagctgctgccgccgccgctgctgctgctgcctatgggagatcaccagtggtgggatttgatccacaccatcacatgcgtgtgccagcaatacctccaaacctgacaggcattccaggaggaaaaccagcatactccttccatgttagcgcagatggtcagatgcagcctgtcccttttccacccgacgccctcatcggacctggaatcccccggcatgctcgccagatcaacaccctcaaccacggggaggtggtgtgcgcggtgaccatcagcaaccccacgagacacgtgtacacgggtgggaagggctgcgtcaaggtctgggacatcagccacccaggcaataagagtcctgtctcccagctcgactgtctgaacagggataactacatccgttcctgcagattgctccctgatggtcgcaccctaattgttggaggggaagccagtactttgtccatttgggacctggcggctccaaccccacgcatcaaggcagagctgacatcctcggcccccgcctgctatgccctggccatcagccccgattccaaggtctgcttctcatgctgcagcgacggcaacatcgctgtgtgggatctgcacaaccagaccttggtgaggcaattccagggccacacagatggagccagctgtattgacatttctaatgatggcaccaagctctggacaggtggtttggacaacacggtcaggtcctgggacctgcgcgaggggcggcagctgcagcagcacgacttcacctcccagatcttttctctgggctactgcccaactggagagtggcttgcagtggggatggagaacagcaatgtggaagttttgcatgtcaccaagccagacaaataccaactacatcttcatgagagctgtgtgctgtcgctcaagtttgcccattgtggcaaatggtttgtaagcactggaaaggacaaccttctgaatgcctggagaacaccttatggggccagtatattccagtccaaagaatcctcatcggtgcttagctgtgacatctccgtggacgacaaatacattgtcactggctctggggataagaaggccacagtttatgaagttatttattaaagacaaatcttcatgcagactggacttctcctcctggtagcactttgctctgtcatcctttttgttcacccccatccccgcatctaaaaccaaggatttcagatactcattgcagttgtggagtttaatcccctttcttaacctcacttcccacttgctattgaattgtgaatagtcattaaaaacctgtgataccaaatcttcagctgtctacttggaagaacatggaataagcatacttaacagtgaaaagaatctttaattatgtattatatctgtaatatatttattttgtttaaagaaggctttctaacaatgactgactaaataaagctgtctgctcctgcattgataatgaaggtgcgttgtatttgatacccctccccccctttttttggcaaaggaggggaaaggaaggtttaaaataattgatttaaaatgtcactaagtgtagactgatgactgtatagagatgtgaaatgtataattacacatggaagcaatatgttgctgtgttgttattaggttttttttgtttttgttttctacatcttttaaagacttttggaaatttggctgaacaattagaacacaacaggccaactcatactcatttggatctatttagacaacgttaaccaatatatctatagctttagattatattcgataaaagtaattggactttttttctttttttgactcgttgacaagtgtctttgtaatatgtttttagttccctttttttgttgtattataggcagatgaacaaattaaatttggcctcaaagagagaacttactcccttctggatatttttgccacatttctttgcaaaaggagatatatatatctttagtcagttttgttgttatgagaaattatgggttattttgtggcatgctctttgggagctgcacagttatggggaggactcccactgctgtgcaagttaagtcttttacaaaacaaggacagcagaggagggtttgcagagacctccctctgaaaaacacaaagaatggactctctcctgggatgaggacttgctttctttacctccggttctttccatgtcttagttggatgtccctgaaatggacacaggctgtgccattgtgccagaaacattgtgttatcttttatgttgttgttgttgctgttaaactataatatgtgacttctttttttattattttttgtttgaatgctttaaaaatcttttaagtctgtggatctgctgatgtacagtgcctttgctgctatggatcaaaatcaaaagaaccgtgtagatatactttattgtataagtagaaaattacttaatttcatactagaaatggatggatgctgcaagttgaaatggactgtccattgacgttcctaatgtggtagcagaaaaaaatggtgtcttaagtgcttagtgtttgatgtcattaacagtttcgtaaaactctacagtgtagaaagattttgatactaaactgtgcgttgtacatagttctaatgcattgtattgaccaccagtacttctataatggtagattgtttgtgaattcagacttttaagcattaaacataaataacttctagta

SEQ ID NO: 437341 - DNA, 4108 bp, Homo sapiens
cgcggcgggccagtgacgcccgcggggaatgcggagcggcccggcagccggcacccagccgccgccgcgcgttcctgccgcccgtgtcacgcgagacccggcgggggccgggaccgcccgagccgcccctcagaccgagccggccgcctccgctgccgcggccgcctcctcttcggggtcattaaagccaatgagccgcgcgcctctgccgagcgcagccaactaaatcggcttggatgattcgcgacctgagcaagatgtacccgcagaccagacacccggcaccgcatcagcctgctcaaccctttaaatttacaatttccgaatcctgtgatcggattaaggaagagtttcagtttttacaggctcaataccacagtctgaagctggaatgtgagaaactcgccagtgagaagacagagatgcagcggcattatgtcatggcagagattgtcaagaggctgaatgctatctgtgcacaagtcattcctttcctgtcccaagagcaccagcaacaagtggtgcaggctgtggaacgggccaagcaggtgaccatggcagaactgaacgccatcattgggcaacaactccaggcccagcatttatcacatggacatggtctccccgtacctctgactccacacccttcagggctccagccccctgccattccacccatcggtagcagtgccgggcttctggccctctccagtgctctaggaggtcagtcccatcttccaattaaagatgagaagaagcaccatgacaatgatcaccaaagagacagagactccatcaagagctcttcagtatccccatcagccagtttccgaggtgctgagaagcacagaaactccgcagactactcctcagagagcaaaaagcagaaaactgaagaaaaggaaattgcagctcgttatgacagcgatggtgagaaaagtgatgacaacttggtggttgacgtttccaatgaggatccatcttcccctcgagggagcccagcacattcccccagagagaatggcctagacaagacacgcctgctcaagaaagatgccccgattagtccagcctctattgcatcttccagcagtactccctcctccaaatccaaagaacttagccttaatgaaaaatctactactcccgtctcaaagtccaatacccctactccacgaactgatgcgcccaccccaggcagtaactctactcccggattgaggcctgtacctggaaaaccaccaggagttgaccctttggcctcaagcctaaggaccccaatggcagtaccttgtccatatccaactccatttgggattgtgccccatgctggaatgaacggagagctgaccagccccggagcggcctacgctgggctccacaacatctcccctcagatgagcgcagctgctgccgccgccgctgctgctgctgcctatgggagatcaccagtggtgggatttgatccacaccatcacatgcgtgtgccagcaatacctccaaacctgacaggcattccaggaggaaaaccagcatactccttccatgttagcgcagatggtcagatgcagcctgtcccttttccacccgacgccctcatcggacctggaatcccccggcatgctcgccagatcaacaccctcaaccacggggaggtggtgtgcgcggtgaccatcagcaaccccacgagacacgtgtacacgggtgggaagggctgcgtcaaggtctgggacatcagccacccaggcaataagagtcctgtctcccagctcgactgtctgaacagggataactacatccgttcctgcagattgctccctgatggtcgcaccctaattgttggaggggaagccagtactttgtccatttgggacctggcggctccaaccccacgcatcaaggcagagctgacatcctcggcccccgcctgctatgccctggccatcagccccgattccaaggtctgcttctcatgctgcagcgacggcaacatcgctgtgtgggatctgcacaaccagaccttggtgaggcaattccagggccacacagatggagccagctgtattgacatttctaatgatggcaccaagctctggacaggtggtttggacaacacggtcaggtcctgggacctgcgcgaggggcggcagctgcagcagcacgacttcacctcccagatcttttctctgggctactgcccaactggagagtggcttgcagtggggatggagaacagcaatgtggaagttttgcatgtcaccaagccagacaaataccaactacatcttcatgagagctgtgtgctgtcgctcaagtttgcccattgtggcaaatggtttgtaagcactggaaaggacaaccttctgaatgcctggagaacaccttatggggccagtatattccagtccaaagaatcctcatcggtgcttagctgtgacatctccgtggacgacaaatacattgtcactggctctggggataagaaggccacagtttatgaagttatttattaaagacaaatcttcatgcagactggacttctcctcctggtagcactttgctctgtcatcctttttgttcacccccatccccgcatctaaaaccaaggatttcagatactcattgcagttgtggagtttaatcccctttcttaacctcacttcccacttgctattgaattgtgaatagtcattaaaaacctgtgataccaaatcttcagctgtctacttggaagaacatggaataagcatacttaacagtgaaaagaatctttaattatgtattatatctgtaatatatttattttgtttaaagaaggctttctaacaatgactgactaaataaagctgtctgctcctgcattgataatgaaggtgcgttgtatttgatacccctccccccctttttttggcaaaggaggggaaaggaaggtttaaaataattgatttaaaatgtcactaagtgtagactgatgactgtatagagatgtgaaatgtataattacacatggaagcaatatgttgctgtgttgttattaggttttttttgtttttgttttctacatcttttaaagacttttggaaatttggctgaacaattagaacacaacaggccaactcatactcatttggatctatttagacaacgttaaccaatatatctatagctttagattatattcgataaaagtaattggactttttttctttttttgactcgttgacaagtgtctttgtaatatgtttttagttccctttttttgttgtattataggcagatgaacaaattaaatttggcctcaaagagagaacttactcccttctggatatttttgccacatttctttgcaaaaggagatatatatatctttagtcagttttgttgttatgagaaattatgggttattttgtggcatgctctttgggagctgcacagttatggggaggactcccactgctgtgcaagttaagtcttttacaaaacaaggacagcagaggagggtttgcagagacctccctctgaaaaacacaaagaatggactctctcctgggatgaggacttgctttctttacctccggttctttccatgtcttagttggatgtccctgaaatggacacaggctgtgccattgtgccagaaacattgtgttatcttttatgttgttgttgttgctgttaaactataatatgtgacttctttttttattattttttgtttgaatgctttaaaaatcttttaagtctgtggatctgctgatgtacagtgcctttgctgctatggatcaaaatcaaaagaaccgtgtagatatactttattgtataagtagaaaattacttaatttcatactagaaatggatggatgctgcaagttgaaatggactgtccattgacgttcctaatgtggtagcagaaaaaaatggtgtcttaagtgcttagtgtttgatgtcattaacagtttcgtaaaactctacagtgtagaaagattttgatactaaactgtgcgttgtacatagttctaatgcattgtattgaccaccagtacttctataatggtagattgtttgtgaattcagacttttaagcattaaacataaataacttctagta

SEQ ID NO: 437342 - DNA, 4090 bp, Homo sapiens
cgcggcgggccagtgacgcccgcggggaatgcggagcggcccggcagccggcacccagccgccgccgcgcgttcctgccgcccgtgtcacgcgagacccggcgggggccgggaccgcccgagccgcccctcagaccgagccggccgcctccgctgccgcggccgcctcctcttcggggtcattaaagccaatgagccgcgcgcctctgccgagcgcagccaactaaatcggcttggatgattcgcgacctgagcaagatgtacccgcagaccagacacccggcaccgcatcagcctgctcaaccctttaaatttacaatttccgaatcctgtgatcggattaaggaagagtttcagtttttacaggctcaataccacagtctgaagctggaatgtgagaaactcgccagtgagaagacagagatgcagcggcattatgtcatgtattatgaaatgtcctatgggttgaatatagaaatgcacaagcagcaccagcaacaagtggtgcaggctgtggaacgggccaagcaggtgaccatggcagaactgaacgccatcattgggcaacaactccaggcccagcatttatcacatggacatggtctccccgtacctctgactccacacccttcagggctccagccccctgccattccacccatcggtagcagtgccgggcttctggccctctccagtgctctaggaggtcagtcccatcttccaattaaagatgagaagaagcaccatgacaatgatcaccaaagagacagagactccatcaagagctcttcagtatccccatcagccagtttccgaggtgctgagaagcacagaaactccgcagactactcctcagagagcaaaaagcagaaaactgaagaaaaggaaattgcagctcgttatgacagcgatggtgagaaaagtgatgacaacttggtggttgacgtttccaatgaggatccatcttcccctcgagggagcccagcacattcccccagagagaatggcctagacaagacacgcctgctcaagaaagatgccccgattagtccagcctctattgcatcttccagcagtactccctcctccaaatccaaagaacttagccttaatgaaaaatctactactcccgtctcaaagtccaatacccctactccacgaactgatgcgcccaccccaggcagtaactctactcccggattgaggcctgtacctggaaaaccaccaggagttgaccctttggcctcaagcctaaggaccccaatggcagtaccttgtccatatccaactccatttgggattgtgccccatgctggaatgaacggagagctgaccagccccggagcggcctacgctgggctccacaacatctcccctcagatgagcgcagctgctgccgccgccgctgctgctgctgcctatgggagatcaccagtggtgggatttgatccacaccatcacatgcgtgtgccagcaatacctccaaacctgacaggcattccaggaggaaaaccagcatactccttccatgttagcgcagatggtcagatgcagcctgtcccttttccacccgacgccctcatcggacctggaatcccccggcatgctcgccagatcaacaccctcaaccacggggaggtggtgtgcgcggtgaccatcagcaaccccacgagacacgtgtacacgggtgggaagggctgcgtcaaggtctgggacatcagccacccaggcaataagagtcctgtctcccagctcgactgtctgaacagggataactacatccgttcctgcagattgctccctgatggtcgcaccctaattgttggaggggaagccagtactttgtccatttgggacctggcggctccaaccccacgcatcaaggcagagctgacatcctcggcccccgcctgctatgccctggccatcagccccgattccaaggtctgcttctcatgctgcagcgacggcaacatcgctgtgtgggatctgcacaaccagaccttggtgaggcaattccagggccacacagatggagccagctgtattgacatttctaatgatggcaccaagctctggacaggtggtttggacaacacggtcaggtcctgggacctgcgcgaggggcggcagctgcagcagcacgacttcacctcccagatcttttctctgggctactgcccaactggagagtggcttgcagtggggatggagaacagcaatgtggaagttttgcatgtcaccaagccagacaaataccaactacatcttcatgagagctgtgtgctgtcgctcaagtttgcccattgtggcaaatggtttgtaagcactggaaaggacaaccttctgaatgcctggagaacaccttatggggccagtatattccagtccaaagaatcctcatcggtgcttagctgtgacatctccgtggacgacaaatacattgtcactggctctggggataagaaggccacagtttatgaagttatttattaaagacaaatcttcatgcagactggacttctcctcctggtagcactttgctctgtcatcctttttgttcacccccatccccgcatctaaaaccaaggatttcagatactcattgcagttgtggagtttaatcccctttcttaacctcacttcccacttgctattgaattgtgaatagtcattaaaaacctgtgataccaaatcttcagctgtctacttggaagaacatggaataagcatacttaacagtgaaaagaatctttaattatgtattatatctgtaatatatttattttgtttaaagaaggctttctaacaatgactgactaaataaagctgtctgctcctgcattgataatgaaggtgcgttgtatttgatacccctccccccctttttttggcaaaggaggggaaaggaaggtttaaaataattgatttaaaatgtcactaagtgtagactgatgactgtatagagatgtgaaatgtataattacacatggaagcaatatgttgctgtgttgttattaggttttttttgtttttgttttctacatcttttaaagacttttggaaatttggctgaacaattagaacacaacaggccaactcatactcatttggatctatttagacaacgttaaccaatatatctatagctttagattatattcgataaaagtaattggactttttttctttttttgactcgttgacaagtgtctttgtaatatgtttttagttccctttttttgttgtattataggcagatgaacaaattaaatttggcctcaaagagagaacttactcccttctggatatttttgccacatttctttgcaaaaggagatatatatatctttagtcagttttgttgttatgagaaattatgggttattttgtggcatgctctttgggagctgcacagttatggggaggactcccactgctgtgcaagttaagtcttttacaaaacaaggacagcagaggagggtttgcagagacctccctctgaaaaacacaaagaatggactctctcctgggatgaggacttgctttctttacctccggttctttccatgtcttagttggatgtccctgaaatggacacaggctgtgccattgtgccagaaacattgtgttatcttttatgttgttgttgttgctgttaaactataatatgtgacttctttttttattattttttgtttgaatgctttaaaaatcttttaagtctgtggatctgctgatgtacagtgcctttgctgctatggatcaaaatcaaaagaaccgtgtagatatactttattgtataagtagaaaattacttaatttcatactagaaatggatggatgctgcaagttgaaatggactgtccattgacgttcctaatgtggtagcagaaaaaaatggtgtcttaagtgcttagtgtttgatgtcattaacagtttcgtaaaactctacagtgtagaaagattttgatactaaactgtgcgttgtacatagttctaatgcattgtattgaccaccagtacttctataatggtagattgtttgtgaattcagacttttaagcattaaacataaataacttctagta

SEQ ID NO: 437343 - DNA, 2231 bp, Homo sapiens
cgcggcgggccagtgacgcccgcggggaatgcggagcggcccggcagccggcacccagccgccgccgcgcgttcctgccgcccgtgtcacgcgagacccggcgggggccgggaccgcccgagccgcccctcagaccgagccggccgcctccgctgccgcggccgcctcctcttcggggtcattaaagccaatgagccgcgcgcctctgccgagcgcagccaactaaatcggcttggatgattcgcgacctgagcaagatgtacccgcagaccagacacccggcaccgcatcagcctgctcaaccctttaaatttacaatttccgaatcctgtgatcggattaaggaagagtttcagtttttacaggctcaataccacagtctgaagctggaatgtgagaaactcgccagtgagaagacagagatgcagcggcattatgtcatgtattatgaaatgtcctatgggttgaatatagaaatgcacaagcaggcagagattgtcaagaggctgaatgctatctgtgcacaagtcattcctttcctgtcccaagagcaccagcaacaagtggtgcaggctgtggaacgggccaagcaggtgaccatggcagaactgaacgccatcattgggcaacaactccaggcccagcatttatcacatggacatggtctccccgtacctctgactccacacccttcagggctccagccccctgccattccacccatcggtagcagtgccgggcttctggccctctccagtgctctaggaggtcagtcccatcttccaattaaagatgagaagaagcaccatgacaatgatcaccaaagagacagagactccatcaagagctcttcagtatccccatcagccagtttccgaggtgctgagaagcacagaaactccgcagactactcctcagagagcaaaaagcagaaaactgaagaaaaggaaattgcagctcgttatgacagcgatggtgagaaaagtgatgacaacttggtggttgacgtttccaatgaggatccatcttcccctcgagggagcccagcacattcccccagagagaatggcctagacaagacacgcctgctcaagaaagatgccccgattagtccagcctctattgcatcttccagcagtactccctcctccaaatccaaagaacttagccttaagagggatatggggaaattgagtgaaacacgtcttagcgaagatgaacaatgcacattggggttacagagatggttttgtcgcctgtggtttatggtaaatttagtttggggcttgaatgtgattttgttgctagctttgtttgaattaccaagctacatatgacggcaataattttcccttcctatctaaaaagtaatctctcatttacaaaagtctatcttgacttacatcacaaatcacaaatgcaaaaatgaactgctcacccatcaggataatctccctgcaccctattcttctgtggctgtgtagttaattgcaactttgtgtggtgtgtcttttttcctcaccagttatttccttgtaacataacatttaaaaaaagaataaaaagacaaattcagttttctaataacctctggaattcacagctaaaggaaaggaaattcctcacttggtctgcaaattaggggggataagtgcgacgggctagattgttggtgttgtttttttaaattttattttctcttggccttctggccttcttttaatggcacctgctctctgcttagtctctatgacaattcaagcttggatgtgttttctaatgtgacctgttcaccaggaagcctcttgtgacatgaacaatctgccaggagcccacagttaccccagtctttaccaaagtcaccagcaagtggccacagttaggacatcctggtttgtgagcctcatctgactcagaccaatttcctagaaatgagctgctctcctctaaattcagcttcagtttatgtcttcccaaatattaggtctgctgtctcaaggaactcttttgtttctttgttaacttttctattaaagaaaatcaaggcccaagctgaagaacctcttccatttcttttcctcctttccttttctttacctttttactgtttaacgtcattgttaaaaccatgttctaattgctggtatatgtcatttcatcttcagttgtctctgatgcagcttatacgaaataattgttgttctgttaactgaataccactctgtaattgc

SEQ ID NO: 437344 - DNA, 1145 bp, Homo sapiens
cgcggcgggccagtgacgcccgcggggaatgcggagcggcccggcagccggcacccagccgccgccgcgcgttcctgccgcccgtgtcacgcgagacccggcgggggccgggaccgcccgagccgcccctcagaccgagccggccgcctccgctgccgcggccgcctcctcttcggggtcattaaagccaatgagccgcgcgcctctgccgagcgcagccaactaaatcggcttggatgattcgcgacctgagcaagatgtacccgcagaccagacacccggcaccgcatcagcctgctcaaccctttaaatttacaatttccgaatcctgtgatcggattaaggaagagtttcagtttttacaggctcaataccacagtctgaagctggaatgtgagaaactcgccagtgagaagacagagatgcagcggcattatgtcatgtattatgaaatgtcctatgggttgaatatagaaatgcacaagcaggcagagattgtcaagaggctgaatgctatctgtgcacaagtcattcctttcctgtcccaagagcaacaactccaggcccagcatttatcacatggacatggtctccccgtacctctgactccacacccttcagggctccagccccctgccattccacccatcggtagcagtgccgggcttctggccctctccagtgctctaggaggtcagtcccatcttccaattaaagatgagaagaagcaccatgacaatgatcaccaaagagacagagactccatcaagagctcttcagtatccccatcagccagtttccgaggtgctgagaagcacagaaactccgcagactactcctcagagagcaaaaagcagaaaactgaagaaaaggaaattgcagctcgttatgacagcgatggtgagaaaagtgatgacaacttggtggttgacgtttccaatgaggatccatcttcccctcgagggagcccagcacattcccccagagagaatggcctagacaagacacgcctgctcaagaaagatgccccgattagtccagcctctattgcatcttccagcagtactccctcctccaaatccaaagaacttagccttaatgaaaaatctactactcccgtctaggagcgtaatcggtccgagcct

SEQ ID NO: 437345 - DNA, 497 bp, Homo sapiens
gcggccgcctccctcctcccccggcctgaccgcagcccgacgccatggcgcgggtccccccgacgggccagtttcgattccgggtgaggagggagtgggcgcggcgcgcgggtccctgggtgcctgtctttggccggggaggggagacgggactcgaaccctcggggtccggggcgcgggggcctgcgggcgggagtatgcggggccccaggaccacctcgaaaccagcctctgcctgggctgttgggcgcgaggagggttgcgggaggagagttttaatctctctttgcttgcgtgcgcgatgaccctcaccccccgctaacgccgcatagtaggttttctccgtctccctgcttcgcctgtgatgtgggctaattaaatattttattgttgttcttcaggcaccgcatcagcctgctcaaccctttaaatttacaatttccgaatcctgtgatcggattaaggaagagtttcagtttttacaggctcaataccac

SEQ ID NO: 437346 - DNA, 1021 bp, Homo sapiens
agcgggcgaacgaacgagccgagagggtggcggccgcctccctcctcccccggcctgaccgcagcccgacgccatggcgcgggtccccccgacgggccagtttcgattccgggcaccgcatcagcctgctcaaccctttaaatttacaatttccgaatcctgtgatcggattaaggaagagtttcagtttttacaggctcaataccacagtctgaagctggaatgtgagaaactcgccagtgagaagacagagatgcagcggcattatgtcatgtattatgaaatgtcctatgggttgaatatagaaatgcacaagcaggcagagattgtcaagaggctgaatgctatctgtgcacaagtcattcctttcctgtcccaagagcaccagcaacaagtggtgcaggctgtggaacgggccaagcaggtgaccatggcagaactgaacgccatcattgggcaacaactccaggcccagcatttatcacatggacatggtctccccgtacctctgactccacacccttcagggctccagccccctgccattccacccatcggtagcagtgccgggcttctggccctctccagtgctctaggaggtcagtcccatcttccaattaaagatgagaagaagcaccatgacaatgatcaccaaagagacagagactccagcaaaactacttgctgctcataatggatgaaattggagaccaaagaggaagaaccttctgggttcctgtcagtctaaatcctgattttaaaagacattcacctgccatgctagtgttgtgtgcttctactggtaggaaaagctaataactaccctgacgagctcaacgagtggcccgaggactgtgatctcacagtttaccgtttttgcagagagcctcttttattttcgtgtcagattatctgtaaaatggacttctccctccagtgttgtaaaccataacaattctggcattcctctaattgtgtggggagagggagtatacccaacagatgcttgtcgagcaggaga

SEQ ID NO: 437347 - DNA, 536 bp, Homo sapiens
cgcggcgggccagtgacgcccgcggggaatgcggagcggcccggcagccggcacccagccgccgccgcgcgttcctgccgcccgtgtcacgcgagacccggcgggggccgggaccgcccgagccgcccctcagaccgagccggccgcctccgctgccgcggccgcctcctcttcggggtcattaaagccaatgagccgcgcgcctctgccgagcgcagccaactaaatcggcttggatgattcgcgacctgagcaagatgtacccgcagaccagacacccggcaccgcatcagcctgctcaaccctttaaatttacaatttccgaatcctgtgatcggattaaggaagagtttcagtttttacaggctcaataccacagtctgaagctggaatgtgagaaactcgccagtgagaagacagagatgcagcggcattatgtcatggtaagaaaaccatgtcacagattcaaagtgcctattagtttggaataccaaaaacaagaatatgtttaaattgctgggggctgcaagatagat

SEQ ID NO: 437348 - DNA, 4249 bp, Homo sapiens
cgcggcgggccagtgacgcccgcggggaatgcggagcggcccggcagccggcacccagccgccgccgcgcgttcctgccgcccgtgtcacgcgagacccggcgggggccgggaccgcccgagccgcccctcagaccgagccggccgcctccgctgccgcggccgcctcctcttcggggtcattaaagccaatgagccgcgcgcctctgccgagcgcagccaactaaatcggcttggatgattcgcgacctgagcaagatgtacccgcagaccagacacccggcaccgcatcagcctgctcaaccctttaaatttacaatttccgaatcctgtgatcggattaaggaagagtttcagtttttacaggctcaataccacagtctgaagctggaatgtgagaaactcgccagtgagaagacagagatgcagcggcattatgtcatgtattatgaaatgtcctatgggttgaatatagaaatgcacaagcaggcagagattgtcaagaggctgaatgctatctgtgcacaagtcattcctttcctgtcccaagagcaccagcaacaagtggtgcaggctgtggaacgggccaagcaggtgaccatggcagaactgaacgccatcattgggcaacaactccaggcccagcatttatcacatggacatggtctccccgtacctctgactccacacccttcagggctccagccccctgccattccacccatcggtagcagtgccgggcttctggccctctccagtgctctaggaggtcagtcccatcttccaattaaagatgagaagaagcaccatgacaatgatcaccaaagagacagagactccatcaagagctcttcagtatccccatcagccagtttccgaggtgctgagaagcacagaaactccgcagactactcctcagagagcaaaaagcagaaaactgaagaaaaggaaattgcagctcgttatgacagcgatggtgagaaaagtgatgacaacttggtggttgacgtttccaatgaggatccatcttcccctcgagggagcccagcacattcccccagagagaatggcctagacaagacacgcctgctcaagaaagatgccccgattagtccagcctctattgcatcttccagcagtactccctcctccaaatccaaagaacttagccttaagagggatatggggaaattgagtgaaacacgtcttagcgaagatgaacaatgcacattggggttacagagatggttttgtcgcctgtggtttatgaatgaaaaatctactactcccgtctcaaagtccaatacccctactccacgaactgatgcgcccaccccaggcagtaactctactcccggattgaggcctgtacctggaaaaccaccaggagttgaccctttggcctcaagcctaaggaccccaatggcagtaccttgtccatatccaactccatttgggattgtgccccatgctggaatgaacggagagctgaccagccccggagcggcctacgctgggctccacaacatctcccctcagatgagcgcagctgctgccgccgccgctgctgctgctgcctatgggagatcaccagtggtgggatttgatccacaccatcacatgcgtgtgccagcaatacctccaaacctgacaggcattccaggaggaaaaccagcatactccttccatgttagcgcagatggtcagatgcagcctgtcccttttccacccgacgccctcatcggacctggaatcccccggcatgctcgccagatcaacaccctcaaccacggggaggtggtgtgcgcggtgaccatcagcaaccccacgagacacgtgtacacgggtgggaagggctgcgtcaaggtctgggacatcagccacccaggcaataagagtcctgtctcccagctcgactgtctgaacagggataactacatccgttcctgcagattgctccctgatggtcgcaccctaattgttggaggggaagccagtactttgtccatttgggacctggcggctccaaccccacgcatcaaggcagagctgacatcctcggcccccgcctgctatgccctggccatcagccccgattccaaggtctgcttctcatgctgcagcgacggcaacatcgctgtgtgggatctgcacaaccagaccttggtgaggcaattccagggccacacagatggagccagctgtattgacatttctaatgatggcaccaagctctggacaggtggtttggacaacacggtcaggtcctgggacctgcgcgaggggcggcagctgcagcagcacgacttcacctcccagatcttttctctgggctactgcccaactggagagtggcttgcagtggggatggagaacagcaatgtggaagttttgcatgtcaccaagccagacaaataccaactacatcttcatgagagctgtgtgctgtcgctcaagtttgcccattgtggcaaatggtttgtaagcactggaaaggacaaccttctgaatgcctggagaacaccttatggggccagtatattccagtccaaagaatcctcatcggtgcttagctgtgacatctccgtggacgacaaatacattgtcactggctctggggataagaaggccacagtttatgaagttatttattaaagacaaatcttcatgcagactggacttctcctcctggtagcactttgctctgtcatcctttttgttcacccccatccccgcatctaaaaccaaggatttcagatactcattgcagttgtggagtttaatcccctttcttaacctcacttcccacttgctattgaattgtgaatagtcattaaaaacctgtgataccaaatcttcagctgtctacttggaagaacatggaataagcatacttaacagtgaaaagaatctttaattatgtattatatctgtaatatatttattttgtttaaagaaggctttctaacaatgactgactaaataaagctgtctgctcctgcattgataatgaaggtgcgttgtatttgatacccctccccccctttttttggcaaaggaggggaaaggaaggtttaaaataattgatttaaaatgtcactaagtgtagactgatgactgtatagagatgtgaaatgtataattacacatggaagcaatatgttgctgtgttgttattaggttttttttgtttttgttttctacatcttttaaagacttttggaaatttggctgaacaattagaacacaacaggccaactcatactcatttggatctatttagacaacgttaaccaatatatctatagctttagattatattcgataaaagtaattggactttttttctttttttgactcgttgacaagtgtctttgtaatatgtttttagttccctttttttgttgtattataggcagatgaacaaattaaatttggcctcaaagagagaacttactcccttctggatatttttgccacatttctttgcaaaaggagatatatatatctttagtcagttttgttgttatgagaaattatgggttattttgtggcatgctctttgggagctgcacagttatggggaggactcccactgctgtgcaagttaagtcttttacaaaacaaggacagcagaggagggtttgcagagacctccctctgaaaaacacaaagaatggactctctcctgggatgaggacttgctttctttacctccggttctttccatgtcttagttggatgtccctgaaatggacacaggctgtgccattgtgccagaaacattgtgttatcttttatgttgttgttgttgctgttaaactataatatgtgacttctttttttattattttttgtttgaatgctttaaaaatcttttaagtctgtggatctgctgatgtacagtgcctttgctgctatggatcaaaatcaaaagaaccgtgtagatatactttattgtataagtagaaaattacttaatttcatactagaaatggatggatgctgcaagttgaaatggactgtccattgacgttcctaatgtggtagcagaaaaaaatggtgtcttaagtgcttagtgtttgatgtcattaacagtttcgtaaaactctacagtgtagaaagattttgatactaaactgtgcgttgtacatagttctaatgcattgtattgaccaccagtacttctataatggtagattgtttgtgaattcagacttttaagcattaaacataaataacttctagta

SEQ ID NO: 437349 - DNA, 5143 bp, Homo sapiens
cgcggcgggccagtgacgcccgcggggaatgcggagcggcccggcagccggcacccagccgccgccgcgcgttcctgccgcccgtgtcacgcgagacccggcgggggccgggaccgcccgagccgcccctcagaccgagccggccgcctccgctgccgcggccgcctcctcttcggggtcattaaagccaatgagccgcgcgcctctgccgagcgcagccaactaaatcggcttggatgattcgcgacctgagcaagatgtacccgcagaccagacacccggcaccgcatcagcctgctcaaccctttaaatttacaatttccgaatcctgtgatcggattaaggaagagtttcagtttttacaggctcaataccacagtctgaagctggaatgtgagaaactcgccagtgagaagacagagatgcagcggcattatgtcatgtattatgaaatgtcctatgggttgaatatagaaatgcacaagcaggcagagattgtcaagaggctgaatgctatctgtgcacaagtcattcctttcctgtcccaagagcaccagcaacaagtggtgcaggctgtggaacgggccaagcaggtgaccatggcagaactgaacgccatcattgggcaacaactccaggcccagcatttatcacatggacatggtctccccgtacctctgactccacacccttcagggctccagccccctgccattccacccatcggtagcagtgccgggcttctggccctctccagtgctctaggaggtcagtcccatcttccaattaaagatgagaagaagcaccatgacaatgatcaccaaagagacagagactccatcaagagctcttcagtatccccatcagccagtttccgaggtgctgagaagcacagaaactccgcagactactcctcagagagcaaaaagcagaaaactgaagaaaaggaaattgcagctcgttatgacagcgatggtgagaaaagtgatgacaacttggtggttgacgtttccaatgaggatccatcttcccctcgagggagcccagcacattcccccagagagaatggcctagacaagacacgcctgctcaagaaagatgccccgattagtccagcctctattgcatcttccagcagtactccctcctccaaatccaaagaacttagccttaagagggatatggggaaattgagtgaaacacgtcttagcgaagatgaacaatgcacattggggttacagagatggttttgtcgcctgtggtttatggtaaatttagtttggggcttgaatgtgattttgttgctagctttgtttgaattaccaagctacatatgacggcaataattttcccttcctatctaaaaagtaatctctcatttacaaaagtctatcttgacttacatcacaaatcacaaatgcaaaaatgaactgctcacccatcaggataatctccctgcaccctattcttctgtggctgtgtagttaattgcaactttgtgtggtgtgtcttttttcctcaccagttatttccttgtaacataacatttaaaaaaagaataaaaagacaaattcagttttctaataacctctggaattcacagctaaaggaaaggaaattcctcacttggtctgcaaattaggggggataagtgcgacgggctagattgttggtgttgtttttttaaattttattttctcttggccttctggccttcttttaatggcacctgctctctgcttagtctctatgacaattcaagcttggatgtgttttctaatgtgacctgttcaccaggaagcctcttgtgacatgaacaatctgccaggagcccacagttaccccagtctttaccaaagtcaccagcaagtggccacagttaggacatcctggtttgtgagcctcatctgactcagaccaatttcctagaaatgagctgctctcctctaaattcagcttcagtttatgtcttcccaaatattaggtctgctgtctcaaggaactcttttgtttctttgttaacttttctattaaagaaaatcaaggcccaagctgaagaacctcttccatttcttttcctcctttccttttctttacctttttactgtttaacgtcattgttaaaaccatgttctaattgctggtatatgtcatttcatcttaatgaaaaatctactactcccgtctcaaagtccaatacccctactccacgaactgatgcgcccaccccaggcagtaactctactcccggattgaggcctgtacctggaaaaccaccaggagttgaccctttggcctcaagcctaaggaccccaatggcagtaccttgtccatatccaactccatttgggattgtgccccatgctggaatgaacggagagctgaccagccccggagcggcctacgctgggctccacaacatctcccctcagatgagcgcagctgctgccgccgccgctgctgctgctgcctatgggagatcaccagtggtgggatttgatccacaccatcacatgcgtgtgccagcaatacctccaaacctgacaggcattccaggaggaaaaccagcatactccttccatgttagcgcagatggtcagatgcagcctgtcccttttccacccgacgccctcatcggacctggaatcccccggcatgctcgccagatcaacaccctcaaccacggggaggtggtgtgcgcggtgaccatcagcaaccccacgagacacgtgtacacgggtgggaagggctgcgtcaaggtctgggacatcagccacccaggcaataagagtcctgtctcccagctcgactgtctgaacagggataactacatccgttcctgcagattgctccctgatggtcgcaccctaattgttggaggggaagccagtactttgtccatttgggacctggcggctccaaccccacgcatcaaggcagagctgacatcctcggcccccgcctgctatgccctggccatcagccccgattccaaggtctgcttctcatgctgcagcgacggcaacatcgctgtgtgggatctgcacaaccagaccttggtgaggcaattccagggccacacagatggagccagctgtattgacatttctaatgatggcaccaagctctggacaggtggtttggacaacacggtcaggtcctgggacctgcgcgaggggcggcagctgcagcagcacgacttcacctcccagatcttttctctgggctactgcccaactggagagtggcttgcagtggggatggagaacagcaatgtggaagttttgcatgtcaccaagccagacaaataccaactacatcttcatgagagctgtgtgctgtcgctcaagtttgcccattgtggcaaatggtttgtaagcactggaaaggacaaccttctgaatgcctggagaacaccttatggggccagtatattccagtccaaagaatcctcatcggtgcttagctgtgacatctccgtggacgacaaatacattgtcactggctctggggataagaaggccacagtttatgaagttatttattaaagacaaatcttcatgcagactggacttctcctcctggtagcactttgctctgtcatcctttttgttcacccccatccccgcatctaaaaccaaggatttcagatactcattgcagttgtggagtttaatcccctttcttaacctcacttcccacttgctattgaattgtgaatagtcattaaaaacctgtgataccaaatcttcagctgtctacttggaagaacatggaataagcatacttaacagtgaaaagaatctttaattatgtattatatctgtaatatatttattttgtttaaagaaggctttctaacaatgactgactaaataaagctgtctgctcctgcattgataatgaaggtgcgttgtatttgatacccctccccccctttttttggcaaaggaggggaaaggaaggtttaaaataattgatttaaaatgtcactaagtgtagactgatgactgtatagagatgtgaaatgtataattacacatggaagcaatatgttgctgtgttgttattaggttttttttgtttttgttttctacatcttttaaagacttttggaaatttggctgaacaattagaacacaacaggccaactcatactcatttggatctatttagacaacgttaaccaatatatctatagctttagattatattcgataaaagtaattggactttttttctttttttgactcgttgacaagtgtctttgtaatatgtttttagttccctttttttgttgtattataggcagatgaacaaattaaatttggcctcaaagagagaacttactcccttctggatatttttgccacatttctttgcaaaaggagatatatatatctttagtcagttttgttgttatgagaaattatgggttattttgtggcatgctctttgggagctgcacagttatggggaggactcccactgctgtgcaagttaagtcttttacaaaacaaggacagcagaggagggtttgcagagacctccctctgaaaaacacaaagaatggactctctcctgggatgaggacttgctttctttacctccggttctttccatgtcttagttggatgtccctgaaatggacacaggctgtgccattgtgccagaaacattgtgttatcttttatgttgttgttgttgctgttaaactataatatgtgacttctttttttattattttttgtttgaatgctttaaaaatcttttaagtctgtggatctgctgatgtacagtgcctttgctgctatggatcaaaatcaaaagaaccgtgtagatatactttattgtataagtagaaaattacttaatttcatactagaaatggatggatgctgcaagttgaaatggactgtccattgacgttcctaatgtggtagcagaaaaaaatggtgtcttaagtgcttagtgtttgatgtcattaacagtttcgtaaaactctacagtgtagaaagattttgatactaaactgtgcgttgtacatagttctaatgcattgtattgaccaccagtacttctataatggtagattgtttgtgaattcagacttttaagcattaaacataaataacttctagta

SEQ ID NO: 437350 - DNA, 4192 bp, Homo sapiens
cgcggcgggccagtgacgcccgcggggaatgcggagcggcccggcagccggcacccagccgccgccgcgcgttcctgccgcccgtgtcacgcgagacccggcgggggccgggaccgcccgagccgcccctcagaccgagccggccgcctccgctgccgcggccgcctcctcttcggggtcattaaagccaatgagccgcgcgcctctgccgagcgcagccaactaaatcggcttggatgattcgcgacctgagcaagatgtacccgcagaccagacacccggcaccgcatcagcctgctcaaccctttaaatttacaatttccgaatcctgtgatcggattaaggaagagtttcagtttttacaggctcaataccacagtctgaagctggaatgtgagaaactcgccagtgagaagacagagatgcagcggcattatgtcatgtattatgaaatgtcctatgggttgaatatagaaatgcacaagcaggcagagattgtcaagaggctgaatgctatctgtgcacaagtcattcctttcctgtcccaagagcaccagcaacaagtggtgcaggctgtggaacgggccaagcaggtgaccatggcagaactgaacgccatcattggggagaaaaagaataaaagtgacacacctggatcattaaagcaacaactccaggcccagcatttatcacatggacatggtctccccgtacctctgactccacacccttcagggctccagccccctgccattccacccatcggtagcagtgccgggcttctggccctctccagtgctctaggaggtcagtcccatcttccaattaaagatgagaagaagcaccatgacaatgatcaccaaagagacagagactccatcaagagctcttcagtatccccatcagccagtttccgaggtgctgagaagcacagaaactccgcagactactcctcagagagcaaaaagcagaaaactgaagaaaaggaaattgcagctcgttatgacagcgatggtgagaaaagtgatgacaacttggtggttgacgtttccaatgaggatccatcttcccctcgagggagcccagcacattcccccagagagaatggcctagacaagacacgcctgctcaagaaagatgccccgattagtccagcctctattgcatcttccagcagtactccctcctccaaatccaaagaacttagccttaatgaaaaatctactactcccgtctcaaagtccaatacccctactccacgaactgatgcgcccaccccaggcagtaactctactcccggattgaggcctgtacctggaaaaccaccaggagttgaccctttggcctcaagcctaaggaccccaatggcagtaccttgtccatatccaactccatttgggattgtgccccatgctggaatgaacggagagctgaccagccccggagcggcctacgctgggctccacaacatctcccctcagatgagcgcagctgctgccgccgccgctgctgctgctgcctatgggagatcaccagtggtgggatttgatccacaccatcacatgcgtgtgccagcaatacctccaaacctgacaggcattccaggaggaaaaccagcatactccttccatgttagcgcagatggtcagatgcagcctgtcccttttccacccgacgccctcatcggacctggaatcccccggcatgctcgccagatcaacaccctcaaccacggggaggtggtgtgcgcggtgaccatcagcaaccccacgagacacgtgtacacgggtgggaagggctgcgtcaaggtctgggacatcagccacccaggcaataagagtcctgtctcccagctcgactgtctgaacagggataactacatccgttcctgcagattgctccctgatggtcgcaccctaattgttggaggggaagccagtactttgtccatttgggacctggcggctccaaccccacgcatcaaggcagagctgacatcctcggcccccgcctgctatgccctggccatcagccccgattccaaggtctgcttctcatgctgcagcgacggcaacatcgctgtgtgggatctgcacaaccagaccttggtgaggcaattccagggccacacagatggagccagctgtattgacatttctaatgatggcaccaagctctggacaggtggtttggacaacacggtcaggtcctgggacctgcgcgaggggcggcagctgcagcagcacgacttcacctcccagatcttttctctgggctactgcccaactggagagtggcttgcagtggggatggagaacagcaatgtggaagttttgcatgtcaccaagccagacaaataccaactacatcttcatgagagctgtgtgctgtcgctcaagtttgcccattgtggcaaatggtttgtaagcactggaaaggacaaccttctgaatgcctggagaacaccttatggggccagtatattccagtccaaagaatcctcatcggtgcttagctgtgacatctccgtggacgacaaatacattgtcactggctctggggataagaaggccacagtttatgaagttatttattaaagacaaatcttcatgcagactggacttctcctcctggtagcactttgctctgtcatcctttttgttcacccccatccccgcatctaaaaccaaggatttcagatactcattgcagttgtggagtttaatcccctttcttaacctcacttcccacttgctattgaattgtgaatagtcattaaaaacctgtgataccaaatcttcagctgtctacttggaagaacatggaataagcatacttaacagtgaaaagaatctttaattatgtattatatctgtaatatatttattttgtttaaagaaggctttctaacaatgactgactaaataaagctgtctgctcctgcattgataatgaaggtgcgttgtatttgatacccctccccccctttttttggcaaaggaggggaaaggaaggtttaaaataattgatttaaaatgtcactaagtgtagactgatgactgtatagagatgtgaaatgtataattacacatggaagcaatatgttgctgtgttgttattaggttttttttgtttttgttttctacatcttttaaagacttttggaaatttggctgaacaattagaacacaacaggccaactcatactcatttggatctatttagacaacgttaaccaatatatctatagctttagattatattcgataaaagtaattggactttttttctttttttgactcgttgacaagtgtctttgtaatatgtttttagttccctttttttgttgtattataggcagatgaacaaattaaatttggcctcaaagagagaacttactcccttctggatatttttgccacatttctttgcaaaaggagatatatatatctttagtcagttttgttgttatgagaaattatgggttattttgtggcatgctctttgggagctgcacagttatggggaggactcccactgctgtgcaagttaagtcttttacaaaacaaggacagcagaggagggtttgcagagacctccctctgaaaaacacaaagaatggactctctcctgggatgaggacttgctttctttacctccggttctttccatgtcttagttggatgtccctgaaatggacacaggctgtgccattgtgccagaaacattgtgttatcttttatgttgttgttgttgctgttaaactataatatgtgacttctttttttattattttttgtttgaatgctttaaaaatcttttaagtctgtggatctgctgatgtacagtgcctttgctgctatggatcaaaatcaaaagaaccgtgtagatatactttattgtataagtagaaaattacttaatttcatactagaaatggatggatgctgcaagttgaaatggactgtccattgacgttcctaatgtggtagcagaaaaaaatggtgtcttaagtgcttagtgtttgatgtcattaacagtttcgtaaaactctacagtgtagaaagattttgatactaaactgtgcgttgtacatagttctaatgcattgtattgaccaccagtacttctataatggtagattgtttgtgaattcagacttttaagcattaaacataaataacttctagta

SEQ ID NO: 437351 - DNA, 4041 bp, Homo sapiens
atcaaggcctccttccttaggcaggtgtaaataaattaaacatttcttctaccgtaaataaaaagaaggcagaacaatcgaaactggggagacttggaaaacgctgaggccaaactttcgatattgatttattggggccgggagaatgaaaggttgggaagattctggggccttttgacatccttggttctttattactccggacttgattccttctcacttttttctgccattccactgaagagctgagagcccagggaagtcggatctgaagctggaatgtgagaaactcgccagtgagaagacagagatgcagcggcattatgtcatgtattatgaaatgtcctatgggttgaatatagaaatgcacaagcaggcagagattgtcaagaggctgaatgctatctgtgcacaagtcattcctttcctgtcccaagagcaccagcaacaagtggtgcaggctgtggaacgggccaagcaggtgaccatggcagaactgaacgccatcattgggcaacaactccaggcccagcatttatcacatggacatggtctccccgtacctctgactccacacccttcagggctccagccccctgccattccacccatcggtagcagtgccgggcttctggccctctccagtgctctaggaggtcagtcccatcttccaattaaagatgagaagaagcaccatgacaatgatcaccaaagagacagagactccatcaagagctcttcagtatccccatcagccagtttccgaggtgctgagaagcacagaaactccgcagactactcctcagagagcaaaaagcagaaaactgaagaaaaggaaattgcagctcgttatgacagcgatggtgagaaaagtgatgacaacttggtggttgacgtttccaatgaggatccatcttcccctcgagggagcccagcacattcccccagagagaatggcctagacaagacacgcctgctcaagaaagatgccccgattagtccagcctctattgcatcttccagcagtactccctcctccaaatccaaagaacttagccttaatgaaaaatctactactcccgtctcaaagtccaatacccctactccacgaactgatgcgcccaccccaggcagtaactctactcccggattgaggcctgtacctggaaaaccaccaggagttgaccctttggcctcaagcctaaggaccccaatggcagtaccttgtccatatccaactccatttgggattgtgccccatgctggaatgaacggagagctgaccagccccggagcggcctacgctgggctccacaacatctcccctcagatgagcgcagctgctgccgccgccgctgctgctgctgcctatgggagatcaccagtggtgggatttgatccacaccatcacatgcgtgtgccagcaatacctccaaacctgacaggcattccaggaggaaaaccagcatactccttccatgttagcgcagatggtcagatgcagcctgtcccttttccacccgacgccctcatcggacctggaatcccccggcatgctcgccagatcaacaccctcaaccacggggaggtggtgtgcgcggtgaccatcagcaaccccacgagacacgtgtacacgggtgggaagggctgcgtcaaggtctgggacatcagccacccaggcaataagagtcctgtctcccagctcgactgtctgaacagggataactacatccgttcctgcagattgctccctgatggtcgcaccctaattgttggaggggaagccagtactttgtccatttgggacctggcggctccaaccccacgcatcaaggcagagctgacatcctcggcccccgcctgctatgccctggccatcagccccgattccaaggtctgcttctcatgctgcagcgacggcaacatcgctgtgtgggatctgcacaaccagaccttggtgaggcaattccagggccacacagatggagccagctgtattgacatttctaatgatggcaccaagctctggacaggtggtttggacaacacggtcaggtcctgggacctgcgcgaggggcggcagctgcagcagcacgacttcacctcccagatcttttctctgggctactgcccaactggagagtggcttgcagtggggatggagaacagcaatgtggaagttttgcatgtcaccaagccagacaaataccaactacatcttcatgagagctgtgtgctgtcgctcaagtttgcccattgtggcaaatggtttgtaagcactggaaaggacaaccttctgaatgcctggagaacaccttatggggccagtatattccagtccaaagaatcctcatcggtgcttagctgtgacatctccgtggacgacaaatacattgtcactggctctggggataagaaggccacagtttatgaagttatttattaaagacaaatcttcatgcagactggacttctcctcctggtagcactttgctctgtcatcctttttgttcacccccatccccgcatctaaaaccaaggatttcagatactcattgcagttgtggagtttaatcccctttcttaacctcacttcccacttgctattgaattgtgaatagtcattaaaaacctgtgataccaaatcttcagctgtctacttggaagaacatggaataagcatacttaacagtgaaaagaatctttaattatgtattatatctgtaatatatttattttgtttaaagaaggctttctaacaatgactgactaaataaagctgtctgctcctgcattgataatgaaggtgcgttgtatttgatacccctccccccctttttttggcaaaggaggggaaaggaaggtttaaaataattgatttaaaatgtcactaagtgtagactgatgactgtatagagatgtgaaatgtataattacacatggaagcaatatgttgctgtgttgttattaggttttttttgtttttgttttctacatcttttaaagacttttggaaatttggctgaacaattagaacacaacaggccaactcatactcatttggatctatttagacaacgttaaccaatatatctatagctttagattatattcgataaaagtaattggactttttttctttttttgactcgttgacaagtgtctttgtaatatgtttttagttccctttttttgttgtattataggcagatgaacaaattaaatttggcctcaaagagagaacttactcccttctggatatttttgccacatttctttgcaaaaggagatatatatatctttagtcagttttgttgttatgagaaattatgggttattttgtggcatgctctttgggagctgcacagttatggggaggactcccactgctgtgcaagttaagtcttttacaaaacaaggacagcagaggagggtttgcagagacctccctctgaaaaacacaaagaatggactctctcctgggatgaggacttgctttctttacctccggttctttccatgtcttagttggatgtccctgaaatggacacaggctgtgccattgtgccagaaacattgtgttatcttttatgttgttgttgttgctgttaaactataatatgtgacttctttttttattattttttgtttgaatgctttaaaaatcttttaagtctgtggatctgctgatgtacagtgcctttgctgctatggatcaaaatcaaaagaaccgtgtagatatactttattgtataagtagaaaattacttaatttcatactagaaatggatggatgctgcaagttgaaatggactgtccattgacgttcctaatgtggtagcagaaaaaaatggtgtcttaagtgcttagtgtttgatgtcattaacagtttcgtaaaactctacagtgtagaaagattttgatactaaactgtgcgttgtacatagttctaatgcattgtattgaccaccagtacttctataatggtagattgtttgtgaattcagacttttaagcattaaacataaataacttctagta

SEQ ID NO: 437352 - DNA, 4248 bp, Homo sapiens
cgcggcgggccagtgacgcccgcggggaatgcggagcggcccggcagccggcacccagccgccgccgcgcgttcctgccgcccgtgtcacgcgagacccggcgggggccgggaccgcccgagccgcccctcagaccgagccggccgcctccgctgccgcggccgcctcctcttcggggtcattaaagccaatgagccgcgcgcctctgccgagcgcagccaactaaatcggcttggatgattcgcgacctgagcaagatgtacccgcagaccagacacccggcaccgcatcagcctgctcaaccctttaaatttacaatttccgaatcctgtgatcggattaaggaagagtttcagtttttacaggctcaataccacagtctgaagctggaatgtgagaaactcgccagtgagaagacagagatgcagcggcattatgtcatgtattatgaaatgtcctatgggttgaatatagaaatgcacaagcagagactgtttttcacaaattgaaggctgtagcaaccctgaatggagctgttcttccaatagcctgtgctcacttcgtgtctctgtgtcacattttggcagagattgtcaagaggctgaatgctatctgtgcacaagtcattcctttcctgtcccaagagcaccagcaacaagtggtgcaggctgtggaacgggccaagcaggtgaccatggcagaactgaacgccatcattgggcaacaactccaggcccagcatttatcacatggacatggtctccccgtacctctgactccacacccttcagggctccagccccctgccattccacccatcggtagcagtgccgggcttctggccctctccagtgctctaggaggtcagtcccatcttccaattaaagatgagaagaagcaccatgacaatgatcaccaaagagacagagactccatcaagagctcttcagtatccccatcagccagtttccgaggtgctgagaagcacagaaactccgcagactactcctcagagagcaaaaagcagaaaactgaagaaaaggaaattgcagctcgttatgacagcgatggtgagaaaagtgatgacaacttggtggttgacgtttccaatgaggatccatcttcccctcgagggagcccagcacattcccccagagagaatggcctagacaagacacgcctgctcaagaaagatgccccgattagtccagcctctattgcatcttccagcagtactccctcctccaaatccaaagaacttagccttaatgaaaaatctactactcccgtctcaaagtccaatacccctactccacgaactgatgcgcccaccccaggcagtaactctactcccggattgaggcctgtacctggaaaaccaccaggagttgaccctttggcctcaagcctaaggaccccaatggcagtaccttgtccatatccaactccatttgggattgtgccccatgctggaatgaacggagagctgaccagccccggagcggcctacgctgggctccacaacatctcccctcagatgagcgcagctgctgccgccgccgctgctgctgctgcctatgggagatcaccagtggtgggatttgatccacaccatcacatgcgtgtgccagcaatacctccaaacctgacaggcattccaggaggaaaaccagcatactccttccatgttagcgcagatggtcagatgcagcctgtcccttttccacccgacgccctcatcggacctggaatcccccggcatgctcgccagatcaacaccctcaaccacggggaggtggtgtgcgcggtgaccatcagcaaccccacgagacacgtgtacacgggtgggaagggctgcgtcaaggtctgggacatcagccacccaggcaataagagtcctgtctcccagctcgactgtctgaacagggataactacatccgttcctgcagattgctccctgatggtcgcaccctaattgttggaggggaagccagtactttgtccatttgggacctggcggctccaaccccacgcatcaaggcagagctgacatcctcggcccccgcctgctatgccctggccatcagccccgattccaaggtctgcttctcatgctgcagcgacggcaacatcgctgtgtgggatctgcacaaccagaccttggtgaggcaattccagggccacacagatggagccagctgtattgacatttctaatgatggcaccaagctctggacaggtggtttggacaacacggtcaggtcctgggacctgcgcgaggggcggcagctgcagcagcacgacttcacctcccagatcttttctctgggctactgcccaactggagagtggcttgcagtggggatggagaacagcaatgtggaagttttgcatgtcaccaagccagacaaataccaactacatcttcatgagagctgtgtgctgtcgctcaagtttgcccattgtggcaaatggtttgtaagcactggaaaggacaaccttctgaatgcctggagaacaccttatggggccagtatattccagtccaaagaatcctcatcggtgcttagctgtgacatctccgtggacgacaaatacattgtcactggctctggggataagaaggccacagtttatgaagttatttattaaagacaaatcttcatgcagactggacttctcctcctggtagcactttgctctgtcatcctttttgttcacccccatccccgcatctaaaaccaaggatttcagatactcattgcagttgtggagtttaatcccctttcttaacctcacttcccacttgctattgaattgtgaatagtcattaaaaacctgtgataccaaatcttcagctgtctacttggaagaacatggaataagcatacttaacagtgaaaagaatctttaattatgtattatatctgtaatatatttattttgtttaaagaaggctttctaacaatgactgactaaataaagctgtctgctcctgcattgataatgaaggtgcgttgtatttgatacccctccccccctttttttggcaaaggaggggaaaggaaggtttaaaataattgatttaaaatgtcactaagtgtagactgatgactgtatagagatgtgaaatgtataattacacatggaagcaatatgttgctgtgttgttattaggttttttttgtttttgttttctacatcttttaaagacttttggaaatttggctgaacaattagaacacaacaggccaactcatactcatttggatctatttagacaacgttaaccaatatatctatagctttagattatattcgataaaagtaattggactttttttctttttttgactcgttgacaagtgtctttgtaatatgtttttagttccctttttttgttgtattataggcagatgaacaaattaaatttggcctcaaagagagaacttactcccttctggatatttttgccacatttctttgcaaaaggagatatatatatctttagtcagttttgttgttatgagaaattatgggttattttgtggcatgctctttgggagctgcacagttatggggaggactcccactgctgtgcaagttaagtcttttacaaaacaaggacagcagaggagggtttgcagagacctccctctgaaaaacacaaagaatggactctctcctgggatgaggacttgctttctttacctccggttctttccatgtcttagttggatgtccctgaaatggacacaggctgtgccattgtgccagaaacattgtgttatcttttatgttgttgttgttgctgttaaactataatatgtgacttctttttttattattttttgtttgaatgctttaaaaatcttttaagtctgtggatctgctgatgtacagtgcctttgctgctatggatcaaaatcaaaagaaccgtgtagatatactttattgtataagtagaaaattacttaatttcatactagaaatggatggatgctgcaagttgaaatggactgtccattgacgttcctaatgtggtagcagaaaaaaatggtgtcttaagtgcttagtgtttgatgtcattaacagtttcgtaaaactctacagtgtagaaagattttgatactaaactgtgcgttgtacatagttctaatgcattgtattgaccaccagtacttctataatggtagattgtttgtgaattcagacttttaagcattaaacataaataacttctagta

SEQ ID NO: 437353 - DNA, 2910 bp, Homo sapiens
cgcggcgggccagtgacgcccgcggggaatgcggagcggcccggcagccggcacccagccgccgccgcgcgttcctgccgcccgtgtcacgcgagacccggcgggggccgggaccgcccgagccgcccctcagaccgagccggccgcctccgctgccgcggccgcctcctcttcggggtcattaaagccaatgagccgcgcgcctctgccgagcgcagccaactaaatcggcttggatgattcgcgacctgagcaagatgtacccgcagaccagacacccggcaccgcatcagcctgctcaaccctttaaatttacaatttccgaatcctgtgatcggattaaggaagagtttcagtttttacaggctcaataccacagtctgaagctggaatgtgagaaactcgccagtgagaagacagagatgcagcggcattatgtcatgtattatgaaatgtcctatgggttgaatatagaaatgcacaagcaggcagagattgtcaagaggctgaatgctatctgtgcacaagtcattcctttcctgtcccaagagcaccagcaacaagtggtgcaggctgtggaacgggccaagcaggtgaccatggcagaactgaacgccatcattgggcaacaactccaggcccagcatttatcacatggacatggtctccccgtacctctgactccacacccttcagggctccagccccctgccattccacccatcggtagcagtgccgggcttctggccctctccagtgctctaggaggtcagtcccatcttccaattaaagatgagaagaagcaccatgacaatgatcaccaaagagacagagactccatcaagagctcttcagtatccccatcagccagtttccgaggtgctgagaagcacagaaactccgcagactactcctcagagagcaaaaagcagaaaactgaagaaaaggaaattgcagctcgttatgacagcgatggtgagaaaagtgatgacaacttggtggttgacgtttccaatgaggatccatcttcccctcgagggagcccagcacattcccccagagagaatggcctagacaagacacgcctgctcaagaaagatgccccgattagtccagcctctattgcatcttccagcagtactccctcctccaaatccaaagaacttagccttaatgaaaaatctactactcccgtctcaaagtccaatacccctactccacgaactgatgcgcccaccccaggcagtaactctactcccggattgaggcctgtacctggaaaaccaccaggagttgaccctttggcctcaagcctaaggaccccaatggcagtaccttgtccatatccaactccatttgggattgtgccccatgctggaatgaacggagagctgaccagccccggagcggcctacgctgggctccacaacatctcccctcagatgagcgcagctgctgccgccgccgctgctgctgctgcctatgggagatcaccagtggtgggatttgatccacaccatcacatgcgtgtgccagcaatacctccaaacctgacaggcattccaggaggaaaaccagcatactccttccatgttagcgcagatggtcagatgcagcctgtcccttttccacccgacgccctcatcggacctggaatcccccggcatgctcgccagatcaacaccctcaaccacggggaggtggtgtgcgcggtgaccatcagcaaccccacgagacacgtgtacacgggtgggaagggctgcgtcaaggtctgggacatcagccacccaggcaataagagtcctgtctcccagctcgactgtctgaacagggataactacatccgttcctgcagattgctccctgatggtcgcaccctaattgttggaggggaagccagtactttgtccatttgggacctggcggctccaaccccacgcatcaaggcagagctgacatcctcggcccccgcctgctatgccctggccatcagccccgattccaaggtctgcttctcatgctgcagcgacggcaacatcgctgtgtgggatctgcacaaccagaccttggtgaggcaattccagggccacacagatggagccagctgtattgacatttctaatgatggcaccaagctctggacaggtggtttggacaacacggtcaggtcctgggacctgcgcgaggggcggcagctgcagcagcacgacttcacctcccagatcttttctctgggctactgcccaactggagagtggcttgcagtggggatggagaacagcaatgtggaagttttgcatgtcaccaagccagacaaataccaactacatcttcatgagagctgtgtgctgtcgctcaagtttgcccattgtggcaaatggtttgtaagcactggaaaggacaaccttctgaatgcctggagaacaccttatggggccagtatattccagtccaaagaatcctcatcggtgcttagctgtgacatctccgtggacgacaaatacattgtcactggctctggggataagaaggccacagtttatgaagttatttattaaagacaaatcttcatgcagactggacttctcctcctggtagcactttgctctgtcatcctttttgttcacccccatccccgcatctaaaaccaaggatttcagatactcattgcagttgtggagtttaatcccctttcttaacctcacttcccacttgctattgaattgtgaatagtcattaaaaacctgtgataccaaatcttcagctgtctacttggaagaacatggaataagcatacttaacagtgaaaagaatctttaattatgtattatatctgtaatatatttattttgtttaaagaaggctttctaacaatgactgactaaataaagctgtctgctcctgcattga

SEQ ID NO: 437354 - DNA, 1190 bp, Homo sapiens
cgcggcgggccagtgacgcccgcggggaatgcggagcggcccggcagccggcacccagccgccgccgcgcgttcctgccgcccgtgtcacgcgagacccggcgggggccgggaccgcccgagccgcccctcagaccgagccggccgcctccgctgccgcggccgcctcctcttcggggtcattaaagccaatgagccgcgcgcctctgccgagcgcagccaactaaatcggcttggatgattcgcgacctgagcaagatgtacccgcagaccagacacccggcaccgcatcagcctgctcaaccctttaaatttacaatttccgaatcctgtgatcggattaaggaagagtttcagtttttacaggctcaataccacagtctgaagctggaatgtgagaaactcgccagtgagaagacagagatgcagcggcattatgtcatgtattatgaaatgtcctatgggttgaatatagaaatgcacaagcaggcagagattgtcaagaggctgaatgctatctgtgcacaagtcattcctttcctgtcccaagagcaccagcaacaagtggtgcaggctgtggaacgggccaagcaggtgaccatggcagaactgaacgccatcattgggcaacaactccaggcccagcatttatcacatggacatggtctccccgtacctctgactccacacccttcagggctccagccccctgccattccacccatcggtagcagtgccgggcttctggccctctccagtgctctaggaggtcagtcccatcttccaattaaagatgagaagaagcaccatgacaatgatcaccaaagagacagagactccagcaaaactacttgctgctcataatggatgaaattggagaccaaagaggaagaaccttctgggttcctgtcagtctaaatcctgattttaaaagacattcacctgccatgctagtgttgtgtgcttctactggtaggaaaagctaataactaccctgacgagctcaacgagtggcccgaggactgtgatctcacagtttaccgtttttgcagagagcctcttttattttcgtgtcagattatctgtaaaatggacttctccctccagtgttgtaaaccataacaattctggcattcctctaattgtgtggggagagggagtatacccaacagatgcttgtcgagcaggaga

SEQ ID NO: 437355 - DNA, 930 bp, Homo sapiens
cgcggcgggccagtgacgcccgcggggaatgcggagcggcccggcagccggcacccagccgccgccgcgcgttcctgccgcccgtgtcacgcgagacccggcgggggccgggaccgcccgagccgcccctcagaccgagccggccgcctccgctgccgcggccgcctcctcttcggggtcattaaagccaatgagccgcgcgcctctgccgagcgcagccaactaaatcggcttggatgattcgcgacctgagcaagatgtacccgcagaccagacacccggcaccgcatcagcctgctcaaccctttaaatttacaatttccgaatcctgtgatcggattaaggaagagtttcagtttttacaggctcaataccacagtctgaagctggaatgtgagaaactcgccagtgagaagacagagatgcagcggcattatgtcatgtattatgaaatgtcctatgggttgaatatagaaatgcacaagcaggcagagattgtcaagaggctgaatgctatctgtgcacaagtcattcctttcctgtcccaagagcaccagcaacaagtggtgcaggctgtggaacgggccaagcaggtgaccatggcagaactgaacgccatcattggggtacgtggcctttccattttagctctgatcttagtgtttgtcatcagctctctcgctctctctttttacattttgttccgccaaaggggcaaaaagcaatagatgactacaaaatgaaattaagcactttgccttcaatctcctgtgaaatttgatggctgccttagaaactttggatcacattctcaccaatttaagtggatgtgttcatgaaaactctcctctaaggagactggatagctctttttcatatttctttgctttgcaatcagcttgtgttgctaacctaggccaaaaaaaaaaa

SEQ ID NO: 437356 - DNA, 3379 bp, Homo sapiens
ccacgtgcttgtgttgactggacaacttcctggtggaaaaccgcgactcttgcaagtgggcaaacttgacgttttcgctatgggcaaacgcgggagccggagccagagccagctactcaacaccctaactaaaaagcagaagaaacatcttcgagatttcggcgaggagcatcccttctatgacagggtttccagaaaggaagcaaagccacagatttgtcaactgtcagagagttcagattcttcagattctgaaagcgactcagagagtgaaccacaacaagtttctggctaccacagactacttgctacattaaagaatgtttctgaggaagaagaggaagatgaggaggaggaagaggaagaagacagtattgtagatgatgcagaaatgaacgatgaagatggtggtagcgatgtcagtgtggaagaagagatggctgcagagtctactgaaagtccagagaatgtagctttatctgctgaccctgagggaaaagaagatggggaagagccaccgggcacatcacaaacatcccccgaagagttcacagatgcaaaacacgagtcactgttcagcctggaaaccaattttctggaagaggaaagtggagacaactcttctttgaaagcctctcaagatccatttcttcaacatgtgaacaaagaactgaaagaaaaagcaattcaggctgttgccacaaatcccaaaactacccacgagcttaaatggcctattctgggccagcttttcttttcctctaagtttcagaagttggaaacatttaaacccccaaaggatattgacttaaagtcacttcatctccagaagcctctggaatccacctggactaagaccaacagccagttcctatctggtccccaaaaatcaagcagcccattcacccccctccagaaagaactcttcttaattatgaattcttaccgggacctgttctacccggaaaggactgctctgaagaacggggaagagatccgccatgtgtattgcctgcatgtgataaatcacatcctcaaagccaatgcccaggtgcttggcaacaatagcagacgccgaagccagaagtttggagtgggtgatgatgatgacttcagagaccaagggttaacaaggcccaaggtactgatagtggtgccattccgggaagctgctttgcgggtggtgcagctcttcatcagcctcctcgagggtgacagcaagaagaaaatcattgtgagcaacaaaaagaggtttcagggagaatatggatcagatcccgaggagagaccacccaacttgaagaggcctgaggattatgaagccgtatttgtgggcaatattgatgaccacttcaggattggagtggcaatacttcagagaagcatccgactctatgccccgttttactcctcggatatcctcattgcttcccccctgggcttgaggaccatcattggtggagaaggagagaagaagagagattttgactttctgtcttctatcgagcttctcatcattgatcaagctgacatttacctgatgcagaactgggagcatgtcctgcatttgatgaatcacatgaacctactacccctggactcacatggggtagacttttctcgagtgcggatgtggagcctcaataattggtccaagtactatcgccagacactgctatttggggcccttcaggatgcccagatcaactcagtgttcaacaagtactgtgtcaacatgcaaggccaggtggccgtgaggaatgtcccaatgacaggctctatcagtcatgtcctggtgcagctcccacatgtcttccagaggatggaagctgaaaacctagcttcagtgattgatgccaggtttaacttttttgtgaacaagattttgccacagtatcgtgatgcagtcatgtctcacacgctcatctatatcccctcctactttgacttcgtgcgtcttcgaaattacttcaagaaggaggaattgaattttacccacatctgcgagtacacgcagaagtctggtgtctccagggccagacacttcttccttcaaggagagaaacagtttctacttttcacagagcgcttccatttctacaaaaggtatacaataaaaggcatcaggaacctgattttctatgaactgccgacatatccacacttttacagtgaaatctgtaatatgctgagagccaccaacagaggagaagaggccacgtggacctgcactgttctctactccaaatatgatgcccagaggttagctgccgtggttggtgtggagcgggcggcacagatgctacagtccaacaagaatgtccacctcttcattactggagaaaaatgaaattttgttgggcaggaagtggtatttggcatgatacataatgtttgattctatgccatttggacccaattctgattacttacagaagaaggactgatacaaagaaagtgcatgaggcaatgtcagtattatctgacatctttcttttcaggtcatgtgtccctgaaaagttaaatgtaaaccagattttggtaaatcccatctttcagaagtgaagagggggctagaaggactctgagaagttggtagaagaaaactcccacttgtgaatatttttgtgagacataaattcttttattacgatttacctctaatttattacacttagtaaattcttccagatttttctatttgtttgacacttccttaaagtaaggaatacacattgcttgcgagaactggttatgagacattggaatacttcttgctgctacatgtcatcttaattttggatggcatgggttttgtaaaacttattctgccccagccaaacttttttgaaaccttaaatagtctaccttaattcagcctagaagagtacattgatttactgatcttttttcatattcataatactaaatgttttagttttgttcaaatatatgcttaaaatcacgttatttaaaaaacacatcagctctgtctcaagaagtaattttgttgaaactccatgttaaaatatccatcttcaacagtagtgtcttcataataactagtcattttttcagtcataaacagatgcaaataaaaaggaaattacacttttaaaaacatttttattttgaaacattctcaaacagaaaaattccaagtacagaacctgaaccatttgagagtgagttgccaacccagtgggcctatcacctttaaatactttagtatatatttcctgtaaacaattaagggtattgtttgtgattaggaatgccccaccaataaggataatgtgaatatttcagaatccaaaaaaattcgaaacacgtctggtcccaagcatttcagataagagatattcaactcatcctagta

SEQ ID NO: 437357 - DNA, 3231 bp, Homo sapiens
ccacgtgcttgtgttgactggacaacttcctggtggaaaaccgcgactcttgcaagtgggcaaacttgacgttttcgctatgggcaaacgcgggagccggagccagagccagctactcaacaccctaactaaaaagcagaagaaacatcttcgagatttcggcgaggagcatcccttctatgacagggtttccagaaaggaagcaaagccacagatttgtcaactgtcagagagttcagattcttcagattctgaaagcgactcagagagtgaaccacaacaagtttctggctaccacagactacttgctacattaaagaatgtttctgaggaagaagaggaagatgaggaggaggaagaggaagaagacagtattgtagatgatgcagaaatgaacgatgaagatggtggtagcgatgtcagtgtggaagaagagatggctgcagagtctactgaaagtccagagaatgtagctttatctgctgaccctgagggaaaagaagatggggaagagccaccgggcacatcacaaacatcccccgaagagttcacagatgcaaaacacgagtcactgttcagcctggaaaccaattttctggaagaggaaagtggagacaactcttctttgaaagcctctcaagatccatttcttcaacatgtgaacaaagaactgaaagaaaaagcaattcaggctgttgccacaaatcccaaaactacccacgagcttaaatggcctattctgggccagcttttcttttcctctaagtttcagaagttggaaacatttaaacccccaaaggatattgacttaaagtcacttcatctccagaagcctctggaatccacctggactaagaccaacagccagttcctatctggtccccaaaaatcaagcagcccattcacccccctccagaaagaactcttcttaattatgaattcttaccgggacctgttctacccggaaaggactgctctgaagaacggggaagagatccgccatgtgtattgcctgcatgtgataaatcacatcctcaaagccaatgcccaggtgcttggcaacaatagcagacgccgaagccagaagtttggagtgggtgatgatgatgacttcagagaccaagggttaacaaggcccaaggtactgatagtggtgccattccgggaagctgctttgcgggtggtgcagctcttcatcagcctcctcgagggtgacagcaagaagaaaatcattgtgagcaacaaaaagaggtttcagggagaatatggatcagatcccgaggagagaccacccaacttgaagaggcctgaggattatgaagccgtatttgtgggcaatattgatgaccacttcaggattggagtggcaatacttcagagaagcatccgactctatgccccgttttactcctcggatatcctcattgcttcccccctgggcttgaggaccatcattggtggagaaggagagaagaagagagattttgactttctgtcttctatcgagcttctcatcattgatcaagctgacatttacctgatgcagaactgggagcatgtcctgcatttgatgaatcacatgaacctactacccctggactcacatggggtagacttttctcgagtgcggatgtggagcctcaataattggtccaagtactatcgccagacactgctatttggggcccttcaggatgcccagatcaactcagtgttcaacaagtactgtgtcaacatgcaaggccaggtggccgtgaggaatgtcccaatgacaggctctatcagtcatgtcctggtgcagctcccacatgtcttccagaggatggaagctgaaaacctagcttcagtgattgatgccaggtttaacttttttgtgaacaagattttgccacagtatcgtgatgcagtcatgtctcacacgctcatctatatcccctcctactttgacttcgtgcgtcttcgaaattacttcaagaaggaggaattgaattttacccacatctgcgagtacacgcagaagtctggtgtctccagggccagacacttcttccttcaaggagagaaacagtttctacttttcacagagcgcttccatttctacaaaaggtatacaataaaaggcatcaggaacctgattttctatgaactgccgacatatccacacttttacagtgaaatctgtaatatgctgagagccaccaacagaggagaagaggccacgtggacctgcactgttctctactccaaatatgatgcccagaggttagctgccgtggttggtgtggagcgggcggcacagatgctacagtccaacaagaatgtccacctcttcattactggagaaaaatgaaattttgttgggcaggaagtggtatttggcatgatacataatgtttgattctatgccatttggacccaattctgattacttacagaagaaggactgatacaaagaaagtgcatgaggcaatgtcagtattatctgacatctttcttttcaggtcatgtgtccctgaaaagttaaatgtaaaccagattttggtaaatcccatctttcagaagtgaagagggggctagaaggactctgagaagttggtagaagaaaactcccacttgtgaatatttttgtgagacataaattcttttattacgatttacctctaatttattacacttagtaaattcttccagatttttctatttgtttgacacttccttaaagtaaggaatacacattgcttgcgagaactggttatgagacattggaatacttcttgctgctacatgtcatcttaattttggatggcatgggttttgtaaaacttattctgccccagccaaacttttttgaaaccttaaatagtctaccttaattcagcctagaagagtacattgatttactgatcttttttcatattcataatactaaatgttttagttttgttcaaatatatgaaattacacttttaaaaacatttttattttgaaacattctcaaacagaaaaattccaagtacagaacctgaaccatttgagagtgagttgccaacccagtgggcctatcacctttaaatactttagtatatatttcctgtaaacaattaagggtattgtttgtgattaggaatgccccaccaataaggataatgtgaatatttcagaatccaaaaaaattcgaaacacgtctggtcccaagcatttcagataagagatattcaactcatcctagta

SEQ ID NO: 437358 - DNA, 1671 bp, Homo sapiens
gtctgaccttgtctccattcttttttgcctgattataataaggctaatgttccattttaagtgcctgctttttaagttttctgtgacagatttttaaatcctggtctactattctttcccatgatacctcagcctacccagtgtaggatcaagaaatgtgtatttattttatcattttcttaagccaaatattaggaattcgaatatgttgtcataaaaagaattcaaatatgttgccacctcaagttagaataacttttgttctgttacttgtgccactgtttttctccattagcaggaagcaacaagcatgaactatgcctctgtacaactcctaggtagtttttctagaacttgtttctcaagttgacatagctctttctttccaattctgacaggtatacaataaaaggcatcaggaacctgattttctatgaactgccgacatatccacacttttacagtgaaatctgtaatatgctgagagccaccaacagaggagaagaggccacgtggacctgcactgttctctactccaaatatgatgcccagaggttagctgccgtggttggtgtggagcgggcggcacagatgctacagtccaacaagaatgtccacctcttcattactggagaaaaatgaaattttgttgggcaggaagtggtatttggcatgatacataatgtttgattctatgccatttggacccaattctgattacttacagaagaaggactgatacaaagaaagtgcatgaggcaatgtcagtattatctgacatctttcttttcaggtcatgtgtccctgaaaagttaaatgtaaaccagattttggtaaatcccatctttcagaagtgaagagggggctagaaggactctgagaagttggtagaagaaaactcccacttgtgaatatttttgtgagacataaattcttttattacgatttacctctaatttattacacttagtaaattcttccagatttttctatttgtttgacacttccttaaagtaaggaatacacattgcttgcgagaactggttatgagacattggaatacttcttgctgctacatgtcatcttaattttggatggcatgggttttgtaaaacttattctgccccagccaaacttttttgaaaccttaaatagtctaccttaattcagcctagaagagtacattgatttactgatcttttttcatattcataatactaaatgttttagttttgttcaaatatatgcttaaaatcacgttatttaaaaaacacatcagctctgtctcaagaagtaattttgttgaaactccatgttaaaatatccatcttcaacagtagtgtcttcataataactagtcattttttcagtcataaacagatgcaaataaaaaggaaattacacttttaaaaacatttttattttgaaacattctcaaacagaaaaattccaagtacagaacctgaaccatttgagagtgagttgccaacccagtgggcctatcacctttaaatactttagtatatatttcctgtaaacaattaagggtattgtttgtgattaggaatgccccaccaataaggataatgtgaatatttcagaatccaaaaaaattcgaaacacgtctggtcccaagcatttcagataagagatattcaactcatcctagta

SEQ ID NO: 437359 - DNA, 650 bp, Homo sapiens
catttgatgaatcacatgaacctactacccctggactcacatggggtagacttttctcgagtgcggatgtggagcctcaataattggtccaagtactatcgccagacactgctatttggggcccttcaggatgcccagatcaactcagtgttcaacaagtactgtgtcaacatgcaaggccaggtgggttctcgtcttgtttcctcagtatcttcatgagcactgtttattgtttgggtcctgaggtagaaggaggcgatagcttctggtcaagaaggggatggctgtccacctaacgctcttgttgactactggcaggtggccgtgaggaatgtcccaatgacaggctctatcagtcatgtcctggtgcagctcccacatgtcttccagaggatggaagctgaaaacctagcttcagtgattgatgccaggtaacccactcctcccagcaggcccctggggaccacatagagagatttgacttgggcatacaaacctagaattggattccattttgcttttattgataactaccaaatcagttgagataattgaacttaattatgtcatttgtcagaggaggaaactgaagcacagagagaaatagtgactttggcctaggtctcataactagttagtagcagggttat

SEQ ID NO: 437360 - DNA, 372 bp, Homo sapiens
acacctcttccctctacccccgcaccacctactatgtcccaacctaagacagttcctacctatcttgaaaattcgtaaaaagtgaacgcaattctgccaccctttccaaaactactatggcgcatccaaagctataagagtcttaaaaagccgacattaactgaaaatgaggtgagaggtatcctggccgagggcggggggcagcggggggtctccctccggacctacctcagggagctgagcgtgcaggcgctccagggcaggcctgggacagagtcaaggctcagagaataaaggtagctaatctcatcataatatttttattagaatgttctgatgataaaaataaaacttgttttctttaaagaaaaa

SEQ ID NO: 437361 - DNA, 259 bp, Homo sapiens
gcggccgcctactactactactactgctcgaattcaagcttctaacgatgtacgtgaggtgagaggtatcctggccgagggcggggggcagcggggggtctccctccggacctacctcagggagctgagcgtgcaggcgctccagggcaggcctgggacagagtcaaggctcagagaataaaggtagctaatctcatcataatatttttattagaatgttctgatgataaaaataaaacttgttttctttaaagaaaaa

SEQ ID NO: 437362 - DNA, 2181 bp, Homo sapiens
gcggcggatgcagtacaaccggcgctttgtcaacgttgtgcccacctttggcaagaagaaggacaccacgttcaccaagatcttcgtgggcggcctgccgtaccacactaccgacgcctcgctcaggaagtacttcgagggcttcggcgacatcgaggaggccgtggtcatcaccgaccgccagacgggcaagtcccgcggctacggcttcgtgaccatggccgaccgggcggcagctgagagggcttgcaaagacccgaaccccatcatcgacggccgcaaggccaacgtgaacctggcatatctgggcgccaagccgcggagcctccagacgggctttgccattggggtgcagcagctgcaccccaccttgatccagcggacttacgggctgaccccgcactacatctacccaccagccatcgtgcagcccagcgtggtgatcccagccgcccctgtcccgtcgctgtcctcgccctacattgagtacacgccggccagcccggcctacgcccagtacccaccggccacctatgaccagtacccatacgccgcctcgcctgccacggctgccagcttcgtgggctacagctaccctgccgccgtgccccaggccctctcagccgcagcacccgcgggcaccactttcgtgcagtaccaggcgccgcagctgcagcctgacaggatgcagtgaggggcgttcctgccccgaggactgtggcattgtcaccttcacagcagacagagctgccaggccatgatgggctggcgacagcccggctgagcttcagtgaggtgccaccagcacccgtgcctccgaagaccgctcgggcattccgcctgcgccctgggacagcggagagacggcttctctttaatctaggtcccattgtgtcttgagggaggactttaagaatgactgagaactatttaaagacgcaatcccaggttccttgcacaccatggcagcctctccttgcaccttctcctgcctctccacactccaggttccctcaggcttgtgtccccactgctgcatcgtggcggggtgtcacagaccctctgcagcccctggctgccctggactgtgcagagatgcctgactccagggaaacctgaaagcaagaagttaatggactgtttattgtaacttgatcctcccgagctgtgagcgcagtctgaggtgtgaggacacggcctcctgttggagtcccattttctccatcagggcacgtgggcggcttcctcaagcccggaggagctcccaggcgcacaggggccgccggtaacaggggccgccggccaaaggcccctttccagtcatagcactgaagttgcaacttttttcttgtaattgttttgctactaagataatttcagaagttcagtctattttttcagcggatactgccgccaccaagaatccaaaacctatttttgacttggagagacttgcttttgttggttccgcccgtggagacgacgatagtgtttctgtataataaagtgtctgccggctcgcgggccaggatcctctcggtgggatgggcaccacagacaggaggcccctcaggcccgtgcgggccactgtctgctgccgcctgccggggtggcagagtgagttgtctcaggaccccgtcactgcgacgttgacactcctctcccttcccttcctccccaactccccaaacactgtggaaggggagaaggaagtgatccacagcattcaggccacttggggtctagaccatggtggtgccagcctggggggggcagtggccctcagctctgcccgctggagcggttgagtgcagaagggtgcgcctcttccctctacccccgcaccacctgctgtgtgccagcctgagacggttcctgcctgtcttgggggttggtggagggtggaggcagttctgccagccgtggcagggctgctatggggcatccagggctgtgggggtctggaggaggggacatgaggtgagaggtatcctggccgagggcggggggcagcggggggtctccctccggacctacctcagggagctgagcgtgcaggcgctccagggcaggcctgggacagagtcaaggctcagagaataaaggtagctaatctcatcataatatttttattagaatgttctgatgataaaaataaaacttgttttctttaaagaaaaa

SEQ ID NO: 437363 - DNA, 2048 bp, Homo sapiens
gaatcgagctcggtaccagcagggggtgccgtggtcatcaccgaccgccagacgggcaagtcccgcggctacggcttcgtgaccatggccgaccgggcggcagctgagagggcttgcaaagacccgaaccccatcatcgacggccgcaaggccaacgtgaacctggcatatctgggcgccaagccgcggagcctccagacgggctttgccattggggtgcagcagctgcaccccaccttgatccagcggacttacgggctgaccccgcactacatctacccaccagccatcgtgcagcccagcgtggtgatcccagccgcccctgtcccgtcgctgtcctcgccctacattgagtacacgccggccagcccggcctacgcccagtacccaccggccacctatgaccagtacccatacgccgcctcgcctgccacggctgccagcttcgtgggctacagctaccctgccgccgtgccccaggccctctcagccgcagcacccgcgggcaccactttcgtgcagtaccaggcgccgcagctgcagcctgacaggatgcagtgaggggcgttcctgccccgaggactgtggcattgtcaccttcacagcagacagagctgccaggccatgatgggctggcgacagcccggctgagcttcagtgaggtgccaccagcacccgtgcctccgaagaccgctcgggcattccgcctgcgccctgggacagcggagagacggcttctctttaatctaggtcccattgtgtcttgagggaggactttaagaatgactgagaactatttaaagacgcaatcccaggttccttgcacaccatggcagcctctccttgcaccttctcctgcctctccacactccaggttccctcaggcttgtgtccccactgctgcatcgtggcggggtgtcacagaccctctgcagcccctggctgccctggactgtgcagagatgcctgactccagggaaacctgaaagcaagaagttaatggactgtttattgtaacttgatcctcccgagctgtgagcgcagtctgaggtgtgaggacacggcctcctgttggagtcccattttctccatcagggcacgtgggcggcttcctcaagcccggaggagctcccaggcgcacaggggccgccggtaacaggggccgccggccaaaggcccctttccagtcatagcactgaagttgcaacttttttcttgtaattgttttgctactaagataatttcagaagttcagtctattttttcagcggatactgccgccaccaagaatccaaaacctatttttgacttggagagacttgcttttgttggttccgcccgtggagacgacgatagtgtttctgtataataaagtgtctgccggctcgcgggccaggatcctctcggtgggatgggcaccacagacaggaggcccctcaggcccgtgcgggccactgtctgctgccgcctgccggggtggcagagtgagttgtctcaggaccccgtcactgcgacgttgacactcctctcccttcccttcctccccaactccccaaacactgtggaaggggagaaggaagtgatccacagcattcaggccacttggggtctagaccatggtggtgccagcctggggggggcagtggccctcagctctgcccgctggagcggttgagtgcagaagggtgcgcctcttccctctacccccgcaccacctgctgtgtgccagcctgagacggttcctgcctgtcttgggggttggtggagggtggaggcagttctgccagccgtggcagggctgctatggggcatccagggctgtgggggtctggaggaggggacatgaggtgagaggtatcctggccgagggcggggggcagcggggggtctccctccggacctacctcagggagctgagcgtgcaggcgctccagggcaggcctgggacagagtcaaggctcagagaataaaggtagctaatctcatcataatatttttattagaatgttctgatgataaaaataaaacttgttttctttaaagaaaaa

SEQ ID NO: 437364 - DNA, 2234 bp, Homo sapiens
aataaacatcagcttaagtaaaaacgtcttgaagacactttcctgcttaccttccaagcatagcgtcgcaaactccttctcagaggaaagtctcggccctcactggtgggcaagtccaggcggccccccaagctcccttcggggttcatttttgccctatccccgcaggggattatttttgtccttgaaggccacatttcccaggccttgaactttgacgggaggagctggaatccaggaggcatctttgtgggagagccccaggtgaccatggccgaccgggcggcagctgagagggcttgcaaagacccgaaccccatcatcgacggccgcaaggccaacgtgaacctggcatatctgggcgccaagccgcggagcctccagacgggctttgccattggggtgcagcagctgcaccccaccttgatccagcggacttacgggctgaccccgcactacatctacccaccagccatcgtgcagcccagcgtggtgatcccagccgcccctgtcccgtcgctgtcctcgccctacattgagtacacgccggccagcccggcctacgcccagtacccaccggccacctatgaccagtacccatacgccgcctcgcctgccacggctgccagcttcgtgggctacagctaccctgccgccgtgccccaggccctctcagccgcagcacccgcgggcaccactttcgtgcagtaccaggcgccgcagctgcagcctgacaggatgcagtgaggggcgttcctgccccgaggactgtggcattgtcaccttcacagcagacagagctgccaggccatgatgggctggcgacagcccggctgagcttcagtgaggtgccaccagcacccgtgcctccgaagaccgctcgggcattccgcctgcgccctgggacagcggagagacggcttctctttaatctaggtcccattgtgtcttgagggaggactttaagaatgactgagaactatttaaagacgcaatcccaggttccttgcacaccatggcagcctctccttgcaccttctcctgcctctccacactccaggttccctcaggcttgtgtccccactgctgcatcgtggcggggtgtcacagaccctctgcagcccctggctgccctggactgtgcagagatgcctgactccagggaaacctgaaagcaagaagttaatggactgtttattgtaacttgatcctcccgagctgtgagcgcagtctgaggtgtgaggacacggcctcctgttggagtcccattttctccatcagggcacgtgggcggcttcctcaagcccggaggagctcccaggcgcacaggggccgccggtaacaggggccgccggccaaaggcccctttccagtcatagcactgaagttgcaacttttttcttgtaattgttttgctactaagataatttcagaagttcagtctattttttcagcggatactgccgccaccaagaatccaaaacctatttttgacttggagagacttgcttttgttggttccgcccgtggagacgacgatagtgtttctgtataataaagtgtctgccggctcgcgggccaggatcctctcggtgggatgggcaccacagacaggaggcccctcaggcccgtgcgggccactgtctgctgccgcctgccggggtggcagagtgagttgtctcaggaccccgtcactgcgacgttgacactcctctcccttcccttcctccccaactccccaaacactgtggaaggggagaaggaagtgatccacagcattcaggccacttggggtctagaccatggtggtgccagcctggggggggcagtggccctcagctctgcccgctggagcggttgagtgcagaagggtgcgcctcttccctctacccccgcaccacctgctgtgtgccagcctgagacggttcctgcctgtcttgggggttggtggagggtggaggcagttctgccagccgtggcagggctgctatggggcatccagggctgtgggggtctggaggaggggacatgaggtgagaggtatcctggccgagggcggggggcagcggggggtctccctccggacctacctcagggagctgagcgtgcaggcgctccagggcaggcctgggacagagtcaaggctcagagaataaaggtagctaatctcatcataatatttttattagaatgttctgatgataaaaataaaacttgttttctttaaagaaaaa

SEQ ID NO: 437365 - DNA, 2169 bp, Homo sapiens
gaatcgagctcggtaccagcagggggtgccgtggtcatcaccgaccgccagacgggcaagtcccgcggctacggcttcgtgaccatggccgaccgggcggcagctgagagggcttgcaaagacccgaaccccatcatcgacggccgcaaggccaacgtgaacctggcatatctgggcgccaagccgcggagcctccagacgggctttgccattggggtgcagcagctgcaccccaccttgatccagcggacttacggctgtaggaccttgggcaactcacctggccccgtgtgtgaaatgggcctcatgatgggaagaccaagccgacggggtgacgcacccagtcacagtacgggtctccccccagcgtgggcgctggctgaccccgcactacatctacccaccagccatcgtgcagcccagcgtggtgatcccagccgcccctgtcccgtcgctgtcctcgccctacattgagtacacgccggccagcccggcctacgcccagtacccaccggccacctatgaccagtacccatacgccgcctcgcctgccacggctgccagcttcgtgggctacagctaccctgccgccgtgccccaggccctctcagccgcagcacccgcgggcaccactttcgtgcagtaccaggcgccgcagctgcagcctgacaggatgcagtgaggggcgttcctgccccgaggactgtggcattgtcaccttcacagcagacagagctgccaggccatgatgggctggcgacagcccggctgagcttcagtgaggtgccaccagcacccgtgcctccgaagaccgctcgggcattccgcctgcgccctgggacagcggagagacggcttctctttaatctaggtcccattgtgtcttgagggaggactttaagaatgactgagaactatttaaagacgcaatcccaggttccttgcacaccatggcagcctctccttgcaccttctcctgcctctccacactccaggttccctcaggcttgtgtccccactgctgcatcgtggcggggtgtcacagaccctctgcagcccctggctgccctggactgtgcagagatgcctgactccagggaaacctgaaagcaagaagttaatggactgtttattgtaacttgatcctcccgagctgtgagcgcagtctgaggtgtgaggacacggcctcctgttggagtcccattttctccatcagggcacgtgggcggcttcctcaagcccggaggagctcccaggcgcacaggggccgccggtaacaggggccgccggccaaaggcccctttccagtcatagcactgaagttgcaacttttttcttgtaattgttttgctactaagataatttcagaagttcagtctattttttcagcggatactgccgccaccaagaatccaaaacctatttttgacttggagagacttgcttttgttggttccgcccgtggagacgacgatagtgtttctgtataataaagtgtctgccggctcgcgggccaggatcctctcggtgggatgggcaccacagacaggaggcccctcaggcccgtgcgggccactgtctgctgccgcctgccggggtggcagagtgagttgtctcaggaccccgtcactgcgacgttgacactcctctcccttcccttcctccccaactccccaaacactgtggaaggggagaaggaagtgatccacagcattcaggccacttggggtctagaccatggtggtgccagcctggggggggcagtggccctcagctctgcccgctggagcggttgagtgcagaagggtgcgcctcttccctctacccccgcaccacctgctgtgtgccagcctgagacggttcctgcctgtcttgggggttggtggagggtggaggcagttctgccagccgtggcagggctgctatggggcatccagggctgtgggggtctggaggaggggacatgaggtgagaggtatcctggccgagggcggggggcagcggggggtctccctccggacctacctcagggagctgagcgtgcaggcgctccagggcaggcctgggacagagtcaaggctcagagaataaaggtagctaatctcatcataatatttttattagaatgttctgatgataaaaataaaacttgttttctttaaagaaaaa

SEQ ID NO: 437366 - DNA, 1681 bp, Homo sapiens
  misc_feature (1)..(1): n is a, c, g, or t
ngatacaatcgagctcggtaccaggaaacagctatgaccagtacccatacgccgcctcgcctgccacggctgccagcttcgtgggctacagctaccctgccgccgtgccccaggccctctcagccgcagcacccgcgggcaccactttcgtgcagtaccaggcgccgcagctgcagcctgacaggatgcagtgaggggcgttcctgccccgaggactgtggcattgtcaccttcacagcagacagagctgccaggccatgatgggctggcgacagcccggctgagcttcagtgaggtgccaccagcacccgtgcctccgaagaccgctcgggcattccgcctgcgccctgggacagcggagagacggcttctctttaatctaggtcccattgtgtcttgagggaggactttaagaatgactgagaactatttaaagacgcaatcccaggttccttgcacaccatggcagcctctccttgcaccttctcctgcctctccacactccaggttccctcaggcttgtgtccccactgctgcatcgtggcggggtgtcacagaccctctgcagcccctggctgccctggactgtgcagagatgcctgactccagggaaacctgaaagcaagaagttaatggactgtttattgtaacttgatcctcccgagctgtgagcgcagtctgaggtgtgaggacacggcctcctgttggagtcccattttctccatcagggcacgtgggcggcttcctcaagcccggaggagctcccaggcgcacaggggccgccggtaacaggggccgccggccaaaggcccctttccagtcatagcactgaagttgcaacttttttcttgtaattgttttgctactaagataatttcagaagttcagtctattttttcagcggatactgccgccaccaagaatccaaaacctatttttgacttggagagacttgcttttgttggttccgcccgtggagacgacgatagtgtttctgtataataaagtgtctgccggctcgcgggccaggatcctctcggtgggatgggcaccacagacaggaggcccctcaggcccgtgcgggccactgtctgctgccgcctgccggggtggcagagtgagttgtctcaggaccccgtcactgcgacgttgacactcctctcccttcccttcctccccaactccccaaacactgtggaaggggagaaggaagtgatccacagcattcaggccacttggggtctagaccatggtggtgccagcctggggggggcagtggccctcagctctgcccgctggagcggttgagtgcagaagggtgcgcctcttccctctacccccgcaccacctgctgtgtgccagcctgagacggttcctgcctgtcttgggggttggtggagggtggaggcagttctgccagccgtggcagggctgctatggggcatccagggctgtgggggtctggaggaggggacatgaggtgagaggtatcctggccgagggcggggggcagcggggggtctccctccggacctacctcagggagctgagcgtgcaggcgctccagggcaggcctgggacagagtcaaggctcagagaataaaggtagctaatctcatcataatatttttattagaatgttctgatgataaaaataaaacttgttttctttaaagaaaaa

SEQ ID NO: 437367 - DNA, 2836 bp, Homo sapiens
gcgcagcgcggcgcactcggcgcgcacggcgggagcggcgcgcgagtggtcgggcctggcggctggacgggcgcccctcgctgccccgcgcgctccccgccgccccccatgagcgcaccccgcgcggcccgggtccgtaggcggcggggcgccccccatgctgctgcagcccgcgccgtgcgccccgagcgcgggcttcccgcggcccctggccgcccccggcgccatgcacggctcgcagaaggacaccacgttcaccaagatcttcgtgggcggcctgccgtaccacactaccgacgcctcgctcaggaagtacttcgagggcttcggcgacatcgaggaggccgtggtcatcaccgaccgccagacgggcaagtcccgcggctacggcttcgtgaccatggccgaccgggcggcagctgagagggcttgcaaagacccgaaccccatcatcgacggccgcaaggccaacgtgaacctggcatatctgggcgccaagccgcggagcctccagacgggctttgccattggggtgcagcagctgcaccccaccttgatccagcggacttacgggctgaccccgcactacatctacccaccagccatcgtgcagcccagcgtggtgatcccagccgcccctgtcccgtcgctgtcctcgccctacattgagtacacgccggccagcccggcctacgcccagtacccaccggccacctatgaccagtacccatacgccgcctcgcctgccacggctgccagcttcgtgggctacagctaccctgccgccgtgccccaggccctctcagccgcagcacccgcgggcaccactttcgtgcagtaccaggcgccgcagctgcagcctgacaggatgcagtgaggggcgttcctgccccgaggactgtggcattgtcaccttcacagcagacagagctgccaggccatgatgggctggcgacagcccggctgagcttcagtgaggtgccaccagcacccgtgcctccgaagaccgctcgggcattccgcctgcgccctgggacagcggagagacggcttctctttaatctaggtcccattgtgtcttgagggaggactttaagaatgactgagaactatttaaagacgcaatcccaggttccttgcacaccatggcagcctctccttgcaccttctcctgcctctccacactccaggttccctcaggcttgtgtccccactgctgcatcgtggcggggtgtcacagaccctctgcagcccctggctgccctggactgtgcagagatgcctgactccagggaaacctgaaagcaagaagttaatggactgtttattgtaacttgatcctcccgagctgtgagcgcagtctgaggtgtgaggacacggcctcctgttggagtcccattttctccatcagggcacgtgggcggcttcctcaagcccggaggagctcccaggcgcacaggggccgccggtaacaggggccgccggccaaaggcccctttccagtcatagcactgaagttgcaacttttttcttgtaattgttttgctactaagataatttcagaagttcagtctattttttcagcggatactgccgccaccaagaatccaaaacctatttttgacttggagagacttgcttttgttggttccgcccgtggagacgacgatagtgtttctgtataataaagtgtctgccggctcgcgggccaggatcctctcggtgggatgggcaccacagacaggaggcccctcaggcccgtgcgggccactgtctgctgccgcctgccggggtggcagagtgagttgtctcaggaccccgtcactgcgacgttgacactcctctcccttcccttcctccccaactccccaaacactgtggaaggggagaaggaagtgatccacagcattcaggccacttggggtctagaccatggtggtgccagcctggggggggcagtggccctcagctctgcccgctggagcggttgagtgcagaagggtgcgcctcttccctctacccccgcaccacctgctgtgtgccagcctgagacggttcctgcctgtcttgggggttggtggagggtggaggcagttctgccagccgtggcagggctgctatggggcatccagggctgtgggggtctggaggaggggacatgaggtgagaggtatcctggccgagggcggggggcagcggggggtctccctccggacctacctcagggagctgagcgtgcaggcgctccagggcaggcctgggacagagtcaaggctcagagaataaaggtagctaatctcatcataatatttttattagaatgttctgatgataaaaataaaacttgttttctttaaagaaaaaaaaaaaaaaaaaaaaaaaaaaaaaaaaaaaaaaaaaaaaaaaaaaaaaaaaaaaaaaagggggggggcccccaagtaaaggacctcccccgtagggggggcacccaatagtggagggagcgcccccgagcttgttggttgcaagagggggccccacccaagaggaggagtcgactaaattacaccacgagagccgggcggcgggggtttaaacaaaacaacgatgggtgcgtgggagaaaaactggtcgatccagggggagagtctttcgggaaggaggccccacaccatctggggggggggggcgaacaactaggtggggagacccccacccctcccagagtgatctatacgccctcggggggaaataataactatgaggggtcatgtgggtgcaaacacaccgggcaacagtgcgggcgagaaaaatgtcgacgggagatgtgattaagaaatttttcgggcggggagaa

SEQ ID NO: 437368 - DNA, 1422 bp, Homo sapiens
  misc_feature (1359)..(1360): n is a, c, g, or t
gcgcagcgcggcgcactcggcgcgcacggcgggagcggcgcgcgagtggtcgggcctggcggctggacgggcgcccctcgctgccccgcgcgctccccgccgccccccatgagcgcaccccgcgcggcccgggtccgtaggcggcggggcgccccccatgctgctgcagcccgcgccgtgcgccccgagcgcgggcttcccgcggcccctggccgcccccggcgccatgcacggctcgcagaaggacaccacgttcaccaagatcttcgtgggcggcctgccgtaccacactaccgacgcctcgctcaggaagtacttcgagggcttcggcgacatcgaggaggccgtggtcatcaccgaccgccagacgggcaagtcccgcggctacggcttcgtgaccatggccgaccgggcggcagctgagagggcttgcaaagacccgaaccccatcatcgacggccgcaaggccaacgtgaacctggcatatctgggcgccaagccgcggagcctccagacgggctttgccattggggtgcagcagctgcaccccaccttgatccagcggacttacgggctgaccccgcactacatctacccaccagccatcgtgcagcccagcgtggtgatcccagccgcccctgtcccgtcgctgtcctcgccctacattgagtacacgccggccagcccggcctacgcccagtacccaccggccacctatgaccagtacccatacgccgcctcgcctgccacggctgccagcttcgtgggctacagctaccctgccgccgtgccccaggccctctcagccgcagcacccgcgggcaccactttcgtgcagtaccaggcgccgcagctgcagcctgacaggatgcagtgaggggcgttcctgccccgaggactgtggcattgtcaccttcacagcagacagagctgccaggccatgatgggctggcgacagcccggctgagcttcagtgaggtgccaccagcacccgtgcctccgaagaccgctcgggcattccgcctgcgccctgggacagcggagagacggcttctctttaatctaggtcccattgtgtcttgagggaggactttaagaatgactgagaactatttaaagacgcaatcccaggttccttgcacaccatggcagcctctccttgcaccttctcctgcctctccacactccaggttccctcaggcttgtgtccccactgctgcatcgtggcggggtgtcacagaccctctgcagcccctggctgccctggactgtgcagagatgcctgactccagggaaacctgaaagcaagaagttaatggactgtttattgtaacttgatcctcccgagctgtgacacgnngaagtggagaacagccccggtgagaacccatatccaagggacggagaggaaacacaccgaga

SEQ ID NO: 437369 - DNA, 368 bp, Homo sapiens
gaatcgagctcggtaccagcagggggtgccgtggtcatcaccgaccgccagacgggcaagtcccgcggctacggcttcgtgaccatggccgaccgggcggcagctgagagggcttgcaaagacccgaaccccatcatcgacggccgcaaggccaacgtgaacctggcatatctgggcgacagaccagcggacaacgtctcagacgcctgcagcagaggtggtagagcatctgcaacacaccaagattcaaacggagtcaggtacaacggacgcacaaaatgtaggcaccatcgattcagaaagacaaagtgtggaacccagcagctcctatcgcactgctcacactctgcggagcatggagtaacaca

SEQ ID NO: 437370 - DNA, 2364 bp, Homo sapiens
gcgcagcgcggcgcactcggcgcgcacggcgggagcggcgcgcgagtggtcgggcctggcggctggacgggcgcccctcgctgccccgcgcgctccccgccgccccccatgagcgcaccccgcgcggcccgggtccgtaggcggcggggcgccccccatgctgctgcagcccgcgccgtgcgccccgagcgcgggcttcccgcggcccctggccgcccccggcgccatgcacggctcgcagaaggacaccacgttcaccaagatcttcgtgggcggcctgccgtaccacactaccgacgcctcgctcaggaagtacttcgagggcttcggcgacatcgaggaggccgtggtcatcaccgaccgccagacgggcaagtcccgcggctacggcttcgtgaccatggccgaccgggcggcagctgagagggcttgcaaagacccgaaccccatcatcgacggccgcaaggccaacgtgaacctggcatatctgggcgccaagccgcggagcctccagacgggctttgccattggggtgcagcagctgcaccccaccttgatccagcggacttacgggctgaccccgcactacatctacccaccagccatcgtgcagcccagcgtggtgatcccagccgcccctgtcccgtcgctgtcctcgccctacattgagtacacgccggccagcccggcctacgcccagtacccaccggccacctatgaccagtacccatacgccgcctcgcctgccacggctgccagcttcgtgggctacagctaccctgccgccgtgccccaggccctctcagccgcagcacccgcgggcaccactttcgtgcagtaccaggcgccgcagctgcagcctgacaggatgcagtgaggggcgttcctgccccgaggactgtggcattgtcaccttcacagcagacagagctgccaggccatgatgggctggcgacagcccggctgagcttcagtgaggtgccaccagcacccgtgcctccgaagaccgctcgggcattccgcctgcgccctgggacagcggagagacggcttctctttaatctaggtcccattgtgtcttgagggaggactttaagaatgactgagaactatttaaagacgcaatcccaggttccttgcacaccatggcagcctctccttgcaccttctcctgcctctccacactccaggttccctcaggcttgtgtccccactgctgcatcgtggcggggtgtcacagaccctctgcagcccctggctgccctggactgtgcagagatgcctgactccagggaaacctgaaagcaagaagttaatggactgtttattgtaacttgatcctcccgagctgtgagcgcagtctgaggtgtgaggacacggcctcctgttggagtcccattttctccatcagggcacgtgggcggcttcctcaagcccggaggagctcccaggcgcacaggggccgccggtaacaggggccgccggccaaaggcccctttccagtcatagcactgaagttgcaacttttttcttgtaattgttttgctactaagataatttcagaagttcagtctattttttcagcggatactgccgccaccaagaatccaaaacctatttttgacttggagagacttgcttttgttggttccgcccgtggagacgacgatagtgtttctgtataataaagtgtctgccggctcgcgggccaggatcctctcggtgggatgggcaccacagacaggaggcccctcaggcccgtgcgggccactgtctgctgccgcctgccggggtggcagagtgagttgtctcaggaccccgtcactgcgacgttgacactcctctcccttcccttcctccccaactccccaaacactgtggaaggggagaaggaagtgatccacagcattcaggccacttggggtctagaccatggtggtgccagcctggggggggcagtggccctcagctctgcccgctggagcggttgagtgcagaagggtgcgcctcttccctctacccccgcaccacctgctgtgtgccagcctgagacggttcctgcctgtcttgggggttggtggagggtggaggcagttctgccagccgtggcagggctgctatggggcatccagggctgtgggggtctggaggaggggacatgaggtgagaggtatcctggccgagggcggggggcagcggggggtctccctccggacctacctcagggagctgagcgtgcaggcgctccagggcaggcctgggacagagtcaaggctcagagaataaaggtagctaatctcatcataatatttttattagaatgttctgatgataaaaataaaacttgttttctttaaagaaaaa

SEQ ID NO: 437371 - DNA, 2437 bp, Homo sapiens
gcgcagcgcggcgcactcggcgcgcacggcgggagcggcgcgcgagtggtcgggcctggcggctggacgggcgcccctcgctgccccgcgcgctccccgccgccccccatgagcgcaccccgcgcggcccgggtccgtaggcggcggggcgccccccatgctgctgcagcccgcgccgtgcgccccgagcgcgggcttcccgcggcccctggccgcccccggcgccatgcacggctcgcagaaggacaccacgttcaccaagatcttcgtgggcggcctgccgtaccacactaccgacgcctcgctcaggaagtacttcgagggcttcggcgacatcgaggaggccgtggtcatcaccgaccgccagacgggggattatttttgtccttgaaggccacatttcccaggccttgaactttgacgggaggagctggaatccaggaggcatctttgtgggagagccccaggtgaccatggccgaccgggcggcagctgagagggcttgcaaagacccgaaccccatcatcgacggccgcaaggccaacgtgaacctggcatatctgggcgccaagccgcggagcctccagacgggctttgccattggggtgcagcagctgcaccccaccttgatccagcggacttacgggctgaccccgcactacatctacccaccagccatcgtgcagcccagcgtggtgatcccagccgcccctgtcccgtcgctgtcctcgccctacattgagtacacgccggccagcccggcctacgcccagtacccaccggccacctatgaccagtacccatacgccgcctcgcctgccacggctgccagcttcgtgggctacagctaccctgccgccgtgccccaggccctctcagccgcagcacccgcgggcaccactttcgtgcagtaccaggcgccgcagctgcagcctgacaggatgcagtgaggggcgttcctgccccgaggactgtggcattgtcaccttcacagcagacagagctgccaggccatgatgggctggcgacagcccggctgagcttcagtgaggtgccaccagcacccgtgcctccgaagaccgctcgggcattccgcctgcgccctgggacagcggagagacggcttctctttaatctaggtcccattgtgtcttgagggaggactttaagaatgactgagaactatttaaagacgcaatcccaggttccttgcacaccatggcagcctctccttgcaccttctcctgcctctccacactccaggttccctcaggcttgtgtccccactgctgcatcgtggcggggtgtcacagaccctctgcagcccctggctgccctggactgtgcagagatgcctgactccagggaaacctgaaagcaagaagttaatggactgtttattgtaacttgatcctcccgagctgtgagcgcagtctgaggtgtgaggacacggcctcctgttggagtcccattttctccatcagggcacgtgggcggcttcctcaagcccggaggagctcccaggcgcacaggggccgccggtaacaggggccgccggccaaaggcccctttccagtcatagcactgaagttgcaacttttttcttgtaattgttttgctactaagataatttcagaagttcagtctattttttcagcggatactgccgccaccaagaatccaaaacctatttttgacttggagagacttgcttttgttggttccgcccgtggagacgacgatagtgtttctgtataataaagtgtctgccggctcgcgggccaggatcctctcggtgggatgggcaccacagacaggaggcccctcaggcccgtgcgggccactgtctgctgccgcctgccggggtggcagagtgagttgtctcaggaccccgtcactgcgacgttgacactcctctcccttcccttcctccccaactccccaaacactgtggaaggggagaaggaagtgatccacagcattcaggccacttggggtctagaccatggtggtgccagcctggggggggcagtggccctcagctctgcccgctggagcggttgagtgcagaagggtgcgcctcttccctctacccccgcaccacctgctgtgtgccagcctgagacggttcctgcctgtcttgggggttggtggagggtggaggcagttctgccagccgtggcagggctgctatggggcatccagggctgtgggggtctggaggaggggacatgaggtgagaggtatcctggccgagggcggggggcagcggggggtctccctccggacctacctcagggagctgagcgtgcaggcgctccagggcaggcctgggacagagtcaaggctcagagaataaaggtagctaatctcatcataatatttttattagaatgttctgatgataaaaataaaacttgttttctttaaagaaaaa

SEQ ID NO: 437372 - DNA, 2126 bp, Homo sapiens
gcggcggatgcagtacaaccggcgctttgtcaacgttgtgcccacctttggcaagaagaaggacaccacgttcaccaagatcttcgtgggcggcctgccgtaccacactaccgacgcctcgctcaggaagtacttcgagggcttcggcgacatcgaggaggccgtggtcatcaccgaccgccagacgggcaagtcccgcggctacggcttcgtgaccatggccgaccgggcggcagctgagagggcttgcaaagacccgaaccccatcatcgacggccgcaaggccaacgtgaacctggcatatctgggcgccaagccgcggagcctccagacgggctgaccccgcactacatctacccaccagccatcgtgcagcccagcgtggtgatcccagccgcccctgtcccgtcgctgtcctcgccctacattgagtacacgccggccagcccggcctacgcccagtacccaccggccacctatgaccagtacccatacgccgcctcgcctgccacggctgccagcttcgtgggctacagctaccctgccgccgtgccccaggccctctcagccgcagcacccgcgggcaccactttcgtgcagtaccaggcgccgcagctgcagcctgacaggatgcagtgaggggcgttcctgccccgaggactgtggcattgtcaccttcacagcagacagagctgccaggccatgatgggctggcgacagcccggctgagcttcagtgaggtgccaccagcacccgtgcctccgaagaccgctcgggcattccgcctgcgccctgggacagcggagagacggcttctctttaatctaggtcccattgtgtcttgagggaggactttaagaatgactgagaactatttaaagacgcaatcccaggttccttgcacaccatggcagcctctccttgcaccttctcctgcctctccacactccaggttccctcaggcttgtgtccccactgctgcatcgtggcggggtgtcacagaccctctgcagcccctggctgccctggactgtgcagagatgcctgactccagggaaacctgaaagcaagaagttaatggactgtttattgtaacttgatcctcccgagctgtgagcgcagtctgaggtgtgaggacacggcctcctgttggagtcccattttctccatcagggcacgtgggcggcttcctcaagcccggaggagctcccaggcgcacaggggccgccggtaacaggggccgccggccaaaggcccctttccagtcatagcactgaagttgcaacttttttcttgtaattgttttgctactaagataatttcagaagttcagtctattttttcagcggatactgccgccaccaagaatccaaaacctatttttgacttggagagacttgcttttgttggttccgcccgtggagacgacgatagtgtttctgtataataaagtgtctgccggctcgcgggccaggatcctctcggtgggatgggcaccacagacaggaggcccctcaggcccgtgcgggccactgtctgctgccgcctgccggggtggcagagtgagttgtctcaggaccccgtcactgcgacgttgacactcctctcccttcccttcctccccaactccccaaacactgtggaaggggagaaggaagtgatccacagcattcaggccacttggggtctagaccatggtggtgccagcctggggggggcagtggccctcagctctgcccgctggagcggttgagtgcagaagggtgcgcctcttccctctacccccgcaccacctgctgtgtgccagcctgagacggttcctgcctgtcttgggggttggtggagggtggaggcagttctgccagccgtggcagggctgctatggggcatccagggctgtgggggtctggaggaggggacatgaggtgagaggtatcctggccgagggcggggggcagcggggggtctccctccggacctacctcagggagctgagcgtgcaggcgctccagggcaggcctgggacagagtcaaggctcagagaataaaggtagctaatctcatcataatatttttattagaatgttctgatgataaaaataaaacttgttttctttaaagaaaaa

SEQ ID NO: 437373 - DNA, 2125 bp, Homo sapiens
gcgcagcgcggcgcactcggcgcgcacggcgggagcggcgcgcgagtggtcgggcctggcggctggacgggcgcccctcgctgccccgcgcgctccccgccgccccccatgagcgcaccccgcgcggcccgggtccgtaggcggcggggcgccccccatgctgctgcagcccgcgccgtgcgccccgagcgcgggcttcccgcggcccctggccgcccccggcgccatgcacggctcgcagaaggacaccacgttcaccaagatcttcgtgggcggcctgccgtaccacactaccgacgcctcgctcaggaagtacttcgagggcttcggcgacatcgaggaggccgtggtcatcaccgaccgccagacgggcaagtcccgcggctacggcttcgtgaccatggccgaccgggcggcagctgagagggcttgcaaagacccgaaccccatcatcgacggccgcaaggccaacgtgaacctggcatatctgggcgccaagccgcggagcctccagacgggctttgccattggggtgcagcagctgcaccccaccttgatccagcggacttacgggctgaccccgcactacatctacccaccagccatcgtgcagcccagcgtggtgatcccagccgcccctgtcccgtcgctgtcctcgccctacattgagtacacgccggccagcccggcctacgcccagtacccaccggccacctatgaccagtacccatacgccgcctcgcctgccacggctgccagcttcgtgggctacagctaccctgccgccgtgccccaggccctctcagccgcagcacccgcgggcaccactttcgtgcagtaccaggcgccgcagctgcagcctgacaggatgcagtgaggggcgttcctgccccgaggactgtggcattgtcaccttcacagcagacagagctgccaggccatgatgggctggcgacagcccggctgagcttcagtgaggtgccaccagcacccgtgcctccgaagaccgctcgggcattccgcctgcgccctgggacagcggagagacggcttctctttaatctaggtcccattgtgtcttgagggaggactttaagaatgactgagaactatttaaagacgcaatcccaggttccttgcacaccatggcagcctctccttgcaccttctcctgcctctccacactccaggttccctcaggcttgtgtccccactgctgcatcgtggcggggtgtcacagaccctctgcagcccctggctgccctggactgtgcagagatgcctgactccagggaaacctgaaagcaagaagttaatggactgtttattgtaacttgatcctcccgagctgtgagcgcagtctgaggtgtgaggacacggcctcctgttggagtcccattttctccatcagggcacgtgggcggcttcctcaagcccggaggagctcccaggcgcacaggggccgccggtaacaggggccgccggccaaaggcccctttccagtcatagcactgaagttgcaacttttttcttgtaattgttttgctactaagataatttcagaagttcagtctattttttcagcggatactgccgccaccaagaatccaaaacctatttttgacttggagagacttgcttttgttggttccgcccgtggagacgacgatagtgtttctgtataataaagtgtctgccggctcgcgggccaggatcctctcggtgggatgggcaccacagacaggaggcccctcaggcccgtgcgggccactgtctgctgccgcctgccggggtggcagagtgagttgtctcaggaccccgtcactgcgacgttgacactcctctcccttcccttcctccccaactccccaaacactgtggaaggggagaaggaagtgatccacagcattcaggccacttggggtctagaccatggtggtgccagcctggggggggcagtggccctcagctctgcccgctggagcggttgagtgcagaagggtgcgcctcttccctctacccgacactgtgtgtgcgcggaggtctgctgtggggtgggggggggggtgcccggggggttggcccggggggtgggggcgggggtcgggggggggggccggccggg

SEQ ID NO: 437374 - DNA, 1070 bp, Homo sapiens
gcgcagcgcggcgcactcggcgcgcacggcgggagcggcgcgcgagtggtcgggcctggcggctggacgggcgcccctcgctgccccgcgcgctccccgccgccccccatgagcgcaccccgcgcggcccgggtccgtaggcggcggggcgccccccatgctgctgcagcccgcgccgtgcgccccgagcgcgggcttcccgcggcccctggccgcccccggcgccatgcacggctcgcagaaggacaccacgttcaccaagatcttcgtgggcggcctgccgtaccacactaccgacgcctcgctcaggaagtacttcgagggcttcggcgacatcgaggaggccgtggtcatcaccgaccgccagacgggcaagtcccgcggctacggcttcgtgaccatggccgaccgggcggcagctgagagggcttgcaaagacccgaaccccatcatcgacggccgcaaggccaacgtgaacctggcatatctgggcgccaagccgcggagcctccagacgggctttgccattggggtgcagcagctgcaccccaccttgatccagcggacttacgggctgaccccgcactacatctacccaccagccatcgtgcagcccagcgtggtgatcccagccgcccctgtcccgtcgctgtcctcgccctacattgagtacacgccggccagcccggcctacgcccagtacccaccggccacctatgaccagtacccatacgccgcctcgcctgccacggctgccagcttcgtgggctacagctaccctgccgccgtgccccaggccctctcagccgcagcacccgcgggcaccactttcgtgcagtaccaggcgccgcagctgcagcctgacaggatgcagtgaggggcgttcctgccccgaggactgtggcattgtctccctccggacctacctcagggagctgagcgtgcaggcgctccagggcaggcctgggacagagtcaaggctcagagaataaaggtagctaatctcatcataatatttttattagaatgttctgatgataaaaataaaacttgttttctttaaagaaaaa

SEQ ID NO: 437375 - DNA, 1612 bp, Homo sapiens
gtcttgctgcaggccatgctcacttccatctgctctcttttccctgcattcttcttttgtgtcacttccctgacttgtcagtacttctaattctcatagtcctgctatcccctacaacctcgtgccttagtattaatagggtacagcagggaaaaactcacttagtttccattttgttcttggagaagaaaaatttggagacatttccaaaatggcatgtacatcataattcttattgccaacatttataagaaactttgactgtagtgattatcaagatacatgcttggaatatttattccctctttccccacctttcaaaataaggatttagagcaggagttggcagggccaaatccagcctgcagcctattttggaaataaagttattgggatgctgccatccccattcactcacatactgtgcatgactgctttcatgcttccatgacagagctgagtggttgcaacagagaccgaatggcctgcaaagcctaaaatatttactttctggacccttacaggaagtttgccaacccctgatttagaaagtgaaaacctaaatggggaagtcttacatactttaacgtatcttagcaagcactgttatgttaatgtatatggacagcacttaaaatatatcaataaacaattatgatcagtaaacatttatttagagcctattgtggcccagagagtgtcctgtgctcagaggctataaataccaataacaccccatctctcccctcatggaactcagtctcaggggagaggaatatgtaaatgataagtgcaatgcaatgtgacataaataatatcaagaagaagagaatcagaaaaaaaaggagaggggactgattaattctgtcagaagtagagaaaggcttaacaagataagtgatatgtattaaattgtaggaaatgttagataaacagctttctttagtattttttgagttagaaagcaagtttttagcttggggtcagaatatttttagagaaaaagtttaaaatgtgcctaaatctgaaattctggatttaaaaaagtgaaaatctgcatgttcctctaatacctaatgacgaattctaattgcagaaggatgccaataactaaaaccacaaaatgaaccctatgtataccggtgaccttctttactcagaattaattaacacaagcacttgtttcttgcagagcactttgctgtaatttagaacaaattaagggaaaaaatcattcaagtgctgttttcttcacaccatgaagtaagcatgatggaccaaagttaactaatttaaaatattatcatccatttcttgtaattatgaatagcaataccatcttttttcttcaaaaaaaaaaaaagacatcatgatctatgctattttcaacttgtttcctgtgcttctattaatggaaattgatttttcaagattaatgtaaaatgtgtttctgtttctcccattaagtctcttatttatattagatccaatgtatatgttcctggatatttttcaaataaatatatttttaatataatacagcaaattgtaaattgttaaaggaccatttataatgttttctccttgccctccctagcactgaaactgtggt

SEQ ID NO: 437376 - DNA, 979 bp, Homo sapiens
cttcacactgttgtttgtgaattaacttgagctccttgagttcctacttctaagagattatttaaactttactttttaccttcttagtatacagagcttggtaggagctggaaacccgactcacagatttaggaaacagtgggttcttgtccctgtggacatcagaacttgggggacggagagatagagaaccagaaggcagaacaaggaaaaactcaaagaaaggaatggggaggaatggaaacgtaacaggacatgttgcctcagtgagtcaccaagggctttgggagttccttaggcccaaaatgtggttctgtggaggctgagggacaaacttcaggacagagcatgcccttaatcgatgtgcttaagccactggctcgggcagtccttaagcaagggctcctctgatcagacaaggaattgtttccttcccttttactccagatgacacctaaaggtgcaaaagaaaaccatctctgcacactaccaaacagacagtgcgtgaacgaagcagaccctcctgaccacagccaaggactggagagcttggtgaaactggtgctcaaggtagaaattccctgcgattgctactgcaacttatactaaacgtcccaagtgaagtgaagggagaaaaaagagatattaagcaagaaggcccacttgtttatgcattgctttagaagataatctgtaattgcatattaataagtaaagttaacgttacacttaaataataacctatatttgttactgcatttgaatcactcttatctgacttagttggtcaggaaatcaaaaaagtcagttaaaggaaggaatcataagaattgttttaacattagtttaaacattttattttctattagaacacataaacgtacatttatccactaatcttttggtgtagggacaatgtcattccttttaatattccttcctgttggttttatgcataaagtatatctataaggtgttg

SEQ ID NO: 437377 - DNA, 5176 bp, Homo sapiens
cccgagtgtcggttcactgtggagacagcggtggcggagtgggtctccagggctctgggctggcaaggcccccggaggggtggggcgcggaggaggctacagatccgcttccgcgcggcggggccgggtgcttgggacgcggctctgggctcccgggataaggggctcccgggacaaggggctcccggagagcccagtggttagcgatgctgctgtcgccgtcgctgctgctgctgctgctgctggggggcgccgcgggctgcgccgagggtgtggcggcggcgcttacccccgagcggctcctggagtggcaggataaaggaatatttgttatccaaagtgagagtctcaagaaatgcattcaagcaggtaaatcggttctgaccctcggtagaactggaagcaagcaagcaaacaagcacatgctgtggaaatgggtttcaaaccatggcctctttaacataggaggcagcggttgcctgggcctgaatttctccgccccagagcagccattaagcttatatgaatgtgactccaccctcgtttccttacggtggcgctgtaacaggaagatgatcacaggcccgctgcagtactctgtccaggtggcgcatgacaacacagtggtggcctcacggaagtatattcataagtggatttcttatgggtcaggtggtggagacatttgtgaatatctacacaaagatttgcatacaatcaaagggaacacccacgggatgccgtgtatgtttcccttccagtataaccatcagtggcatcatgaatgtacccgtgaaggtcgggaagatgacttactgtggtgtgccacgacaagccgttatgaaagagatgaaaagtggggattttgccctgatcccacctctgcagaagtaggttgtgatactatttgggagaaggacctcaattcacacatttgctaccagttcaacctgctttcatctctctcttggagtgaggcacattcttcatgccagatgcaaggaggtacgctgttaagtattacagatgaaactgaagaaaatttcataagggagcacatgagcagtaaaacagtggaggtgtgggttggcctcaatcagcttgatgaagacgctggctggcagtggtctgatggaacgccgctcaactatctgaattggagcccagaggtaaattttgagccatttgttgaagatcactgtggaacatttagttcatttatgccaagtgcctggaggagtcgggattgtgagtccaccttgccatatatatgtaaaaaatatctaaaccacattgatcatgaaatagttgaaaaagatgcgtggaaatattatgctacccactgtgagcctggctggaatccctacaatcgtaattgctacaaacttcagaaagaagaaaagacctggcatgaggctctgcgttcttgtcaggctgataacagtgcattaatagacataacctcattagcagaggtggagtttcttgtaaccctccttggagatgaaaatgcatcagaaacatggattggtttgagcagcaataaaattccagtttcctttgaatggtctaatgactcttcagtcatctttactaattggcacacacttgagccccacatttttccaaatagaagccagctgtgtgtctcagcagagcagtctgagggacactggaaagtcaaaaattgtgaagaaagacttttttacatttgtaaaaaagcaggccatgtcctctctgatgctgaatcaggatgtcaagagggatgggaggagacatggtggattctgttacaaaattgacacagtccttcgaagctttgaccaagcttccagcggttattactgtcctcctgcacttgtaaccattacaaacaggtttgaacaggcttttattaccagtttgatcagtagtgtggtaaaaatgaaggacagttatttttggatagctcttcaggaccaaaatgatacgggagaatacacttggaagccagtagggcagaaacccgagccggtgcagtacacacactggaacacacaccagccgcgctacagtggtggctgtgttgccatgcgaggaaggcatccacttggtcgctgggaagtgaagcactgtcggcactttaaggcaatgtccttgtgcaagcagccagttgaaaatcaggaaaaagcagagtatgaagagagatggccctttcacccctgctatttggactgggagtcagagcctggtctggccagttgcttcaaggtatttcatagtgaaaaagttctgatgaaaagaacatggagagaagctgaagcattttgcgaagaatttggagctcatcttgcaagctttgcccatattgaggaagagaattttgtgaatgagctcttacattcaaaatttaattggacagaagaaaggcagttctggattggatttaataaaagaaacccactgaatgccggctcatgggagtggtctgatagaactcctgttgtctcttcgtttttagacaacacttattttggagaagatgcaagaaactgtgctgtttataagccaaacaaaacattgctgcccttacactgtggttccaaacgtgaatggatatgcaaaatcccaagagatgtgaaacccaagattccgttctggtaccagtacgatgtaccctggctcttttatcaggatgcagaatacctttttcatacctttgcctcagaatggttgaactttgagtttgtctgtagctggctgcacagtgatcttctcacaattcattctgcacatgagcaagaattcatccacagcaaaataaaagcgctatccaagtatggtgcaagttggtggattggacttcaagaagaaagagccaatgatgaatttcgctggagagatggaacaccagtgatataccagaactgggacacaggaagagaaagaactgtgaataatcagagccagagatgtggctttatttcttctataacaggactctggggtagtgaagagtgttcagtttctatgcctagtatctgtaagcgaaaaaaggtttggctcatagagaaaaagaaagatacaccaaaacaacatggaacgtgtcccaaaggatggctatattttaactataagtgccttctgctgaatatccccaaagacccaagcagttggaagaactggacgcatgctcaacatttctgtgctgaagaaggggggaccctggtcgccattgaaagtgaggtggagcaagctttcattactatgaatctttttggccagaccaccagtgtgtggataggtttacaaaatgatgattatgaaacatggctaaatggaaagcctgtggtatattctaactggtctccatttgatataataaatattccaagtcacaataccactgaagttcagaaacacattcctctctgtgccttactctcaagtaatcctaattttcatttcactggaaaatggtattttgaagactgtggaaaggaaggctatgggtttgtttgtgaaaaaatgcaagatacttctggacacggtgtaaatacatctgatatgtatccaatgcccaataccttagaatatggaaacagaacttacaaaataattaatgcaaatatgacttggtatgcagcaataaaaacctgcctgatgcacaaagcacaactggtcagcatcacagaccagtatcaccagtccttcctcactgttgtcctcaaccggctaggatatgcccactggattggactgttcaccacagataatggtcttaattttgactggtctgatggcaccaaatcttctttcactttttggaaagatgaggagtcctccctccttggtgactgcgtttttgccgacagcaacggacgctggcatagcacagcctgcgagtcatttctgcaaggtgccatttgtcatgtgccacctgaaacaagacaatctgaacacccagagttgtgctcagaaacatctattccctggataaaatttaaaagtaattgctacagtttttctacagtcctagacagtatgagttttgaggctgctcatgaattttgcaaaaaggaaggttctaatcttttaacaatcaaggatgaggctgaaaatgcatttctcctagaagagctgtttgcttttggttcttctgtccagatggtttggttgaatgctcaatttgatggtaacagtaagtgatttgggtagaggagaggacataaataaatacatggttgttaaagctgatgataatggcatctgtgagccagaaaactctccttggatacgttttctgagaaaaaatagcatgaagcctaaagccatttcttccaaaaacaacattgcaacccttttctttacccttttgtcttttaaaataatcccagaacaccaaaaataaaaacaaacaataacatgtttatctttacccttagcaggaagatgcttggctggaactttgtgttcacagacttagtcattgcataccaaaaccatatttactggaaaatatcccaggtttctaaatgttataaaagcacaatagagttatggaaatgtttccatgatgaactgtgctgttaggattcttatttgctactcataaaaaccagagtttgtaataaaatggaagcatggtattcttttctttatgtaattgatggttattgaaaggtacttgtgaagaaaattattttaattggtatggagagcttgttacagtggtgtaccaaggttgggggtgagcctaccctttcgaggaggagtattttaatcaccaacattgtttagaatttcaagcagatggtgataataaaaagcagaccaacttttagttagctgtattgttagttttaaattattttcagacaatacactattgcccacacatgggatggactctcctaccgcccctacccccttggtacatggctggcttggtattaaagaaattcactgtaaaatctttttagaaagtgagccattttgtaatgatgaagatgttaggacttcaaaggatttttctttactcgattagttttgtttatcaaatgatttctttaaatcgattatatatatatatggaatatttcaaaattcaaactgtcacattaagaaacatgataacctaaatgacctaaataagaacactgtacctaaaataaagaggcaactttattaatgccta

SEQ ID NO: 437378 - DNA, 966 bp, Homo sapiens
agtgggtgtagttaatggcattactggatagaataaatataaaaatatcaagacaaaaattcaaggagttttaaaggagtaagagaagaaagttatgtaggtggtaaaagagtatgcaaaaatatctcttggtatttaactaaatgagattgtgtccttaatttcccttttattctttttaagggatgggaggagacatggtggattctgttacaaaattgacacagtccttcgaagctttgaccaagcttccagcggttattactgtcctcctgcacttgtaaccattacaaacaggtttgaacaggcttttattaccagtttgatcagtagtgtggtaaaaatgaaggacagttatttttggatagctcttcaggaccaaaatgatacgggagaatacacttggaagccagtagggcagaaacccgagccggtgcagtacacacactggaacacacaccagccgcgctacagtggtggctgtgttgccatgcgaggaaggcatccacttggtcgctgggaagtgaagcactgtcggcactttaaggcaatgtccttgtgcaagcagccagttgaaaatcaggaaaaagcagagtatgaagagagatggccctttcacccctgctatttggactgggagtcagagcctggtctggccagttgcttcaaggtatttcatagtgaaaaagttctgatgaaaagaacatggagagaagctgaagcattttgcgaagaatttggagctcatcttgcaagctttgcccatattgaggaagagaattttgtgaatgagctcttacattcaaaatttaattggtaaatacttgttaattatgaaaaattacagtcaaatattctatctcccagtaatggcttctgagggtgagtatcccaagtagttgtttaaaattcccatatttgtattatgcccaaagccaagaaaaataaatatacatatagttttat

SEQ ID NO: 437379 - DNA, 1188 bp, Homo sapiens
gtcttagtatgtttgataaccatgcacataattcataatgagtcagcaattttctcacagatgaaaccataaagtggtttgatggaactcccacagaccagtcaaactggggcattcggaagccagacacagactacttcaagccccatcattgtgttgccttgaggatccctgaaggattatggcagctatccccgtgtcaagaaaaaaaaggctttatatgtaaaatggaggcaggtaggtaaagtcagagagtaattcttcattttgattctaccttaactaatgttgactgacttctttagcatttaaaggttttaaaatccaagttgagagagtattcagatagattctgacattattgttgtgttctgcaccaaacaagtcagagaatagttcagctccttctttctctgatatgagaaaaaaaatcattataagtcaactcaaagactatgatttttcttgtgtcacccaggttgatcacctaatgggcaaaaaatcattttccctcaagcaaatagaactaggaatgtaaaccagcaaccttcattctggtgactgctactcagaatttttaaggtttatgtttggcctcaggaaatataatctaggcttatgtatatttgctgtagacaagaagatgtgattccctgttgcaagcataatgtgtcataaaagtcacattttaacttaatcatcagtaacatacttagtgtttagtaattaaaaaaaacaataattttagaaatctaagctagaaaattctagtcactgatggtgggaaaatgtctataataattacagcaatttctagatgtcagtattataaaggagggattgctgtggcctgtactgctagagaaggcttcagacatgaggttttaggatcccaaaggatgaagagaattatagaagctggaacagaggaggaaaaggcccagcctgattaaaggcagcaactaagaatgtgtttcaattagagcaaagggctcacgtcagggggtgatgggaataaaattggatggtaatgtaggatcctttcacagagtgccaggctaaagagctgaactttgtggtggaagagacagaccccctatgtgctctgtagacacctgtgatgaagtagaactcatgaggatatgaagagaaacatttgtaatttgagtgattaaactaggaacgaaa

SEQ ID NO: 437380 - DNA, 537 bp, Homo sapiens
ctgagcccagaagttgaaggctgcagtgagctatggttgcaccactgcactcctgcctgggcaactgaatgagaccccacctcaaaaaagtgctgttctagaaacagaggtactaagagcactttgctgtaatttagaacaaattaagggaaaaaatcattcaagtgctgttttcttcacaccatgaagtaagcatgatggaccaaagttaactaatttaaaatattatcatccatttcttgtaattatgaatagcaataccatcttttttcttcaaaaaaaaaaaaagacatcatgatctatgctattttcaacttgtttcctgtgcttctattaatggaaattgatttttcaagattaatgtaaaatgtgtttctgtttctcccattaagtctcttatttatattagatccaatgtatatgttcctggatatttttcaaataaatatatttttaatataatacagcaaattgtaaattgttaaaggaccatttataatgttttctccttgccctccctagcactgaaactgtggt

SEQ ID NO: 437381 - DNA, 649 bp, Homo sapiens
ctgagcccagaagttgaaggctgcagtgagctatggttgcaccactgcactcctgcctgggcaactgaatgagaccccacctcaaaaaagtgctgttctagaaacagaggtactaagatgacacctaaaggtgcaaaagaaaaccatctctgcacactaccaaacagacagtgcgtgaacgaagcagaccctcctgaccacagccaaggactggagagcttggtgaaactggtgctcaaggtagaaattccctgcgattgctactgcaacttatactaaacgtcccaagtgaagtgaagggagaaaaaagagatattaagcaagaaggcccacttgtttatgcattgctttagaagataatctgtaattgcatattaataagtaaagttaacgttacacttaaataataacctatatttgttactgcatttgaatcactcttatctgacttagttggtcaggaaatcaaaaaagtcagttaaaggaaggaatcataagaattgttttaacattagtttaaacattttattttctattagaacacataaacgtacatttatccactaatcttttggtgtagggacaatgtcattccttttaatattccttcctgttggttttatgcataaagtatatctataaggtgttg

SEQ ID NO: 437382 - DNA, 6101 bp, Homo sapiens
caggtagcaggctggcagctaacatgtattccccagctgggtcccacagcttttccacgggaaactcacccaaatcccttcttccagctccggggaggagagcttaggggcatatcacaaaacacctgctttctccgcctgtccatgtggcctctggtttctgccaccgtaatggtggtccgtcacctctcgtgtttcaaggtgtggtgccatagctagtggcctgggcatctacctgcttctgcctgccccacccagcaagccatctcctactaagagtctatccccatatagcaagaggtccccacctccacccttgtactcctgagaaacattgtattctgaccagtattgaatcccgtatcagatcacaaagcagcatttcactgatagcctttcggttttctataggaacttgatggtagagagtttcattcagtggctcttgattcagcagctgtgttcctaacattcaggcacttgtctgagaaagacagtgttgtcatatccattggcacccagtgtccctcccggggagccctgagtattattaccaatccctctctctaaccaattgtgtgagcacaccttctctgtcagtaacagacctgagtggattggcaggtaacccttgttcccatatggccaattaggtcttagatcagagctctcccattagctccagtaagaccttttatgcttcccaagaaactcctctgttttatgcaaatacagcccttcaggtggaccctgcccaacaactccagatctgtgggaaatggctggcaactgtcgcatatcgcacttagatatgcacactgagatcctcatgacgctagttaattatatatgaaaatttcatgccacatctttgatttttgtttcagataaaggaatatttgttatccaaagtgagagtctcaagaaatgcattcaagcaggtaaatcggttctgaccctcggtagaactggaagcaagcaagcaaacaagcacatgctgtggaaatgggtttcaaaccatggcctctttaacataggaggcagcggttgcctgggcctgaatttctccgccccagagcagccattaagcttatatgaatgtgactccaccctcgtttccttacggtggcgctgtaacaggaagatgatcacaggcccgctgcagtactctgtccaggtggcgcatgacaacacagtggtggcctcacggaagtatattcataagtggatttcttatgggtcaggtggtggagacatttgtgaatatctacacaaagatttgcatacaatcaaagggaacacccacgggatgccgtgtatgtttcccttccagtataaccatcagtggcatcatgaatgtacccgtgaaggtcgggaagatgacttactgtggtgtgccacgacaagccgttatgaaagagatgaaaagtggggattttgccctgatcccacctctgcagaagtaggttgtgatactatttgggagaaggacctcaattcacacatttgctaccagttcaacctgctttcatctctctcttggagtgaggcacattcttcatgccagatgcaaggaggtacgctgttaagtattacagatgaaactgaagaaaatttcataagggagcacatgagcagtaaaacagtggaggtgtgggttggcctcaatcagcttgatgaagacgctggctggcagtggtctgatggaacgccgctcaactatctgaattggagcccagaggtaaattttgagccatttgttgaagatcactgtggaacatttagttcatttatgccaagtgcctggaggagtcgggattgtgagtccaccttgccatatatatgtaaaaaatatctaaaccacattgatcatgaaatagttgaaaaagatgcgtggaaatattatgctacccactgtgagcctggctggaatccctacaatcgtaattgctacaaacttcagaaagaagaaaagacctggcatgaggctctgcgttcttgtcaggctgataacagtgcattaatagacataacctcattagcagaggtggagtttcttgtaaccctccttggagatgaaaatgcatcagaaacatggattggtttgagcagcaataaaattccagtttcctttgaatggtctaatgactcttcagtcatctttactaattggcacacacttgagccccacatttttccaaatagaagccagctgtgtgtctcagcagagcagtctgagggacactggaaagtcaaaaattgtgaagaaagacttttttacatttgtaaaaaagcaggccatgtcctctctgatgctgaatcaggatgtcaagagggatgggaggagacatggtggattctgttacaaaattgacacagtccttcgaagctttgaccaagcttccagcggttattactgtcctcctgcacttgtaaccattacaaacaggtttgaacaggcttttattaccagtttgatcagtagtgtggtaaaaatgaaggacagttatttttggatagctcttcaggaccaaaatgatacgggagaatacacttggaagccagtagggcagaaacccgagccggtgcagtacacacactggaacacacaccagccgcgctacagtggtggctgtgttgccatgcgaggaaggcatccacttggtcgctgggaagtgaagcactgtcggcactttaaggcaatgtccttgtgcaagcagccagttgaaaatcaggaaaaagcagagtatgaagagagatggccctttcacccctgctatttggactgggagtcagagcctggtctggccagttgcttcaaggtatttcatagtgaaaaagttctgatgaaaagaacatggagagaagctgaagcattttgcgaagaatttggagctcatcttgcaagctttgcccatattgaggaagagaattttgtgaatgagctcttacattcaaaatttaattggacagaagaaaggcagttctggattggatttaataaaagaaacccactgaatgccggctcatgggagtggtctgatagaactcctgttgtctcttcgtttttagacaacacttattttggagaagatgcaagaaactgtgctgtttataagccaaacaaaacattgctgcccttacactgtggttccaaacgtgaatggatatgcaaaatcccaagagatgtgaaacccaagattccgttctggtaccagtacgatgtaccctggctcttttatcaggatgcagaatacctttttcatacctttgcctcagaatggttgaactttgagtttgtctgtagctggctgcacagtgatcttctcacaattcattctgcacatgagcaagaattcatccacagcaaaataaaagcgctatccaagtatggtgcaagttggtggattggacttcaagaagaaagagccaatgatgaatttcgctggagagatggaacaccagtgatataccagaactgggacacaggaagagaaagaactgtgaataatcagagccagagatgtggctttatttcttctataacaggactctggggtagtgaagagtgttcagtttctatgcctagtatctgtaagcgaaaaaaggtttggctcatagagaaaaagaaagatacaccaaaacaacatggaacgtgtcccaaaggatggctatattttaactataagtgccttctgctgaatatccccaaagacccaagcagttggaagaactggacgcatgctcaacatttctgtgctgaagaaggggggaccctggtcgccattgaaagtgaggtggagcaagctttcattactatgaatctttttggccagaccaccagtgtgtggataggtttacaaaatgatgattatgaaacatggctaaatggaaagcctgtggtatattctaactggtctccatttgatataataaatattccaagtcacaataccactgaagttcagaaacacattcctctctgtgccttactctcaagtaatcctaattttcatttcactggaaaatggtattttgaagactgtggaaaggaaggctatgggtttgtttgtgaaaaaatgcaagatacttctggacacggtgtaaatacatctgatatgtatccaatgcccaataccttagaatatggaaacagaacttacaaaataattaatgcaaatatgacttggtatgcagcaataaaaacctgcctgatgcacaaagcacaactggtcagcatcacagaccagtatcaccagtccttcctcactgttgtcctcaaccggctaggatatgcccactggattggactgttcaccacagataatggtcttaattttgactggtctgatggcaccaaatcttctttcactttttggaaagatgaggagtcctccctccttggtgactgcgtttttgccgacagcaacggacgctggcatagcacagcctgcgagtcatttctgcaaggtgccatttgtcatgtgccacctgaaacaagacaatctgaacacccagagttgtgctcagaaacatctattccctggataaaatttaaaagtaattgctacagtttttctacagtcctagacagtatgagttttgaggctgctcatgaattttgcaaaaaggaaggttctaatcttttaacaatcaaggatgaggctgaaaatgcatttctcctagaagagctgtttgcttttggttcttctgtccagatggtttggttgaatgctcaatttgatggtaacaatgaaaccataaagtggtttgatggaactcccacagaccagtcaaactggggcattcggaagccagacacagactacttcaagccccatcattgtgttgccttgaggatccctgaaggattatggcagctatccccgtgtcaagaaaaaaaaggctttatatgtaaaatggaggcagatattcacactgcagaggcgctgccagaaaaaggaccaagtcacagcatcattcctcttgcggttgtactgacactgatagtcattgtggccatttgcacactttccttctgcatatacaagcataacggtggcttcttcaggagacttgcagggtttcggaatccttactatcctgcaaccaactttagtacagtatatttagaagaaaatattctcatttctgatcttgagaagagtgaccaataataatgaggtcagagaatgccacagacaccaggtatacagagcttggtaggagctggaaacccgactcacagatttaggaaacagtgggttcttgtccctgtggacatcagaacttgggggacggagagatagagaaccagaaggcagaacaaggaaaaactcaaagaaaggaatggggaggaatggaaacgtaacaggacatgttgcctcagtgagtcaccaagggctttgggagttccttaggcccaaaatgtggttctgtggaggctgagggacaaacttcaggacagagcatgcccttaatcgatgtgcttaagccactggctcgggcagtccttaagcaagggctcctctgatcagacaaggaattgtttccttcccttttactccagatgacacctaaaggtgcaaaagaaaaccatctctgcacactaccaaacagacagtgcgtgaacgaagcagaccctcctgaccacagccaaggactggagagcttggtgaaactggtgctcaaggtagaaattccctgcgattgctactgcaacttatactaaacgtcccaagtgaagtgaagggagaaaaaagagatattaagcaagaaggcccacttgtttatgcattgctttagaagataatctgtaattgcatattaataagtaaagttaacgttacacttaaataataacctatatttgttactgcatttgaatcactcttatctgacttagttggtcaggaaatcaaaaaagtcagttaaaggaaggaatcataagaattgttttaacattagtttaaacattttattttctattagaacacataaacgtacatttatccactaatcttttggtgtagggacaatgtcattccttttaatattccttcctgttggttttatgcataaagtatatctataaggtgttg

SEQ ID NO: 437383 - DNA, 3589 bp, Homo sapiens
agtgggtgtagttaatggcattactggatagaataaatataaaaatatcaagacaaaaattcaaggagttttaaaggagtaagagaagaaagttatgtaggtggtaaaagagtatgcaaaaatatctcttggtatttaactaaatgagattgtgtccttaatttcccttttattctttttaagggatgggaggagacatggtggattctgttacaaaattgacacagtccttcgaagctttgaccaagcttccagcggttattactgtcctcctgcacttgtaaccattacaaacaggtttgaacaggcttttattaccagtttgatcagtagtgtggtaaaaatgaaggacagttatttttggatagctcttcaggaccaaaatgatacgggagaatacacttggaagccagtagggcagaaacccgagccggtgcagtacacacactggaacacacaccagccgcgctacagtggtggctgtgttgccatgcgaggaaggcatccacttggtcgctgggaagtgaagcactgtcggcactttaaggcaatgtccttgtgcaagcagccagttgaaaatcaggaaaaagcagagtatgaagagagatggccctttcacccctgctatttggactgggagtcagagcctggtctggccagttgcttcaaggtatttcatagtgaaaaagttctgatgaaaagaacatggagagaagctgaagcattttgcgaagaatttggagctcatcttgcaagctttgcccatattgaggaagagaattttgtgaatgagctcttacattcaaaatttaattggacagaagaaaggcagttctggattggatttaataaaagaaacccactgaatgccggctcatgggagtggtctgatagaactcctgttgtctcttcgtttttagacaacacttattttggagaagatgcaagaaactgtgctgtttataagccaaacaaaacattgctgcccttacactgtggttccaaacgtgaatggatatgcaaaatcccaagagatgtgaaacccaagattccgttctggtaccagtacgatgtaccctggctcttttatcaggatgcagaatacctttttcatacctttgcctcagaatggttgaactttgagtttgtctgtagctggctgcacagtgatcttctcacaattcattctgcacatgagcaagaattcatccacagcaaaataaaagcgctatccaagtatggtgcaagttggtggattggacttcaagaagaaagagccaatgatgaatttcgctggagagatggaacaccagtgatataccagaactgggacacaggaagagaaagaactgtgaataatcagagccagagatgtggctttatttcttctataacaggactctggggtagtgaagagtgttcagtttctatgcctagtatctgtaagcgaaaaaaggtttggctcatagagaaaaagaaagatacaccaaaacaacatggaacgtgtcccaaaggatggctatattttaactataagtgccttctgctgaatatccccaaagacccaagcagttggaagaactggacgcatgctcaacatttctgtgctgaagaaggggggaccctggtcgccattgaaagtgaggtggagcaagctttcattactatgaatctttttggccagaccaccagtgtgtggataggtttacaaaatgatgattatgaaacatggctaaatggaaagcctgtggtatattctaactggtctccatttgatataataaatattccaagtcacaataccactgaagttcagaaacacattcctctctgtgccttactctcaagtaatcctaattttcatttcactggaaaatggtattttgaagactgtggaaaggaaggctatgggtttgtttgtgaaaaaatgcaagatacttctggacacggtgtaaatacatctgatatgtatccaatgcccaataccttagaatatggaaacagaacttacaaaataattaatgcaaatatgacttggtatgcagcaataaaaacctgcctgatgcacaaagcacaactggtcagcatcacagaccagtatcaccagtccttcctcactgttgtcctcaaccggctaggatatgcccactggattggactgttcaccacagataatggtcttaattttgactggtctgatggcaccaaatcttctttcactttttggaaagatgaggagtcctccctccttggtgactgcgtttttgccgacagcaacggacgctggcatagcacagcctgcgagtcatttctgcaaggtgccatttgtcatgtgccacctgaaacaagacaatctgaacacccagagttgtgctcagaaacatctattccctggataaaatttaaaagtaattgctacagtttttctacagtcctagacagtatgagttttgaggctgctcatgaattttgcaaaaaggaaggttctaatcttttaacaatcaaggatgaggctgaaaatgcatttctcctagaagagctgtttgcttttggttcttctgtccagatggtttggttgaatgctcaatttgatggtaacaatgaaaccataaagtggtttgatggaactcccacagaccagtcaaactggggcattcggaagccagacacagactacttcaagccccatcattgtgttgccttgaggatccctgaaggattatggcagctatccccgtgtcaagaaaaaaaaggctttatatgtaaaatggaggcagatattcacactgcagaggcgctgccagaaaaaggaccaagtcacagcatcattcctcttgcggttgtactgacactgatagtcattgtggccatttgcacactttccttctgcatatacaagcataacggtggcttcttcaggagacttgcagggtttcggaatccttactatcctgcaaccaactttagtacagtatatttagaagaaaatattctcatttctgatcttgagaagagtgaccaataataatgaggtcagagaatgccacagacaccaggatgacacctaaaggtgcaaaagaaaaccatctctgcacactaccaaacagacagtgcgtgaacgaagcagaccctcctgaccacagccaaggactggagagcttggtgaaactggtgctcaaggtagaaattccctgcgattgctactgcaacttatactaaacgtcccaagtgaagtgaagggagaaaaaagagatattaagcaagaaggcccacttgtttatgcattgctttagaagataatctgtaattgcatattaataagtaaagttaacgttacacttaaataataacctatatttgttactgcatttgaatcactcttatctgacttagttggtcaggaaatcaaaaaagtcagttaaaggaaggaatcataagaattgttttaacattagtttaaacattttattttctattagaacacataaacgtacatttatccactaatcttttggtgtagggacaatgtcattccttttaatattccttcctgttggttttatgcataaagtatatctataaggtgttg

SEQ ID NO: 437384 - DNA, 5880 bp, Homo sapiens
caggtagcaggctggcagctaacatgtattccccagctgggtcccacagcttttccacgggaaactcacccaaatcccttcttccagctccggggaggagagcttaggggcatatcacaaaacacctgctttctccgcctgtccatgtggcctctggtttctgccaccgtaatggtggtccgtcacctctcgtgtttcaaggtgtggtgccatagctagtggcctgggcatctacctgcttctgcctgccccacccagcaagccatctcctactaagagtctatccccatatagcaagaggtccccacctccacccttgtactcctgagaaacattgtattctgaccagtattgaatcccgtatcagatcacaaagcagcatttcactgatagcctttcggttttctataggaacttgatggtagagagtttcattcagtggctcttgattcagcagctgtgttcctaacattcaggcacttgtctgagaaagacagtgttgtcatatccattggcacccagtgtccctcccggggagccctgagtattattaccaatccctctctctaaccaattgtgtgagcacaccttctctgtcagtaacagacctgagtggattggcaggtaacccttgttcccatatggccaattaggtcttagatcagagctctcccattagctccagtaagaccttttatgcttcccaagaaactcctctgttttatgcaaatacagcccttcaggtggaccctgcccaacaactccagatctgtgggaaatggctggcaactgtcgcatatcgcacttagatatgcacactgagatcctcatgacgctagttaattatatatgaaaatttcatgccacatctttgatttttgtttcagataaaggaatatttgttatccaaagtgagagtctcaagaaatgcattcaagcaggtaaatcggttctgaccctcggtagaactggaagcaagcaagcaaacaagcacatgctgtggaaatgggtttcaaaccatggcctctttaacataggaggcagcggttgcctgggcctgaatttctccgccccagagcagccattaagcttatatgaatgtgactccaccctcgtttccttacggtggcgctgtaacaggaagatgatcacaggcccgctgcagtactctgtccaggtggcgcatgacaacacagtggtggcctcacggaagtatattcataagtggatttcttatgggtcaggtggtggagacatttgtgaatatctacacaaagatttgcatacaatcaaagggaacacccacgggatgccgtgtatgtttcccttccagtataaccatcagtggcatcatgaatgtacccgtgaaggtcgggaagatgacttactgtggtgtgccacgacaagccgttatgaaagagatgaaaagtggggattttgccctgatcccacctctgcagaagtaggttgtgatactatttgggagaaggacctcaattcacacatttgctaccagttcaacctgctttcatctctctcttggagtgaggcacattcttcatgccagatgcaaggaggtacgctgttaagtattacagatgaaactgaagaaaatttcataagggagcacatgagcagtaaaacagtggaggtgtgggttggcctcaatcagcttgatgaagacgctggctggcagtggtctgatggaacgccgctcaactatctgaattggagcccagaggtaaattttgagccatttgttgaagatcactgtggaacatttagttcatttatgccaagtgcctggaggagtcgggattgtgagtccaccttgccatatatatgtaaaaaatatctaaaccacattgatcatgaaatagttgaaaaagatgcgtggaaatattatgctacccactgtgagcctggctggaatccctacaatcgtaattgctacaaacttcagaaagaagaaaagacctggcatgaggctctgcgttcttgtcaggctgataacagtgcattaatagacataacctcattagcagaggtggagtttcttgtaaccctccttggagatgaaaatgcatcagaaacatggattggtttgagcagcaataaaattccagtttcctttgaatggtctaatgactcttcagtcatctttactaattggcacacacttgagccccacatttttccaaatagaagccagctgtgtgtctcagcagagcagtctgagggacactggaaagtcaaaaattgtgaagaaagacttttttacatttgtaaaaaagcaggccatgtcctctctgatgctgaatcaggatgtcaagagggatgggaggagacatggtggattctgttacaaaattgacacagtccttcgaagctttgaccaagcttccagcggttattactgtcctcctgcacttgtaaccattacaaacaggtttgaacaggcttttattaccagtttgatcagtagtgtggtaaaaatgaaggacagttatttttggatagctcttcaggaccaaaatgatacgggagaatacacttggaagccagtagggcagaaacccgagccggtgcagtacacacactggaacacacaccagccgcgctacagtggtggctgtgttgccatgcgaggaaggcatccacttggtcgctgggaagtgaagcactgtcggcactttaaggcaatgtccttgtgcaagcagccagttgaaaatcaggaaaaagcagagtatgaagagagatggccctttcacccctgctatttggactgggagtcagagcctggtctggccagttgcttcaaggtatttcatagtgaaaaagttctgatgaaaagaacatggagagaagctgaagcattttgcgaagaatttggagctcatcttgcaagctttgcccatattgaggaagagaattttgtgaatgagctcttacattcaaaatttaattggacagaagaaaggcagttctggattggatttaataaaagaaacccactgaatgccggctcatgggagtggtctgatagaactcctgttgtctcttcgtttttagacaacacttattttggagaagatgcaagaaactgtgctgtttataagccaaacaaaacattgctgcccttacactgtggttccaaacgtgaatggatatgcaaaatcccaagagatgtgaaacccaagattccgttctggtaccagtacgatgtaccctggctcttttatcaggatgcagaatacctttttcatacctttgcctcagaatggttgaactttgagtttgtctgtagctggctgcacagtgatcttctcacaattcattctgcacatgagcaagaattcatccacagcaaaataaaagcgctatccaagtatggtgcaagttggtggattggacttcaagaagaaagagccaatgatgaatttcgctggagagatggaacaccagtgatataccagaactgggacacaggaagagaaagaactgtgaataatcagagccagagatgtggctttatttcttctataacaggactctggggtagtgaagagtgttcagtttctatgcctagtatctgtaagcgaaaaaaggtttggctcatagagaaaaagaaagatacaccaaaacaacatggaacgtgtcccaaaggatggctatattttaactataagtgccttctgctgaatatccccaaagacccaagcagttggaagaactggacgcatgctcaacatttctgtgctgaagaaggggggaccctggtcgccattgaaagtgaggtggagcaagctttcattactatgaatctttttggccagaccaccagtgtgtggataggtttacaaaatgatgattatgaaacatggctaaatggaaagcctgtggtatattctaactggtctccatttgatataataaatattccaagtcacaataccactgaagttcagaaacacattcctctctgtgccttactctcaagtaatcctaattttcatttcactggaaaatggtattttgaagactgtggaaaggaaggctatgggtttgtttgtgaaaaaatgcaagatacttctggacacggtgtaaatacatctgatatgtatccaatgcccaataccttagaatatggaaacagaacttacaaaataattaatgcaaatatgacttggtatgcagcaataaaaacctgcctgatgcacaaagcacaactggtcagcatcacagaccagtatcaccagtccttcctcactgttgtcctcaaccggctaggatatgcccactggattggactgttcaccacagataatggtcttaattttgactggtctgatggcaccaaatcttctttcactttttggaaagatgaggagtcctccctccttggtgactgcgtttttgccgacagcaacggacgctggcatagcacagcctgcgagtcatttctgcaaggtgccatttgtcatgtgccacctgaaacaagacaatctgaacacccagagttgtgctcagaaacatctattccctggataaaatttaaaagtaattgctacagtttttctacagtcctagacagtatgagttttgaggctgctcatgaattttgcaaaaaggaaggttctaatcttttaacaatcaaggatgaggctgaaaatgcatttctcctagaagagctgtttgcttttggttcttctgtccagatggtttggttgaatgctcaatttgatggtaacaatgaaaccataaagtggtttgatggaactcccacagaccagtcaaactggggcattcggaagccagacacagactacttcaagccccatcattgtgttgccttgaggatccctgaaggattatggcagctatccccgtgtcaagaaaaaaaaggctttatatgtaaaatggaggcaggtaggtaaagtcagagagtaattcttcattttgattctaccttaactaatgttgactgacttctttagcatttaaaggttttaaaatccaagttgagagagtattcagatagattctgacattattgttgtgttctgcaccaaacaagtcagagaatagttcagctccttctttctctgatatgagaaaaaaaatcattataagtcaactcaaagactatgatttttcttgtgtcacccaggttgatcacctaatgggcaaaaaatcattttccctcaagcaaatagaactaggaatgtaaaccagcaaccttcattctggtgactgctactcagaatttttaaggtttatgtttggcctcaggaaatataatctaggcttatgtatatttgctgtagacaagaagatgtgattccctgttgcaagcataatgtgtcataaaagtcacattttaacttaatcatcagtaacatacttagtgtttagtaattaaaaaaaacaataattttagaaatctaagctagaaaattctagtcactgatggtgggaaaatgtctataataattacagcaatttctagatgtcagtattataaaggagggattgctgtggcctgtactgctagagaaggcttcagacatgaggttttaggatcccaaaggatgaagagaattatagaagctggaacagaggaggaaaaggcccagcctgattaaaggcagcaactaagaatgtgtttcaattagagcaaagggctcacgtcagggggtgatgggaataaaattggatggtaatgtaggatcctttcacagagtgccaggctaaagagctgaactttgtggtggaagagacagaccccctatgtgctctgtagacacctgtgatgaagtagaactcatgaggatatgaagagaaacatttgtaatttgagtgattaaactaggaacgaaa

SEQ ID NO: 437385 - DNA, 3118 bp, Homo sapiens
caggtagcaggctggcagctaacatgtattccccagctgggtcccacagcttttccacgggaaactcacccaaatcccttcttccagctccggggaggagagcttaggggcatatcacaaaacacctgctttctccgcctgtccatgtggcctctggtttctgccaccgtaatggtggtccgtcacctctcgtgtttcaaggtgtggtgccatagctagtggcctgggcatctacctgcttctgcctgccccacccagcaagccatctcctactaagagtctatccccatatagcaagaggtccccacctccacccttgtactcctgagaaacattgtattctgaccagtattgaatcccgtatcagatcacaaagcagcatttcactgatagcctttcggttttctataggaacttgatggtagagagtttcattcagtggctcttgattcagcagctgtgttcctaacattcaggcacttgtctgagaaagacagtgttgtcatatccattggcacccagtgtccctcccggggagccctgagtattattaccaatccctctctctaaccaattgtgtgagcacaccttctctgtcagtaacagacctgagtggattggcaggtaacccttgttcccatatggccaattaggtcttagatcagagctctcccattagctccagtaagaccttttatgcttcccaagaaactcctctgttttatgcaaatacagcccttcaggtggaccctgcccaacaactccagatctgtgggaaatggctggcaactgtcgcatatcgcacttagatatgcacactgagatcctcatgacgctagttaattatatatgaaaatttcatgccacatctttgatttttgtttcagataaaggaatatttgttatccaaagtgagagtctcaagaaatgcattcaagcaggtaaatcggttctgaccctcggtagaactggaagcaagcaagcaaacaagcacatgctgtggaaatgggtttcaaaccatggcctctttaacataggaggcagcggttgcctgggcctgaatttctccgccccagagcagccattaagcttatatgaatgtgactccaccctcgtttccttacggtggcgctgtaacaggaagatgatcacaggcccgctgcagtactctgtccaggtggcgcatgacaacacagtggtggcctcacggaagtatattcataagtggatttcttatgggtcaggtggtggagacatttgtgaatatctacacaaagatttgcatacaatcaaagggaacacccacgggatgccgtgtatgtttcccttccagtataaccatcagtggcatcatgaatgtacccgtgaaggtcgggaagatgacttactgtggtgtgccacgacaagccgttatgaaagagatgaaaagtggggattttgccctgatcccacctctgcagaagtaggttgtgatactatttgggagaaggacctcaattcacacatttgctaccagttcaacctgctttcatctctctcttggagtgaggcacattcttcatgccagatgcaaggaggtacgctgttaagtattacagatgaaactgaagaaaatttcataagggagcacatgagcagtaaaacagtggaggtgtgggttggcctcaatcagcttgatgaagacgctggctggcagtggtctgatggaacgccgctcaactatctgaattggagcccagaggtaaattttgagccatttgttgaagatcactgtggaacatttagttcatttatgccaagtgcctggaggagtcgggattgtgagtccaccttgccatatatatgtaaaaaatatctaaaccacattgatcatgaaatagttgaaaaagatgcgtggaaatattatgctacccactgtgagcctggctggaatccctacaatcgtaattgctacaaacttcagaaagaagaaaagacctggcatgaggctctgcgttcttgtcaggctgataacagtgcattaatagacataacctcattagcagaggtggagtttcttgtaaccctccttggagatgaaaatgcatcagaaacatggattggtttgagcagcaataaaattccagtttcctttgaatggtctaatgactcttcagtcatctttactaattggcacacacttgagccccacatttttccaaatagaagccagctgtgtgtctcagcagagcagtctgagggacactggaaagtcaaaaattgtgaagaaagacttttttacatttgtaaaaaagcaggccatgtcctctctgatgctgaatcaggatgtcaagagggatgggaggagacatggtggattctgttacaaaattgacacagtccttcgaagctttgaccaagcttccagcggttattactgtcctcctgcacttgtaaccattacaaacaggtttgaacaggcttttattaccagtttgatcagtagtgtggtaaaaatgaaggacagttatttttggatagctcttcaggaccaaaatgatacgggagaatacacttggaagccagtagggcagaaacccgagccggtgcagtacacacactggaacacacaccagccgcgctacagtggtggctgtgttgccatgcgaggaaggcatccacttggtcgctgggaagtgaagcactgtcggcactttaaggcaatgtccttgtgcaagcagccagttgaaaatcaggaaaaagcagagtatgaagagagatggccctttcacccctgctatttggactgggagtcagagcctggtctggccagttgcttcaaggtatttcatagtgaaaaagttctgatgaaaagaacatggagagaagctgaagcattttgcgaagaatttggagctcatcttgcaagctttgcccatattgaggaagagaattttgtgaatgagctcttacattcaaaatttaattggtaaatacttgttaattatgaaaaattacagtcaaatattctatctcccagtaatggcttctgagggtgagtatcccaagtagttgtttaaaattcccatatttgtattatgcccaaagccaagaaaaataaatatacatatagttttat

SEQ ID NO: 437386 - DNA, 5640 bp, Homo sapiens
  misc_feature (5026)..(5026): n is a, c, g, or t
  misc_feature (5052)..(5052): n is a, c, g, or t
  misc_feature (5240)..(5240): n is a, c, g, or t
  misc_feature (5287)..(5287): n is a, c, g, or t
  misc_feature (5403)..(5403): n is a, c, g, or t
  misc_feature (5408)..(5408): n is a, c, g, or t
  misc_feature (5428)..(5429): n is a, c, g, or t
  misc_feature (5431)..(5432): n is a, c, g, or t
  misc_feature (5443)..(5443): n is a, c, g, or t
  misc_feature (5445)..(5445): n is a, c, g, or t
  misc_feature (5455)..(5455): n is a, c, g, or t
  misc_feature (5473)..(5473): n is a, c, g, or t
  misc_feature (5505)..(5505): n is a, c, g, or t
  misc_feature (5521)..(5521): n is a, c, g, or t
  misc_feature (5538)..(5538): n is a, c, g, or t
  misc_feature (5590)..(5590): n is a, c, g, or t
cccgagtgtcggttcactgtggagacagcggtggcggagtgggtctccagggctctgggctggcaaggcccccggaggggtggggcgcggaggaggctacagatccgcttccgcgcggcggggccgggtgcttgggacgcggctctgggctcccgggataaggggctcccgggacaaggggctcccggagagcccagtggttagcgatgctgctgtcgccgtcgctgctgctgctgctgctgctggggggcgccgcgggctgcgccgagggtgtggcggcggcgcttacccccgagcggctcctggagtggcaggataaaggaatatttgttatccaaagtgagagtctcaagaaatgcattcaagcaggtaaatcggttctgaccctcggtagaactggaagcaagcaagcaaacaagcacatgctgtggaaatgggtttcaaaccatggcctctttaacataggaggcagcggttgcctgggcctgaatttctccgccccagagcagccattaagcttatatgaatgtgactccaccctcgtttccttacggtggcgctgtaacaggaagatgatcacaggcccgctgcagtactctgtccaggtggcgcatgacaacacagtggtggcctcacggaagtatattcataagtggatttcttatgggtcaggtggtggagacatttgtgaatatctacacaaagatttgcatacaatcaaagggaacacccacgggatgccgtgtatgtttcccttccagtataaccatcagtggcatcatgaatgtacccgtgaaggtcgggaagatgacttactgtggtgtgccacgacaagccgttatgaaagagatgaaaagtggggattttgccctgatcccacctctgcagaagtaggttgtgatactatttgggagaaggacctcaattcacacatttgctaccagttcaacctgctttcatctctctcttggagtgaggcacattcttcatgccagatgcaaggaggtacgctgttaagtattacagatgaaactgaagaaaatttcataagggagcacatgagcagtaaaacagtggaggtgtgggttggcctcaatcagcttgatgaagacgctggctggcagtggtctgatggaacgccgctcaactatctgaattggagcccagaggtaaattttgagccatttgttgaagatcactgtggaacatttagttcatttatgccaagtgcctggaggagtcgggattgtgagtccaccttgccatatatatgtaaaaaatatctaaaccacattgatcatgaaatagttgaaaaagatgcgtggaaatattatgctacccactgtgagcctggctggaatccctacaatcgtaattgctacaaacttcagaaagaagaaaagacctggcatgaggctctgcgttcttgtcaggctgataacagtgcattaatagacataacctcattagcagaggtggagtttcttgtaaccctccttggagatgaaaatgcatcagaaacatggattggtttgagcagcaataaaattccagtttcctttgaatggtctaatgactcttcagtcatctttactaattggcacacacttgagccccacatttttccaaatagaagccagctgtgtgtctcagcagagcagtctgagggacactggaaagtcaaaaattgtgaagaaagacttttttacatttgtaaaaaagcaggccatgtcctctctgatgctgaatcaggatgtcaagagggatgggaggagacatggtggattctgttacaaaattgacacagtccttcgaagctttgaccaagcttccagcggttattactgtcctcctgcacttgtaaccattacaaacaggtttgaacaggcttttattaccagtttgatcagtagtgtggtaaaaatgaaggacagttatttttggatagctcttcaggaccaaaatgatacgggagaatacacttggaagccagtagggcagaaacccgagccggtgcagtacacacactggaacacacaccagccgcgctacagtggtggctgtgttgccatgcgaggaaggcatccacttggtcgctgggaagtgaagcactgtcggcactttaaggcaatgtccttgtgcaagcagccagttgaaaatcaggaaaaagcagagtatgaagagagatggccctttcacccctgctatttggactgggagtcagagcctggtctggccagttgcttcaaggtatttcatagtgaaaaagttctgatgaaaagaacatggagagaagctgaagcattttgcgaagaatttggagctcatcttgcaagctttgcccatattgaggaagagaattttgtgaatgagctcttacattcaaaatttaattggacagaagaaaggcagttctggattggatttaataaaagaaacccactgaatgccggctcatgggagtggtctgatagaactcctgttgtctcttcgtttttagacaacacttattttggagaagatgcaagaaactgtgctgtttataagccaaacaaaacattgctgcccttacactgtggttccaaacgtgaatggatatgcaaaatcccaagagatgtgaaacccaagattccgttctggtaccagtacgatgtaccctggctcttttatcaggatgcagaatacctttttcatacctttgcctcagaatggttgaactttgagtttgtctgtagctggctgcacagtgatcttctcacaattcattctgcacatgagcaagaattcatccacagcaaaataaaagcgctatccaagtatggtgcaagttggtggattggacttcaagaagaaagagccaatgatgaatttcgctggagagatggaacaccagtgatataccagaactgggacacaggaagagaaagaactgtgaataatcagagccagagatgtggctttatttcttctataacaggactctggggtagtgaagagtgttcagtttctatgcctagtatctgtaagcgaaaaaaggtttggctcatagagaaaaagaaagatacaccaaaacaacatggaacgtgtcccaaaggatggctatattttaactataagtgccttctgctgaatatccccaaagacccaagcagttggaagaactggacgcatgctcaacatttctgtgctgaagaaggggggaccctggtcgccattgaaagtgaggtggagcaagctttcattactatgaatctttttggccagaccaccagtgtgtggataggtttacaaaatgatgattatgaaacatggctaaatggaaagcctgtggtatattctaactggtctccatttgatataataaatattccaagtcacaataccactgaagttcagaaacacattcctctctgtgccttactctcaagtaatcctaattttcatttcactggaaaatggtattttgaagactgtggaaaggaaggctatgggtttgtttgtgaaaaaatgcaagatacttctggacacggtgtaaatacatctgatatgtatccaatgcccaataccttagaatatggaaacagaacttacaaaataattaatgcaaatatgacttggtatgcagcaataaaaacctgcctgatgcacaaagcacaactggtcagcatcacagaccagtatcaccagtccttcctcactgttgtcctcaaccggctaggatatgcccactggattggactgttcaccacagataatggtcttaattttgactggtctgatggcaccaaatcttctttcactttttggaaagatgaggagtcctccctccttggtgactgcgtttttgccgacagcaacggacgctggcatagcacagcctgcgagtcatttctgcaaggtgccatttgtcatgtgccacctgaaacaagacaatctgaacacccagagttgtgctcagaaacatctattccctggataaaatttaaaagtaattgctacagtttttctacagtcctagacagtatgagttttgaggctgctcatgaattttgcaaaaaggaaggttctaatcttttaacaatcaaggatgaggctgaaaatgcatttctcctagaagagctgtttgcttttggttcttctgtccagatggtttggttgaatgctcaatttgatggtaacaatgaaaccataaagtggtttgatggaactcccacagaccagtcaaactggggcattcggaagccagacacagactacttcaagccccatcattgtgttgccttgaggatccctgaaggattatggcagctatccccgtgtcaagaaaaaaaaggctttatatgtaaaatggaggcagatattcacactgcagaggcgctgccagaaaaaggaccaagtcacagcatcattcctcttgcggttgtactgacactgatagtcattgtggccatttgcacactttccttctgcatatacaagcataacggtggcttcttcaggagacttgcagggtttcggaatccttactatcctgcaaccaactttagtacagtatatttagaagaaaatattctcatttctgatcttgagaagagtgaccaataataatgaggtcagagaatgccacagacaccaggaccagggtaagtaaagaagactaaacaggagtctcatctgtctttccctttacagcacagatgccattagaatgtgaattgggtcactattttaattattcttgaagtgattactggttttgaatcttaaccaaatcagatgggttttgatttattcatttccctaaactgtgatccattcttaaaaggggtaaattatgcattggttatttttcagaaagacaagaactattaaaagaaactccctattgaaaactctgaaatcaatgcgaataatagtttttgcattaatgtatctctactaaaatttgggggaattttaaaactaatctggtatctattcagacatttacctgcactcgtaccattaagaaagacagaaagaagcnaaaaaaaattaatcttgtatatgagnggaaaaggaaagggcttctgagaggattcttagttgtttcttttgaattccttttaatagcaggatttggaaaatactaatttctgtgcttaagggtcacaggttctgggctctcaactgatatttaaggtgacattcatttttattaggtctaacatctcaagctaaaggagaaagaaaaatacctncttttaaatggcaaagaccttcattagcagcacacttttataaacanccatatagttaaaatgtggccttaaactttcaattactaaatgatgattaagttggatattttaaaatgtcttatacataagcttaaagtaatatattgaaactttaacagttgtnctgtnaaaactcatggactttctgnnannctaaatatatnanataatatgtnacactcttaataactggnagatataaaatgtaacttggatttaaaggagnagagctaaagatctgnattatagtctcattagnaccagacagatgttgttgagaagtactaaataaattagtaatctagatatcnttattatgtaaatgagtttaggtgttctatttaataaactattttctgga

SEQ ID NO: 437387 - DNA, 5741 bp, Homo sapiens
caggtagcaggctggcagctaacatgtattccccagctgggtcccacagcttttccacgggaaactcacccaaatcccttcttccagctccggggaggagagcttaggggcatatcacaaaacacctgctttctccgcctgtccatgtggcctctggtttctgccaccgtaatggtggtccgtcacctctcgtgtttcaaggtgtggtgccatagctagtggcctgggcatctacctgcttctgcctgccccacccagcaagccatctcctactaagagtctatccccatatagcaagaggtccccacctccacccttgtactcctgagaaacattgtattctgaccagtattgaatcccgtatcagatcacaaagcagcatttcactgatagcctttcggttttctataggaacttgatggtagagagtttcattcagtggctcttgattcagcagctgtgttcctaacattcaggcacttgtctgagaaagacagtgttgtcatatccattggcacccagtgtccctcccggggagccctgagtattattaccaatccctctctctaaccaattgtgtgagcacaccttctctgtcagtaacagacctgagtggattggcaggtaacccttgttcccatatggccaattaggtcttagatcagagctctcccattagctccagtaagaccttttatgcttcccaagaaactcctctgttttatgcaaatacagcccttcaggtggaccctgcccaacaactccagatctgtgggaaatggctggcaactgtcgcatatcgcacttagatatgcacactgagatcctcatgacgctagttaattatatatgaaaatttcatgccacatctttgatttttgtttcagataaaggaatatttgttatccaaagtgagagtctcaagaaatgcattcaagcaggtaaatcggttctgaccctcggtagaactggaagcaagcaagcaaacaagcacatgctgtggaaatgggtttcaaaccatggcctctttaacataggaggcagcggttgcctgggcctgaatttctccgccccagagcagccattaagcttatatgaatgtgactccaccctcgtttccttacggtggcgctgtaacaggaagatgatcacaggcccgctgcagtactctgtccaggtggcgcatgacaacacagtggtggcctcacggaagtatattcataagtggatttcttatgggtcaggtggtggagacatttgtgaatatctacacaaagatttgcatacaatcaaagggaacacccacgggatgccgtgtatgtttcccttccagtataaccatcagtggcatcatgaatgtacccgtgaaggtcgggaagatgacttactgtggtgtgccacgacaagccgttatgaaagagatgaaaagtggggattttgccctgatcccacctctgcagaagtaggttgtgatactatttgggagaaggacctcaattcacacatttgctaccagttcaacctgctttcatctctctcttggagtgaggcacattcttcatgccagatgcaaggaggtacgctgttaagtattacagatgaaactgaagaaaatttcataagggagcacatgagcagtaaaacagtggaggtgtgggttggcctcaatcagcttgatgaagacgctggctggcagtggtctgatggaacgccgctcaactatctgaattggagcccagaggtaaattttgagccatttgttgaagatcactgtggaacatttagttcatttatgccaagtgcctggaggagtcgggattgtgagtccaccttgccatatatatgtaaaaaatatctaaaccacattgatcatgaaatagttgaaaaagatgcgtggaaatattatgctacccactgtgagcctggctggaatccctacaatcgtaattgctacaaacttcagaaagaagaaaagacctggcatgaggctctgcgttcttgtcaggctgataacagtgcattaatagacataacctcattagcagaggtggagtttcttgtaaccctccttggagatgaaaatgcatcagaaacatggattggtttgagcagcaataaaattccagtttcctttgaatggtctaatgactcttcagtcatctttactaattggcacacacttgagccccacatttttccaaatagaagccagctgtgtgtctcagcagagcagtctgagggacactggaaagtcaaaaattgtgaagaaagacttttttacatttgtaaaaaagcaggccatgtcctctctgatgctgaatcaggatgtcaagagggatgggaggagacatggtggattctgttacaaaattgacacagtccttcgaagctttgaccaagcttccagcggttattactgtcctcctgcacttgtaaccattacaaacaggtttgaacaggcttttattaccagtttgatcagtagtgtggtaaaaatgaaggacagttatttttggatagctcttcaggaccaaaatgatacgggagaatacacttggaagccagtagggcagaaacccgagccggtgcagtacacacactggaacacacaccagccgcgctacagtggtggctgtgttgccatgcgaggaaggcatccacttggtcgctgggaagtgaagcactgtcggcactttaaggcaatgtccttgtgcaagcagccagttgaaaatcaggaaaaagcagagtatgaagagagatggccctttcacccctgctatttggactgggagtcagagcctggtctggccagttgcttcaaggtatttcatagtgaaaaagttctgatgaaaagaacatggagagaagctgaagcattttgcgaagaatttggagctcatcttgcaagctttgcccatattgaggaagagaattttgtgaatgagctcttacattcaaaatttaattggacagaagaaaggcagttctggattggatttaataaaagaaacccactgaatgccggctcatgggagtggtctgatagaactcctgttgtctcttcgtttttagacaacacttattttggagaagatgcaagaaactgtgctgtttataagccaaacaaaacattgctgcccttacactgtggttccaaacgtgaatggatatgcaaaatcccaagagatgtgaaacccaagattccgttctggtaccagtacgatgtaccctggctcttttatcaggatgcagaatacctttttcatacctttgcctcagaatggttgaactttgagtttgtctgtagctggctgcacagtgatcttctcacaattcattctgcacatgagcaagaattcatccacagcaaaataaaagcgctatccaagtatggtgcaagttggtggattggacttcaagaagaaagagccaatgatgaatttcgctggagagatggaacaccagtgatataccagaactgggacacaggaagagaaagaactgtgaataatcagagccagagatgtggctttatttcttctataacaggactctggggtagtgaagagtgttcagtttctatgcctagtatctgtaagcgaaaaaaggtttggctcatagagaaaaagaaagatacaccaaaacaacatggaacgtgtcccaaaggatggctatattttaactataagtgccttctgctgaatatccccaaagacccaagcagttggaagaactggacgcatgctcaacatttctgtgctgaagaaggggggaccctggtcgccattgaaagtgaggtggagcaagctttcattactatgaatctttttggccagaccaccagtgtgtggataggtttacaaaatgatgattatgaaacatggctaaatggaaagcctgtggtatattctaactggtctccatttgatataataaatattccaagtcacaataccactgaagttcagaaacacattcctctctgtgccttactctcaagtaatcctaattttcatttcactggaaaatggtattttgaagactgtggaaaggaaggctatgggtttgtttgtgaaaaaatgcaagatacttctggacacggtgtaaatacatctgatatgtatccaatgcccaataccttagaatatggaaacagaacttacaaaataattaatgcaaatatgacttggtatgcagcaataaaaacctgcctgatgcacaaagcacaactggtcagcatcacagaccagtatcaccagtccttcctcactgttgtcctcaaccggctaggatatgcccactggattggactgttcaccacagataatggtcttaattttgactggtctgatggcaccaaatcttctttcactttttggaaagatgaggagtcctccctccttggtgactgcgtttttgccgacagcaacggacgctggcatagcacagcctgcgagtcatttctgcaaggtgccatttgtcatgtgccacctgaaacaagacaatctgaacacccagagttgtgctcagaaacatctattccctggataaaatttaaaagtaattgctacagtttttctacagtcctagacagtatgagttttgaggctgctcatgaattttgcaaaaaggaaggttctaatcttttaacaatcaaggatgaggctgaaaatgcatttctcctagaagagctgtttgcttttggttcttctgtccagatggtttggttgaatgctcaatttgatggtaacaatgaaaccataaagtggtttgatggaactcccacagaccagtcaaactggggcattcggaagccagacacagactacttcaagccccatcattgtgttgccttgaggatccctgaaggattatggcagctatccccgtgtcaagaaaaaaaaggctttatatgtaaaatggaggcagatattcacactgcagaggcgctgccagaaaaaggaccaagtcacagcatcattcctcttgcggttgtactgacactgatagtcattgtggccatttgcacactttccttctgcatatacaagcataacggtggcttcttcaggagacttgcagggtttcggaatccttactatcctgcaaccaactttagtacagtatatttagaagaaaatattctcatttctgatcttgagaagagtgaccaataataatgaggtcagagaatgccacagacaccaggatgacacctaaaggtgcaaaagaaaaccatctctgcacactaccaaacagacagtgcgtgaacgaagcagaccctcctgaccacagccaaggactggagagcttggtgaaactggtgctcaaggtagaaattccctgcgattgctactgcaacttatactaaacgtcccaagtgaagtgaagggagaaaaaagagatattaagcaagaaggcccacttgtttatgcattgctttagaagataatctgtaattgcatattaataagtaaagttaacgttacacttaaataataacctatatttgttactgcatttgaatcactcttatctgacttagttggtcaggaaatcaaaaaagtcagttaaaggaaggaatcataagaattgttttaacattagtttaaacattttattttctattagaacacataaacgtacatttatccactaatcttttggtgtagggacaatgtcattccttttaatattccttcctgttggttttatgcataaagtatatctataaggtgttg

SEQ ID NO: 437388 - DNA, 4176 bp, Homo sapiens
gttgttcaaaggcctctgacacaggtgtctctatcggccatcttgctgccatccctcctctccttacttctttgtaccttcactagctcatccggaaaatgaaatactgaggttcatttgatcctagatctaaatctagatcatagattagacccttctcaactctgaagatctagaattccatgatatatgtcattttgtatatttctgtttttcccatttttaaagtaatcatattaatggcaatttacataagctgtaataagtaatgttaaaataattgtggaaaatgacattgttttttgttggtttaaaaagaaaaagatgcgtggaaatattatgctacccactgtgagcctggctggaatccctacaatcgtaattgctacaaacttcagaaagaagaaaagacctggcatgaggctctgcgttcttgtcaggctgataacagtgcattaatagacataacctcattagcagaggtggagtttcttgtaaccctccttggagatgaaaatgcatcagaaacatggattggtttgagcagcaataaaattccagtttcctttgaatggtctaatgactcttcagtcatctttactaattggcacacacttgagccccacatttttccaaatagaagccagctgtgtgtctcagcagagcagtctgagggacactggaaagtcaaaaattgtgaagaaagacttttttacatttgtaaaaaagcaggccatgtcctctctgatgctgaatcaggatgtcaagagggatgggaggagacatggtggattctgttacaaaattgacacagtccttcgaagctttgaccaagcttccagcggttattactgtcctcctgcacttgtaaccattacaaacaggtttgaacaggcttttattaccagtttgatcagtagtgtggtaaaaatgaaggacagttatttttggatagctcttcaggaccaaaatgatacgggagaatacacttggaagccagtagggcagaaacccgagccggtgcagtacacacactggaacacacaccagccgcgctacagtggtggctgtgttgccatgcgaggaaggcatccacttggtcgctgggaagtgaagcactgtcggcactttaaggcaatgtccttgtgcaagcagccagttgaaaatcaggaaaaagcagagtatgaagagagatggccctttcacccctgctatttggactgggagtcagagcctggtctggccagttgcttcaaggtatttcatagtgaaaaagttctgatgaaaagaacatggagagaagctgaagcattttgcgaagaatttggagctcatcttgcaagctttgcccatattgaggaagagaattttgtgaatgagctcttacattcaaaatttaattggacagaagaaaggcagttctggattggatttaataaaagaaacccactgaatgccggctcatgggagtggtctgatagaactcctgttgtctcttcgtttttagacaacacttattttggagaagatgcaagaaactgtgctgtttataagccaaacaaaacattgctgcccttacactgtggttccaaacgtgaatggatatgcaaaatcccaagagatgtgaaacccaagattccgttctggtaccagtacgatgtaccctggctcttttatcaggatgcagaatacctttttcatacctttgcctcagaatggttgaactttgagtttgtctgtagctggctgcacagtgatcttctcacaattcattctgcacatgagcaagaattcatccacagcaaaataaaagcgctatccaagtatggtgcaagttggtggattggacttcaagaagaaagagccaatgatgaatttcgctggagagatggaacaccagtgatataccagaactgggacacaggaagagaaagaactgtgaataatcagagccagagatgtggctttatttcttctataacaggactctggggtagtgaagagtgttcagtttctatgcctagtatctgtaagcgaaaaaaggtttggctcatagagaaaaagaaagatacaccaaaacaacatggaacgtgtcccaaaggatggctatattttaactataagtgccttctgctgaatatccccaaagacccaagcagttggaagaactggacgcatgctcaacatttctgtgctgaagaaggggggaccctggtcgccattgaaagtgaggtggagcaagctttcattactatgaatctttttggccagaccaccagtgtgtggataggtttacaaaatgatgattatgaaacatggctaaatggaaagcctgtggtatattctaactggtctccatttgatataataaatattccaagtcacaataccactgaagttcagaaacacattcctctctgtgccttactctcaagtaatcctaattttcatttcactggaaaatggtattttgaagactgtggaaaggaaggctatgggtttgtttgtgaaaaaatgcaagatacttctggacacggtgtaaatacatctgatatgtatccaatgcccaataccttagaatatggaaacagaacttacaaaataattaatgcaaatatgacttggtatgcagcaataaaaacctgcctgatgcacaaagcacaactggtcagcatcacagaccagtatcaccagtccttcctcactgttgtcctcaaccggctaggatatgcccactggattggactgttcaccacagataatggtcttaattttgactggtctgatggcaccaaatcttctttcactttttggaaagatgaggagtcctccctccttggtgactgcgtttttgccgacagcaacggacgctggcatagcacagcctgcgagtcatttctgcaaggtgccatttgtcatgtgccacctgaaacaagacaatctgaacacccagagttgtgctcagaaacatctattccctggataaaatttaaaagtaattgctacagtttttctacagtcctagacagtatgagttttgaggctgctcatgaattttgcaaaaaggaaggttctaatcttttaacaatcaaggatgaggctgaaaatgcatttctcctagaagagctgtttgcttttggttcttctgtccagatggtttggttgaatgctcaatttgatggtaacaatgaaaccataaagtggtttgatggaactcccacagaccagtcaaactggggcattcggaagccagacacagactacttcaagccccatcattgtgttgccttgaggatccctgaaggattatggcagctatccccgtgtcaagaaaaaaaaggctttatatgtaaaatggaggcagatattcacactgcagaggcgctgccagaaaaaggaccaagtcacagcatcattcctcttgcggttgtactgacactgatagtcattgtggccatttgcacactttccttctgcatatacaagcataacggtggcttcttcaggagacttgcagggtttcggaatccttactatcctgcaaccaactttagtacagtatatttagaagaaaatattctcatttctgatcttgagaagagtgaccaataataatgaggtcagagaatgccacagacaccaggatgacacctaaaggtgcaaaagaaaaccatctctgcacactaccaaacagacagtgcgtgaacgaagcagaccctcctgaccacagccaaggactggagagcttggtgaaactggtgctcaaggtagaaattccctgcgattgctactgcaacttatactaaacgtcccaagtgaagtgaagggagaaaaaagagatattaagcaagaaggcccacttgtttatgcattgctttagaagataatctgtaattgcatattaataagtaaagttaacgttacacttaaataataacctatatttgttactgcatttgaatcactcttatctgacttagttggtcaggaaatcaaaaaagtcagttaaaggaaggaatcataagaattgttttaacattagtttaaacattttattttctattagaacacataaacgtacatttatccactaatcttttggtgtagggacaatgtcattccttttaatattccttcctgttggttttatgcataaagtatatctataaggtgttg

SEQ ID NO: 437389 - DNA, 1273 bp, Homo sapiens
aaatcataactggcttttcttcacagaaacaagacaatctgaacacccagagttgtgctcagaaacatctattccctggataaaatttaaaagtaattgctacagtttttctacagtcctagacagtatgagttttgaggctgctcatgaattttgcaaaaaggaaggttctaatcttttaacaatcaaggatgaggctgaaaatgcatttctcctagaagagctgtttgcttttggttcttctgtccagatggtttggttgaatgctcaatttgatggtaacaatgaaaccataaagtggtttgatggaactcccacagaccagtcaaactggggcattcggaagccagacacagactacttcaagccccatcattgtgttgccttgaggatccctgaaggattatggcagctatccccgtgtcaagaaaaaaaaggctttatatgtaaaatggaggcagatattcacactgcagaggcgctgccagaaaaaggaccaagtcacagcatcattcctcttgcggttgtactgacactgatagtcattgtggccatttgcacactttccttctgcatatacaagcataacggtggcttcttcaggagacttgcagggtttcggaatccttactatcctgcaaccaactttagtacagtatatttagaagaaaatattctcatttctgatcttgagaagagtgaccaataataatgaggtcagagaatgccacagacaccaggatgacacctaaaggtgcaaaagaaaaccatctctgcacactaccaaacagacagtgcgtgaacgaagcagaccctcctgaccacagccaaggactggagagcttggtgaaactggtgctcaaggtagaaattccctgcgattgctactgcaacttatactaaacgtcccaagtgaagtgaagggagaaaaaagagatattaagcaagaaggcccacttgtttatgcattgctttagaagataatctgtaattgcatattaataagtaaagttaacgttacacttaaataataacctatatttgttactgcatttgaatcactcttatctgacttagttggtcaggaaatcaaaaaagtcagttaaaggaaggaatcataagaattgttttaacattagtttaaacattttattttctattagaacacataaacgtacatttatccactaatcttttggtgtagggacaatgtcattccttttaatattccttcctgttggttttatgcataaagtatatctataaggtgttg

SEQ ID NO: 437390 - DNA, 3403 bp, Homo sapiens
caggtagcaggctggcagctaacatgtattccccagctgggtcccacagcttttccacgggaaactcacccaaatcccttcttccagctccggggaggagagcttaggggcatatcacaaaacacctgctttctccgcctgtccatgtggcctctggtttctgccaccgtaatggtggtccgtcacctctcgtgtttcaaggtgtggtgccatagctagtggcctgggcatctacctgcttctgcctgccccacccagcaagccatctcctactaagagtctatccccatatagcaagaggtccccacctccacccttgtactcctgagaaacattgtattctgaccagtattgaatcccgtatcagatcacaaagcagcatttcactgatagcctttcggttttctataggaacttgatggtagagagtttcattcagtggctcttgattcagcagctgtgttcctaacattcaggcacttgtctgagaaagacagtgttgtcatatccattggcacccagtgtccctcccggggagccctgagtattattaccaatccctctctctaaccaattgtgtgagcacaccttctctgtcagtaacagacctgagtggattggcaggtaacccttgttcccatatggccaattaggtcttagatcagagctctcccattagctccagtaagaccttttatgcttcccaagaaactcctctgttttatgcaaatacagcccttcaggtggaccctgcccaacaactccagatctgtgggaaatggctggcaactgtcgcatatcgcacttagatatgcacactgagatcctcatgacgctagttaattatatatgaaaatttcatgccacatctttgatttttgtttcagataaaggaatatttgttatccaaagtgagagtctcaagaaatgcattcaagcaggtaaatcggttctgaccctcggtagaactggaagcaagcaagcaaacaagcacatgctgtggaaatgggtttcaaaccatggcctctttaacataggaggcagcggttgcctgggcctgaatttctccgccccagagcagccattaagcttatatgaatgtgactccaccctcgtttccttacggtggcgctgtaacaggaagatgatcacaggcccgctgcagtactctgtccaggtggcgcatgacaacacagtggtggcctcacggaagtatattcataagtggatttcttatgggtcaggtggtggagacatttgtgaatatctacacaaagatttgcatacaatcaaagggaacacccacgggatgccgtgtatgtttcccttccagtataaccatcagtggcatcatgaatgtacccgtgaaggtcgggaagatgacttactgtggtgtgccacgacaagccgttatgaaagagatgaaaagtggggattttgccctgatcccacctctgcagaagtaggttgtgatactatttgggagaaggacctcaattcacacatttgctaccagttcaacctgctttcatctctctcttggagtgaggcacattcttcatgccagatgcaaggaggtacgctgttaagtattacagatgaaactgaagaaaatttcataagggagcacatgagcagtaaaacagtggaggtgtgggttggcctcaatcagcttgatgaagacgctggctggcagtggtctgatggaacgccgctcaactatctgaattggagcccagaggtaaattttgagccatttgttgaagatcactgtggaacatttagttcatttatgccaagtgcctggaggagtcgggattgtgagtccaccttgccatatatatgtaaaaaatatctaaaccacattgatcatgaaatagttgaaaaagatgcgtggaaatattatgctacccactgtgagcctggctggaatccctacaatcgtaattgctacaaacttcagaaagaagaaaagacctggcatgaggctctgcgttcttgtcaggctgataacagtgcattaatagacataacctcattagcagaggtggagtttcttgtaaccctccttggagatgaaaatgcatcagaaacatggattggtttgagcagcaataaaattccagtttcctttgaatggtctaatgactcttcagtcatctttactaattggcacacacttgagccccacatttttccaaatagaagccagctgtgtgtctcagcagagcagtctgagggacactggaaagtcaaaaattgtgaagaaagacttttttacatttgtaaaaaagcaggccatgtcctctctgatgctgaatcaggatgtcaagagggatgggaggagacatggtggattctgttacaaaattgacacagtccttcgaagctttgaccaagcttccagcggttattactgtcctcctgcacttgtaaccattacaaacaggtttgaacaggcttttattaccagtttgatcagtagtgtggtaaaaatgaaggacagttatttttggatagctcttcaggaccaaaatgatacgggagaatacacttggaagccagtagggcagaaacccgagccggtgcagtacacacactggaacacacaccagccgcgctacagtggtggctgtgttgccatgcgaggaaggcatccacttggtcgctgggaagtgaagcactgtcggcactttaaggcaatgtccttgtgcaagcagccagttgaaaatcaggaaaaagcagagtatgaagagagatggccctttcacccctgctatttggactgggagtcagagcctggtctggccagttgcttcaaggtatttcatagtgaaaaagttctgatgaaaagaacatggagagaagctgaagcattttgcgaagaatttggagctcatcttgcaagctttgcccatattgaggaagagaattttgtgaatgagctcttacattcaaaatttaattggacagaagaaaggcagttctggattggatttaataaaagaaacccactgaatgccggctcatgggagtggtctgatagaactcctgttgtctcttcgtttttagacaacacttattttggagaagatgcaagaaactgtgctgtttataagccaaacaaaacattgctgcccttacactgtggttccaaacgtgaatggatatgcaaaatcccaagagatgtgaaacccaagattccgttctggtaccagtacgatgtaccctggctcttttatcaggatgcagaatacctttttcatacctttgcctcagaatggttgaactttgagtttgtctgtagctggctgcacagtgatcttctcacaattcattctgcacatgagcaagaattcatccacagcaaaataaaagcggtacttgaacataactcaccacg

SEQ ID NO: 437391 - DNA, 1536 bp, Homo sapiens
agttgttgttgaggtggcgcggcgctaagatggcggcggcggcggcggcggccgtggcgggggtggggcgcggtggcggtggcgcggagccacggcaggagcggagccgggcccggggctgggccggcgtcgaacgcagcgaaggccggaggatggaaccaggtgaggagctggaagaggagggctctccaggtggccgtgaggatggcttcaccgccgagcacctggctgcagaggccatggcagctgacatggacccctggctagtgtttgatgcccgcacaacgcctgccactgagctggatgcctggctggccaagtacccaccatcccaagttacccgctatggggaccccggttcacccaactcagagcctgtgggctggattgcagtgtatgggcagggctacagccccaactccggggacgtgcagggcctgcaggcagcctgggaagctctgcagaccagtgggcggcccatcacaccgggtaccctgcgccagctcgccatcacccaccacgtgctctcgggcaagtggcttatgcatctggcaccgggcttcaagctggaccacgcctgggctggcattgcccgggccgtggttgaaggccggcttcaggtggccaaggtgagcccacgtgccaaggagggtgggcgccaggtcatctgtgtttacacggacgacttcacggaccgcttgggtgtactggaggcggattcagccatccgtgcagcgggcattaagtgcctgctcacctacaagcctgatgtctacacctacctgggcatctaccgggccaatcgctggcacctctgccccactctctatgagagccgtttccagcttgggggtagtgcccgtggctcccgagtgcttgaccgtgccaacaacgtggaactgacctagaggggccaaattggggagactgcccactcccccctccatgctggggttggatcctcctgtcttcctccttgtcccatgaaggccacaccccccagctctggggactcctaggtcacttgggaactacctgcatcttcagtccccttgaacttctgccctctgttcagggctgacacaagccccacaggctggggggctccggttccctgagggatgagccttcagcctccctttgtaatgctgctcctctccactgcccagcaccatgagttgggtgcagacacctagaaggagagacttcttggaacgctcatcccccgctatacctccccttcctcctgcatctccccttctttccttccccctcaggagagagaaaacttagtgcttccagcccttcttggagccttcatggtccaggggtaggggccccactggcctgagcatgccattttgaggggagggtagttgtgcctacttatcccctggcagaggggatgccaggaccatggacatgaggcttgcccatccctgccaacttacacagcctgtaccactgtccccccttccttggctactttgacatgtgcctgctcctggcatttcaataaaacccggcttgggtctg

SEQ ID NO: 437392 - DNA, 1565 bp, Homo sapiens
agttgttgttgaggtggcgcggcgctaagatggcggcggcggcggcggcggccgtggcgggggtggggcgcggtggcggtggcgcggagccacggcaggagcggagccgggcccggggctgggccggcgtcgaacgcagcgaaggccggaggatggaaccaggtgaggagctggaagaggagggctctccaggtggccgtgaggatggcttcaccgccgagcacctggctgcagaggccatggcagctgacatggacccctggctagtgtttgatgcccgcacaacgcctgccactgagctggatgcctggctggccaagtacccaccatcccaagttacccgctatggggaccccggttcacccaactcagagcctgtgggctggattgcagtgtatgggcagggctacagccccaactccggggacgtgcagggcctgcaggcagcctgggaagctctgcagaccagtgggcggcccatcacaccgggtaccctgcgccagctcgccatcacccaccacgtgctctcgggcaagtggcttatgcatctggcaccgggcttcaagctggaccacgcctgggctggcattgcccgggccgtggttgaaggccggcttcaggtggccaaggtgagcccacgtgccaaggagggtgggcgccaggtcatctgtgtttacacggacgacttcacggaccgcttgggtgtactggaggcggattcagccatccgtgcagcgggcattaagtgcctgctcacctacaagcctgatgtctacacctacctgggcatctaccgggccaatcgctggcacctctgccccactctctatgagagccgtttccagcttgggggtagtgcccgtggctcccgagtgcttgaccgtgccaacaacgtggaactgacctagaggggccaaattggggagactgcccactcccccctccatgctggggttggatcctcctgtcttcctccttgtcccatgaaggccacaccccccagctctggggactcctaggtcacttgggaactacctgcatcttcagtccccttgaacttctgccctctgttcagggctgacacaagccccacaggctggggggctccggttccctgagggatgagccttcagcctccctttgtaatgctgctcctctccactgcccagcaccatgagttgggtgcagacacctagaaggagagacttcttggaacgctcatcccccgctatacctccccttcctcctgcatctccccttctttccttccccctcaggagagagaaaacttagtgcttccagcccttcttggagccttcatggtccaggggtaggggccccactggcctgagcatgccattttgaggggagggtagttgtgcctacttatcccctggcagaggggatgccaggaccatggacatgaggcttgcccatccctgccaacttacacagcctgtaccactgtccccccttccttggctactttgacatgtgcctgctcctggcatttcaataaaacccggcttgggtctgtgtcttgagtgttttttaaaaaaaaaaat

SEQ ID NO: 437393 - DNA, 2028 bp, Homo sapiens
  misc_feature (1545)..(1545): n is a, c, g, or t
  misc_feature (1548)..(1548): n is a, c, g, or t
  misc_feature (1550)..(1550): n is a, c, g, or t
  misc_feature (1561)..(1561): n is a, c, g, or t
  misc_feature (1572)..(1572): n is a, c, g, or t
  misc_feature (1574)..(1575): n is a, c, g, or t
agttgttgttgaggtggcgcggcgctaagatggcggcggcggcggcggcggccgtggcgggggtggggcgcggtggcggtggcgcggagccacggcaggagcggagccgggcccggggctgggccggcgtcgaacgcagcgaaggccggaggatggaaccaggtgaggagctggaagaggagggctctccaggtggccgtgaggatggcttcaccgccgagcacctggctgcagaggccatggcagctgacatggacccctggctagtgtttgatgcccgcacaacgcctgccactgagctggatgcctggctggccaagtacccaccatcccaagttacccgctatggggaccccggttcacccaactcagagcctgtgggctggattgcagtgtatgggcagggctacagccccaactccggggacgtgcagggcctgcaggcagcctgggaagctctgcagaccagtgggcggcccatcacaccgggtaccctgcgccagctcgccatcacccaccacgtgctctcgggcaagtggcttatgcatctggcaccgggcttcaagctggaccacgcctgggctggcattgcccgggccgtggttgaaggccggcttcaggtggccaaggtgagcccacgtgccaaggagggtgggcgccaggtcatctgtgtttacacggacgacttcacggaccgcttgggtgtactggaggcggattcagccatccgtgcagcgggcattaagtgcctgctcacctacaagcctgatgtctacacctacctgggcatctaccgggccaatcgctggcacctctgccccactctctatgagagccgtttccagcttgggggtagtgcccgtggctcccgagtgcttgaccgtgccaacaacgtggaactgacctagaggggccaaattggggagactgcccactcccccctccatgctggggttggatcctcctgtcttcctccttgtcccatgaaggccacaccccccagctctggggactcctaggtcacttgggaactacctgcatcttcagtccccttgaacttctgccctctgttcagggctgacacaagccccacaggctggggggctccggttccctgagggatgagccttcagcctccctttgtaatgctgctcctctccactgcccagcaccatgagttgggtgcagacacctagaaggagagacttcttggaacgctcatcccccgctatacctccccttcctcctgcatctccccttctttccttccccctcaggagagagaaaacttagtgcttccagcccttcttggagccttcatggtccaggggtaggggccccactggcctgagcatgccattttgaggggagggtagttgtgcctacttatcccctggcagaggggatgccaggaccatggacatgaggcttgcccatccctgccaacttacacagcctgtaccactgtccccccttccttggctactttgacatgtgcctgctcctggcatttcaataaaacccggcttgggtctgaaaaaaaanaananaaaaaacaaanaaacaaaacanannaaaacaacaaagaaagcaacacaacaagaaggaaacaaaaatacacaccaaacagcaaacgcagaaaaaaaggaggggggggcaccgaaaaaaagaacacaacccgcagggaggagcaacaacatgcaagcacggaccacgacacaaactgagcagagaagacgagccgaccataaaagcgacggaagatcaacacagcaccacgcaccgaggccacacagacaacaacacggagcgacgaggcagcaaaacaacgcacacgcgaagcataaatcgcgagcaagacccccccacactcagcggtgagcaagaaagacagaaacaaccacaacacacaaaaaatagcacccgccaacacacccaacacccacaaaacgagtgctcggagcacacaaccgacggcagcgcagcacgaccacccccccacacagccacaactaacagagcgacaaa

SEQ ID NO: 437394 - DNA, 698 bp, Homo sapiens
  misc_feature (17)..(17): n is a, c, g, or t
tcagctcggtcctgccnaagcgtagtacccaactgacctagaggggccaaattggggagactgcccactcccccctccatgctggggttggatcctcctgtcttcctccttgtcccatgaaggccacaccccccagctctggggactcctaggtcacttgggaactacctgcatcttcagtccccttgaacttctgccctctgttcagggctgacacaagccccacaggctggggggctccggttccctgagggatgagccttcagcctccctttgtaatgctgctcctctccactgcccagcaccatgagttgggtgcagacacctagaaggagagacttcttggaacgctcatcccccgctatacctccccttcctcctgcatctccccttctttccttccccctcaggagagagaaaacttagtgcttccagcccttcttggagccttcatggtccaggggtaggggccccactggcctgagcatgccattttgaggggagggtagttgtgcctacttatcccctggcagaggggatgccaggaccatggacatgaggcttgcccatccctgccaacttacacagcctgtaccactgtccccccttccttggctactttgacatgtgcctgctcctggcatttcaataaaacccggcttgggtctgtgtcttgagtgttttttaaaaaaaaaaat

SEQ ID NO: 437395 - DNA, 450 bp, Homo sapiens
tagaatcgagctctgtaccgctcgataagggccaaatgcgtctccactgcccagcaccatgagttgggtgcagacacctagaaggagagacttcttggaacgctcatcccccgctatacctccccttcctcctgcatctccccttctttccttccccctcaggagagagaaaacttagtgcttccagcccttcttggagccttcatggtccaggggtaggggccccactggcctgagcatgccattttgaggggagggtagttgtgcctacttatcccctggcagaggggatgccaggaccatggacatgaggcttgcccatccctgccaacttacacagcctgtaccactgtccccccttccttggctactttgacatgtgcctgctcctggcatttcaataaaacccggcttgggtctgtgtcttgagtgttttttaaaaaaaaaaat

SEQ ID NO: 437396 - DNA, 717 bp, Homo sapiens
agttgttgttgaggtggcgcggcgctaagatggcggcggcggcggcggcggccgtggcgggggtggggcgcggtggcggtggcgcggagccacggcaggagcggagccgggcccggggctgggccggcgtcgaacgcagcgaaggccggaggatggaaccaggtgaggagctggaagaggagggctctccaggtggccgtgaggatggcttcaccgccgagcacctggctgcagaggccatggcagctgacatggacccctggctagtgtttgatgcccgcacaacgcctgccactgagctggatgcctggctggccaagtacccaccatcccaagttacccgctatggggaccccggttcacccaactcagagcctgtgggctggattgcagtgtatgggcagggctacagccccaactccggggacgtgcagggcctgcaggcagcctgggaagctctgcagaccagtgggcggcccatcacaccgggtaccctgcgccagctcgccatcacccaccacgtgctctcgggcaagtggcttatgcatctggcaccgggcttcaagctggaccacgcctgggctggcattgcccgggccgtggttgaaggccggcttcaggtggccaaggtgagcccacgtaccactgtccccccttccttggctactttgacatgtgcctgctcctggcatttcaataaaacccggcttgggtctg

SEQ ID NO: 437397 - DNA, 1530 bp, Homo sapiens
caggaacagttgttatcccattgtaaagatgaggcaactgaggcgcatcgacagtaactcttactcaaggccacagtttaatccagtgcctggcatctgtagttattgtctcagaccctgccctgactcggttccctcacagcaggatggaaccaggtgaggagctggaagaggagggctctccaggtggccgtgaggatggcttcaccgccgagcacctggctgcagaggccatggcagctgacatggacccctggctagtgtttgatgcccgcacaacgcctgccactgagctggatgcctggctggccaagtacccaccatcccaagttacccgctatggggaccccggttcacccaactcagagcctgtgggctggattgcagtgtatgggcagggctacagccccaactccggggacgtgcagggcctgcaggcagcctgggaagctctgcagaccagtgggcggcccatcacaccgggtaccctgcgccagctcgccatcacccaccacgtgctctcgggcaagtggcttatgcatctggcaccgggcttcaagctggaccacgcctgggctggcattgcccgggccgtggttgaaggccggcttcaggtggccaaggtgagcccacgtgccaaggagggtgggcgccaggtcatctgtgtttacacggacgacttcacggaccgcttgggtgtactggaggcggattcagccatccgtgcagcgggcattaagtgcctgctcacctacaagcctgatgtctacacctacctgggcatctaccgggccaatcgctggcacctctgccccactctctatgagagccgtttccagcttgggggtagtgcccgtggctcccgagtgcttgaccgtgccaacaacgtggaactgacctagaggggccaaattggggagactgcccactcccccctccatgctggggttggatcctcctgtcttcctccttgtcccatgaaggccacaccccccagctctggggactcctaggtcacttgggaactacctgcatcttcagtccccttgaacttctgccctctgttcagggctgacacaagccccacaggctggggggctccggttccctgagggatgagccttcagcctccctttgtaatgctgctcctctccactgcccagcaccatgagttgggtgcagacacctagaaggagagacttcttggaacgctcatcccccgctatacctccccttcctcctgcatctccccttctttccttccccctcaggagagagaaaacttagtgcttccagcccttcttggagccttcatggtccaggggtaggggccccactggcctgagcatgccattttgaggggagggtagttgtgcctacttatcccctggcagaggggatgccaggaccatggacatgaggcttgcccatccctgccaacttacacagcctgtaccactgtccccccttccttggctactttgacatgtgcctgctcctggcatttcaataaaacccggcttgggtctg

SEQ ID NO: 437398 - DNA, 1559 bp, Homo sapiens
caggaacagttgttatcccattgtaaagatgaggcaactgaggcgcatcgacagtaactcttactcaaggccacagtttaatccagtgcctggcatctgtagttattgtctcagaccctgccctgactcggttccctcacagcaggatggaaccaggtgaggagctggaagaggagggctctccaggtggccgtgaggatggcttcaccgccgagcacctggctgcagaggccatggcagctgacatggacccctggctagtgtttgatgcccgcacaacgcctgccactgagctggatgcctggctggccaagtacccaccatcccaagttacccgctatggggaccccggttcacccaactcagagcctgtgggctggattgcagtgtatgggcagggctacagccccaactccggggacgtgcagggcctgcaggcagcctgggaagctctgcagaccagtgggcggcccatcacaccgggtaccctgcgccagctcgccatcacccaccacgtgctctcgggcaagtggcttatgcatctggcaccgggcttcaagctggaccacgcctgggctggcattgcccgggccgtggttgaaggccggcttcaggtggccaaggtgagcccacgtgccaaggagggtgggcgccaggtcatctgtgtttacacggacgacttcacggaccgcttgggtgtactggaggcggattcagccatccgtgcagcgggcattaagtgcctgctcacctacaagcctgatgtctacacctacctgggcatctaccgggccaatcgctggcacctctgccccactctctatgagagccgtttccagcttgggggtagtgcccgtggctcccgagtgcttgaccgtgccaacaacgtggaactgacctagaggggccaaattggggagactgcccactcccccctccatgctggggttggatcctcctgtcttcctccttgtcccatgaaggccacaccccccagctctggggactcctaggtcacttgggaactacctgcatcttcagtccccttgaacttctgccctctgttcagggctgacacaagccccacaggctggggggctccggttccctgagggatgagccttcagcctccctttgtaatgctgctcctctccactgcccagcaccatgagttgggtgcagacacctagaaggagagacttcttggaacgctcatcccccgctatacctccccttcctcctgcatctccccttctttccttccccctcaggagagagaaaacttagtgcttccagcccttcttggagccttcatggtccaggggtaggggccccactggcctgagcatgccattttgaggggagggtagttgtgcctacttatcccctggcagaggggatgccaggaccatggacatgaggcttgcccatccctgccaacttacacagcctgtaccactgtccccccttccttggctactttgacatgtgcctgctcctggcatttcaataaaacccggcttgggtctgtgtcttgagtgttttttaaaaaaaaaaat

SEQ ID NO: 437399 - DNA, 925 bp, Homo sapiens
ggacgcgtgggtccggacgcgtgggtcgacccacgcggtggacgacttcacggaccgcttgggtgtactggaggcggattcagccatccgtgcagcgggcattaagtgcctgctcacctacaagcctgatgtctacacctacctgggcatctaccgggccaatcgctggcacctctgccccactctctatgagagccgtttccagcttgggggtagtgcccgtggctcccgagtgcttgaccgtgccaacaacgtggaactgacctagaggggccaaattggggagactgcccactcccccctccatgctggggttggatcctcctgtcttcctccttgtcccatgaaggccacaccccccagctctggggactcctaggtcacttgggaactacctgcatcttcagtccccttgaacttctgccctctgttcagggctgacacaagccccacaggctggggggctccggttccctgagggatgagccttcagcctccctttgtaatgctgctcctctccactgcccagcaccatgagttgggtgcagacacctagaaggagagacttcttggaacgctcatcccccgctatacctccccttcctcctgcatctccccttctttccttccccctcaggagagagaaaacttagtgcttccagcccttcttggagccttcatggtccaggggtaggggccccactggcctgagcatgccattttgaggggagggtagttgtgcctacttatcccctggcagaggggatgccaggaccatggacatgaggcttgcccatccctgccaacttacacagcctgtaccactgtccccccttccttggctactttgacatgtgcctgctcctggcatttcaataaaacccggcttgggtctgtgtcttgagtgttttttaaaaaaaaaaat

SEQ ID NO: 437400 - DNA, 138 bp, Homo sapiens
gcggccgcctactactactactgctcgaattcaagcttctaacgatgtacggggacatggctgtttaaaaaatttaatgttcaaacagttatcactgatgcttttgcactatttattaataaaatcatatattgtgta

SEQ ID NO: 437401 - DNA, 2123 bp, Homo sapiens
acctgggaagaggcggagaacaatatggcggatggcgaggagccggagaagaaaagaaggagaatagaggagctgctggctgagaaaatggctgttgatggtgggtgtggggacactggagactgggaaggtcgctggaaccatgtaaagaagttcctcgagcgatctggacccttcacacaccctgatttcgaaccgagcactgaatctctccagttcttgttagatacatgtaaagttctagtcattggagctggcggcttaggatgtgagctcctgaaaaatctggccttgtctggttttagacagattcatgttatagatatggacactatagatgtttccaatctaaataggcagtttttatttaggcctaaagatattggaagacctaaggctgaagttgctgcagaatttctaaatgacagagttcctaattgcaatgtagttccacatttcaacaagattcaagattttaacgacactttctatcgacaatttcatattattgtatgtggactggactctatcatcgccagaagatggataaatggcatgctgatatctcttctaaattatgaagatggtgtcttagatccaagctccattgtccctttgatagatggggggacagaaggttttaaaggaaatgcccgggtgattctgcctggaatgactgcttgtatcgaatgcacgctggaactttatccaccacaggttaattttcccatgtgcaccattgcatctatgcccaggctaccagaacactgtattgagtatgtaaggatgttgcagtggcctaaggagcagccttttggagaaggggttccattagatggagatgatcctgaacatatacaatggattttccaaaaatccctagagagagcatcacaatataatattaggggtgttacgtataggctcactcaaggggtagtaaaaagaatcattcctgcagtagcttccacaaatgcagtcattgcagctgtgtgtgccactgaggtttttaaaatagccacaagtgcatacattcccttgaataattacttggtgtttaatgatgtagatgggctgtatacatacacatttgaagcagaaagaaaggaaaactgcccagcttgtagccagcttcctcaaaatattcagttttctccatcagctaaactacaggaggttttggattatctaaccaatagtgcttctctgcaaatgaaatctccagccatcacagccaccctagagggaaaaaatagaacactttacttacagtcggtaacctctattgaagaacgaacaaggccaaatctctccaaaacattgaaagaattggggcttgttgatggacaagaactggcggttgctgatgtcaccaccccacagactgtactattcaaacttcattttacttcttaaggaaaatctccacataatagaaaactcatggaaataatatactttgtggatgctaagaagttgaatcgatgtcatttttagcaatagtgttgccacgatttgtctttttttatataatgaaccactcttttttaactttgtaaccttcccttgaagacagaattttggtgttggtgcttgtaagcattttcattaataatatgagaaatgatacctggagagagagattatgagcaaatgtattgcttcttttagaggaggaagcatacaacctcttttgtgtgaattttgttattatggtcaaagaatgcattcctaagttttcatttgagtacccaaatacacaaaaggtgtccctttaaggaaaataaagaattaagttttaaataacattacattttacaatctgacatctggagtatattgaacataggctatttcttgatataacactcatttaattgtggccatccaaatgaatattattgcagaatttatcttgttcataatgatttgtaaatggtgttatagctgaatacctgtgcatgaaaatgggcaatattttcatctgtttacttgtagtgccatagaggccaatatgcacaatattaactaatgccaagacatggctgtttaaaaaatttaatgttcaaacagttatcactgatgcttttgcactatttattaataaaatcatatattgtgta

SEQ ID NO: 437402 - DNA, 2081 bp, Homo sapiens
acctgggaagaggcggagaacaatatggcggatggcgaggagccaatggctgttgatggtgggtgtggggacactggagactgggaaggtcgctggaaccatgtaaagaagttcctcgagcgatctggacccttcacacaccctgatttcgaaccgagcactgaatctctccagttcttgttagatacatgtaaagttctagtcattggagctggcggcttaggatgtgagctcctgaaaaatctggccttgtctggttttagacagattcatgttatagatatggacactatagatgtttccaatctaaataggcagtttttatttaggcctaaagatattggaagacctaaggctgaagttgctgcagaatttctaaatgacagagttcctaattgcaatgtagttccacatttcaacaagattcaagattttaacgacactttctatcgacaatttcatattattgtatgtggactggactctatcatcgccagaagatggataaatggcatgctgatatctcttctaaattatgaagatggtgtcttagatccaagctccattgtccctttgatagatggggggacagaaggttttaaaggaaatgcccgggtgattctgcctggaatgactgcttgtatcgaatgcacgctggaactttatccaccacaggttaattttcccatgtgcaccattgcatctatgcccaggctaccagaacactgtattgagtatgtaaggatgttgcagtggcctaaggagcagccttttggagaaggggttccattagatggagatgatcctgaacatatacaatggattttccaaaaatccctagagagagcatcacaatataatattaggggtgttacgtataggctcactcaaggggtagtaaaaagaatcattcctgcagtagcttccacaaatgcagtcattgcagctgtgtgtgccactgaggtttttaaaatagccacaagtgcatacattcccttgaataattacttggtgtttaatgatgtagatgggctgtatacatacacatttgaagcagaaagaaaggaaaactgcccagcttgtagccagcttcctcaaaatattcagttttctccatcagctaaactacaggaggttttggattatctaaccaatagtgcttctctgcaaatgaaatctccagccatcacagccaccctagagggaaaaaatagaacactttacttacagtcggtaacctctattgaagaacgaacaaggccaaatctctccaaaacattgaaagaattggggcttgttgatggacaagaactggcggttgctgatgtcaccaccccacagactgtactattcaaacttcattttacttcttaaggaaaatctccacataatagaaaactcatggaaataatatactttgtggatgctaagaagttgaatcgatgtcatttttagcaatagtgttgccacgatttgtctttttttatataatgaaccactcttttttaactttgtaaccttcccttgaagacagaattttggtgttggtgcttgtaagcattttcattaataatatgagaaatgatacctggagagagagattatgagcaaatgtattgcttcttttagaggaggaagcatacaacctcttttgtgtgaattttgttattatggtcaaagaatgcattcctaagttttcatttgagtacccaaatacacaaaaggtgtccctttaaggaaaataaagaattaagttttaaataacattacattttacaatctgacatctggagtatattgaacataggctatttcttgatataacactcatttaattgtggccatccaaatgaatattattgcagaatttatcttgttcataatgatttgtaaatggtgttatagctgaatacctgtgcatgaaaatgggcaatattttcatctgtttacttgtagtgccatagaggccaatatgcacaatattaactaatgccaagacatggctgtttaaaaaatttaatgttcaaacagttatcactgatgcttttgcactatttattaataaaatcatatattgtgta

SEQ ID NO: 437403 - DNA, 745 bp, Homo sapiens
  misc_feature (712)..(712): n is a, c, g, or t
  misc_feature (728)..(728): n is a, c, g, or t
acctgggaagaggcggagaacaatatggcggatggcgaggagccggagaagaaaagaaggagaatagaggagctgctggctgagaaaatggctgttgatggtgggtgtggggacactggagactgggaaggtcgctggaaccatgtaaagaagttcctcgagcgatctggacccttcacacaccctgatttcgaaccgagcactgaatctctccagttcttgttagatacatgtaaagttctagtcattggagctggcggcttaggatgtgagctcctgaaaaatctgactatagatgtttccaatctaaataggcagtttttatttaggcctaaagatattggaagacctaaggctgaagttgctgcagaatttctaaatgacagagttcctaattgcaatgtagttccacatttcaacaagattcaagattttaacgacactttctatcgacaatttcatattattgtatgtggactggactctatcatcgccagaagatggataaatggcatgctgatatctcttctaaattatgaagatggtgtcttagatccaagctccattgtccctttgatagatggggggacagaaggttttaaaggaaatgcccgggtgattctgcctggaatgactgcttgtatcgaatgcacgctggaactttatccaccacaggtaatttccatgtgaccattgattattccagcttccnacactgattagagttncgatgtggggccgtcct

SEQ ID NO: 437404 - DNA, 929 bp, Homo sapiens
cagtgttttttttgtaaataccaaatgtagagaagtcaatttctcacataatagaccaatatcctaagttgaaccttggattgctttaggaaaccaaaaacatgtagactgatttatttcatccattgggtgaaataaaaatagaaacgtgcagttcttaactttaaatgaattgtataataggcaagaaaaaatttcaaagcataaacataatcacattgaatattttcctttttatttgagcaggtctggtgtggttaccttttcatttggggataccataatagttgtaggtgtggtttttttcatactgatctttgcagctgaatttactgtgttctgtgcagaatggctgttgatggtgggtgtggggacactggagactgggaaggtcgctggaaccatgtaaagaagttcctcgagcgatctggacccttcacacaccctgatttcgaaccgagcactgaaagtgagaaacgtttatttttaaataactgctctaatagttttatgtttcaaaactaatagaatgcttcttttttaatttgctcttacaatgaaaatactaataaaattgttttgtgaaactaaatttttcttaaaatatgagattgaatattcacaactgattttgtttgaatatttgagtcttaacatttctcatgtaatataagttgaaaatttttgtgagaaaaatctaacttcatgacctcatgtaaaaatttaaaatgctttctgaaacatactccccttttgtagtgctactgtgagaaattaattttgataggagtataggtgtgcttacttaaattttgaaatttagttggaatgaacatcttagctttgagtataattaattgcatgttaagaattatgtaagtactaaataatagaggcgtagaatttggactgatagtgtctatcttaag

SEQ ID NO: 437405 - DNA, 668 bp, Homo sapiens
  misc_feature (613)..(613): n is a, c, g, or t
cagtgttttttttgtaaataccaaatgtagagaagtcaatttctcacataatagaccaatatcctaagttgaaccttggattgctttaggaaaccaaaaacatgtagactgatttatttcatccattgggtgaaataaaaatagaaacgtgcagttcttaactttaaatgaattgtataataggcaagaaaaaatttcaaagcataaacataatcacattgaatattttcctttttatttgagcaggtctggtgtggttaccttttcatttggggataccataatagttgtaggtgtggtttttttcatactgatctttgcagctgaatttactgtgttctgtgcagaatggctgttgatggtgggtgtggggacactggagactgggaaggtcgctggaaccatgtaaagaagttcctcgagcgatctggacccttcacacaccctgatttcgaaccgagcactgaagtcgatagaaagtgtcgttaaaatcttgaatcttgttgaaatgtggaactacattgcaattaggaactctgtcatttagaaattctgcagcaacttcagccttaggtcttccaatatctttaggcctaaataaaaactgcctatntagattggaaacatctatagtgtccatatctataacatgaatctgtctaaaacca

SEQ ID NO: 437406 - DNA, 454 bp, Homo sapiens
acctgggaagaggcggagaacaatatggcggatggcgaggagccggagaagaaaagaaggagaatagaggagctgctggctgagaagttagtgctgccgggaggccggggccctctccggggacccccgcctccccccaccccaggcctaggggaccagccgcagcgggcccggggggctgggagggggacacccggagcgcaggccgcgctgcctcatcccctgatccccgccccgcagccccgggggcctggcgggccgctcccggtatctgcccggtgcgggcgtcggggccaggctgtactgccccagctcctgcaggggccctccggggtgcttgacgtaaaggtcttgaggaaggacccttgtgcactcctcttcctccatcccaaattgtcagagcagtgaccctgtgaaaaggcaatctaccttaaacacacaggaaaaggacaca

SEQ ID NO: 437407 - DNA, 2079 bp, Homo sapiens
acctgggaagaggcggagaacaatatggcggatggcgaggagccggagaagaaaagaaggagaatagaggagctgctggctgagaaaatggctgttgatggtgggtgtggggacactggagactgggaaggtcgctggaaccatgtaaagaagttcctcgagcgatctggacccttcacacaccctgatttcgaaccgagcactgaatctctccagttcttgttagatacatgtaaagttctagtcattggagctggcggcttaggatgtgagctcctgaaaaatctggccttgtctggttttagacagattcatgttatagatatggacactatagatgtttccaatctaaataggcagtttttatttaggcctaaagatattggaagacctaaggctgaagttgctgcagaatttctaaatgacagagttcctaattgcaatgtagttccacatttcaacaagattcaagattttaacgacactttctatcgacaatttcatattattgtatgtggactggactctatcatcgccagaagatggataaatggcatgctgatatctcttctaaattatgaagatggtgtcttagatccaagctccattgtccctttgatagatggggggacagaaggttttaaaggaaatgcccgggtgattctgcctggaatgactgcttgtatcgaatgcacgctggaactttatccaccacaggttaattttcccatgtgcaccattgcatctatgcccaggctaccagaacactgtattgagtatgtaaggatgttgcagtggcctaaggagcagccttttggagaaggggttccattagatggagatgatcctgaacatatacaatggattttccaaaaatccctagagagagcatcacaatataatattaggggtgttacgtataggctcactcaaggggtagtaaaaagaatcattcctgcagtagcttccacaaatgcagtcattgcagctgtgtgtgccactgaggtttttaaaatagccacaagatgggctgtatacatacacatttgaagcagaaagaaaggaaaactgcccagcttgtagccagcttcctcaaaatattcagttttctccatcagctaaactacaggaggttttggattatctaaccaatagtgcttctctgcaaatgaaatctccagccatcacagccaccctagagggaaaaaatagaacactttacttacagtcggtaacctctattgaagaacgaacaaggccaaatctctccaaaacattgaaagaattggggcttgttgatggacaagaactggcggttgctgatgtcaccaccccacagactgtactattcaaacttcattttacttcttaaggaaaatctccacataatagaaaactcatggaaataatatactttgtggatgctaagaagttgaatcgatgtcatttttagcaatagtgttgccacgatttgtctttttttatataatgaaccactcttttttaactttgtaaccttcccttgaagacagaattttggtgttggtgcttgtaagcattttcattaataatatgagaaatgatacctggagagagagattatgagcaaatgtattgcttcttttagaggaggaagcatacaacctcttttgtgtgaattttgttattatggtcaaagaatgcattcctaagttttcatttgagtacccaaatacacaaaaggtgtccctttaaggaaaataaagaattaagttttaaataacattacattttacaatctgacatctggagtatattgaacataggctatttcttgatataacactcatttaattgtggccatccaaatgaatattattgcagaatttatcttgttcataatgatttgtaaatggtgttatagctgaatacctgtgcatgaaaatgggcaatattttcatctgtttacttgtagtgccatagaggccaatatgcacaatattaactaatgccaagacatggctgtttaaaaaatttaatgttcaaacagttatcactgatgcttttgcactatttattaataaaatcatatattgtgta

SEQ ID NO: 437408 - DNA, 2042 bp, Homo sapiens
acctgggaagaggcggagaacaatatggcggatggcgaggagccggagaagaaaagaaggagaatagaggagctgctggctgagaaaatggctgttgatggtgggtgtggggacactggagactgggaaggtcgctggaaccatgtaaagaagttcctcgagcgatctggacccttcacacaccctgatttcgaaccgagcactgaagccttgtctggttttagacagattcatgttatagatatggacactatagatgtttccaatctaaataggcagtttttatttaggcctaaagatattggaagacctaaggctgaagttgctgcagaatttctaaatgacagagttcctaattgcaatgtagttccacatttcaacaagattcaagattttaacgacactttctatcgacaatttcatattattgtatgtggactggactctatcatcgccagaagatggataaatggcatgctgatatctcttctaaattatgaagatggtgtcttagatccaagctccattgtccctttgatagatggggggacagaaggttttaaaggaaatgcccgggtgattctgcctggaatgactgcttgtatcgaatgcacgctggaactttatccaccacaggttaattttcccatgtgcaccattgcatctatgcccaggctaccagaacactgtattgagtatgtaaggatgttgcagtggcctaaggagcagccttttggagaaggggttccattagatggagatgatcctgaacatatacaatggattttccaaaaatccctagagagagcatcacaatataatattaggggtgttacgtataggctcactcaaggggtagtaaaaagaatcattcctgcagtagcttccacaaatgcagtcattgcagctgtgtgtgccactgaggtttttaaaatagccacaagtgcatacattcccttgaataattacttggtgtttaatgatgtagatgggctgtatacatacacatttgaagcagaaagaaaggaaaactgcccagcttgtagccagcttcctcaaaatattcagttttctccatcagctaaactacaggaggttttggattatctaaccaatagtgcttctctgcaaatgaaatctccagccatcacagccaccctagagggaaaaaatagaacactttacttacagtcggtaacctctattgaagaacgaacaaggccaaatctctccaaaacattgaaagaattggggcttgttgatggacaagaactggcggttgctgatgtcaccaccccacagactgtactattcaaacttcattttacttcttaaggaaaatctccacataatagaaaactcatggaaataatatactttgtggatgctaagaagttgaatcgatgtcatttttagcaatagtgttgccacgatttgtctttttttatataatgaaccactcttttttaactttgtaaccttcccttgaagacagaattttggtgttggtgcttgtaagcattttcattaataatatgagaaatgatacctggagagagagattatgagcaaatgtattgcttcttttagaggaggaagcatacaacctcttttgtgtgaattttgttattatggtcaaagaatgcattcctaagttttcatttgagtacccaaatacacaaaaggtgtccctttaaggaaaataaagaattaagttttaaataacattacattttacaatctgacatctggagtatattgaacataggctatttcttgatataacactcatttaattgtggccatccaaatgaatattattgcagaatttatcttgttcataatgatttgtaaatggtgttatagctgaatacctgtgcatgaaaatgggcaatattttcatctgtttacttgtagtgccatagaggccaatatgcacaatattaactaatgccaagacatggctgtttaaaaaatttaatgttcaaacagttatcactgatgcttttgcactatttattaataaaatcatatattgtgta

SEQ ID NO: 437409 - DNA, 2081 bp, Homo sapiens
acctgggaagaggcggagaacaatatggcggatggcgaggagccggagaagaaaagaaggagaatagaggagctgctggctgagaaaatggctgttgatggtgggtgtggggacactggagactgggaaggtcgctggaaccatgtaaagaagttcctcgagcgatctggacccttcacacaccctgatttcgaaccgagcactgaatctctccagttcttgttagatacatgtaaagttctagtcattggagctggcggcttaggatgtgagctcctgaaaaatctgactatagatgtttccaatctaaataggcagtttttatttaggcctaaagatattggaagacctaaggctgaagttgctgcagaatttctaaatgacagagttcctaattgcaatgtagttccacatttcaacaagattcaagattttaacgacactttctatcgacaatttcatattattgtatgtggactggactctatcatcgccagaagatggataaatggcatgctgatatctcttctaaattatgaagatggtgtcttagatccaagctccattgtccctttgatagatggggggacagaaggttttaaaggaaatgcccgggtgattctgcctggaatgactgcttgtatcgaatgcacgctggaactttatccaccacaggttaattttcccatgtgcaccattgcatctatgcccaggctaccagaacactgtattgagtatgtaaggatgttgcagtggcctaaggagcagccttttggagaaggggttccattagatggagatgatcctgaacatatacaatggattttccaaaaatccctagagagagcatcacaatataatattaggggtgttacgtataggctcactcaaggggtagtaaaaagaatcattcctgcagtagcttccacaaatgcagtcattgcagctgtgtgtgccactgaggtttttaaaatagccacaagtgcatacattcccttgaataattacttggtgtttaatgatgtagatgggctgtatacatacacatttgaagcagaaagaaaggaaaactgcccagcttgtagccagcttcctcaaaatattcagttttctccatcagctaaactacaggaggttttggattatctaaccaatagtgcttctctgcaaatgaaatctccagccatcacagccaccctagagggaaaaaatagaacactttacttacagtcggtaacctctattgaagaacgaacaaggccaaatctctccaaaacattgaaagaattggggcttgttgatggacaagaactggcggttgctgatgtcaccaccccacagactgtactattcaaacttcattttacttcttaaggaaaatctccacataatagaaaactcatggaaataatatactttgtggatgctaagaagttgaatcgatgtcatttttagcaatagtgttgccacgatttgtctttttttatataatgaaccactcttttttaactttgtaaccttcccttgaagacagaattttggtgttggtgcttgtaagcattttcattaataatatgagaaatgatacctggagagagagattatgagcaaatgtattgcttcttttagaggaggaagcatacaacctcttttgtgtgaattttgttattatggtcaaagaatgcattcctaagttttcatttgagtacccaaatacacaaaaggtgtccctttaaggaaaataaagaattaagttttaaataacattacattttacaatctgacatctggagtatattgaacataggctatttcttgatataacactcatttaattgtggccatccaaatgaatattattgcagaatttatcttgttcataatgatttgtaaatggtgttatagctgaatacctgtgcatgaaaatgggcaatattttcatctgtttacttgtagtgccatagaggccaatatgcacaatattaactaatgccaagacatggctgtttaaaaaatttaatgttcaaacagttatcactgatgcttttgcactatttattaataaaatcatatattgtgta

SEQ ID NO: 437410 - DNA, 2079 bp, Homo sapiens
acctgggaagaggcggagaacaatatggcggatggcgaggagccggagaagaaaagaaggagaatagaggagctgctggctgagaaaatggctgttgatggtgggtgtggggacactggagactgggaaggtcgctggaaccatgtaaagaagttcctcgagcgatctggacccttcacacaccctgatttcgaaccgagcactgaatctctccagttcttgttagatacatgtaaagttctagtcattggagctggcggcttaggatgtgagctcctgaaaaatctggccttgtctggttttagacagattcatgttatagatatggacactatagatgtttccaatctaaataggcagtttttatttaggcctaaagatattggaagacctaaggctgaagttgctgcagaatttctaaatgacagagttcctaattgcaatgtagttccaatttcatattattgtatgtggactggactctatcatcgccagaagatggataaatggcatgctgatatctcttctaaattatgaagatggtgtcttagatccaagctccattgtccctttgatagatggggggacagaaggttttaaaggaaatgcccgggtgattctgcctggaatgactgcttgtatcgaatgcacgctggaactttatccaccacaggttaattttcccatgtgcaccattgcatctatgcccaggctaccagaacactgtattgagtatgtaaggatgttgcagtggcctaaggagcagccttttggagaaggggttccattagatggagatgatcctgaacatatacaatggattttccaaaaatccctagagagagcatcacaatataatattaggggtgttacgtataggctcactcaaggggtagtaaaaagaatcattcctgcagtagcttccacaaatgcagtcattgcagctgtgtgtgccactgaggtttttaaaatagccacaagtgcatacattcccttgaataattacttggtgtttaatgatgtagatgggctgtatacatacacatttgaagcagaaagaaaggaaaactgcccagcttgtagccagcttcctcaaaatattcagttttctccatcagctaaactacaggaggttttggattatctaaccaatagtgcttctctgcaaatgaaatctccagccatcacagccaccctagagggaaaaaatagaacactttacttacagtcggtaacctctattgaagaacgaacaaggccaaatctctccaaaacattgaaagaattggggcttgttgatggacaagaactggcggttgctgatgtcaccaccccacagactgtactattcaaacttcattttacttcttaaggaaaatctccacataatagaaaactcatggaaataatatactttgtggatgctaagaagttgaatcgatgtcatttttagcaatagtgttgccacgatttgtctttttttatataatgaaccactcttttttaactttgtaaccttcccttgaagacagaattttggtgttggtgcttgtaagcattttcattaataatatgagaaatgatacctggagagagagattatgagcaaatgtattgcttcttttagaggaggaagcatacaacctcttttgtgtgaattttgttattatggtcaaagaatgcattcctaagttttcatttgagtacccaaatacacaaaaggtgtccctttaaggaaaataaagaattaagttttaaataacattacattttacaatctgacatctggagtatattgaacataggctatttcttgatataacactcatttaattgtggccatccaaatgaatattattgcagaatttatcttgttcataatgatttgtaaatggtgttatagctgaatacctgtgcatgaaaatgggcaatattttcatctgtttacttgtagtgccatagaggccaatatgcacaatattaactaatgccaagacatggctgtttaaaaaatttaatgttcaaacagttatcactgatgcttttgcactatttattaataaaatcatatattgtgta

SEQ ID NO: 437411 - DNA, 1733 bp, Homo sapiens
acctgggaagaggcggagaacaatatggcggatggcgaggagccggagaagaaaagaaggagaatagaggagctgctggctgagaaaatggctgttgatggtgggtgtggggacactggagactgggaaggtcgctggaaccatgtaaagaagttcctcgagcgatctggacccttcacacaccctgatttcgaaccgagcactgaatctctccagttcttgttagatacatgtaaagttctagtcattggagctggcggcttaggatgtgagctcctgaaaaatctggccttgtctggttttagacagattcatgttatagatatggacactatagatgtttccaatctaaataggcagtttttatttaggcctaaagatattggaagacctaaggctgaagttgctgcagaatttctaaatgacagagttcctaattgcaatgtagttccacatttcaacaagattcaagattttaacgacactttctatcgacaatttcatattattgtatgtggactggactctatcatcgccagaagatggataaatggcatgctgatatctcttctaaattatgaagatggtgtcttagatccaagctccattgtccctttgatagatggggggacagaaggttttaaaggaaatgcccgggtgattctgcctggaatgactgcttgtatcgaatgcacgctggaactttatccaccacaggttaattttcccatgtgcaccattgcatctatgcccaggctaccagaacactgtattgagtatgtaaggatgttgcagtggcctaaggagcagccttttggagaaggggttccattagatggagatgatcctgaacatatacaatggattttccaaaaatccctagagagagcatcacaatataatattaggggtgttacgtataggctcactcaaggggtagtaaaaagaatcattcctgcagtagcttccacaaatgcagtcattgcagctgtgtgtgccactgaggtttttaaaatagccacaagtgcatacattcccttgaataattacttggtgtttaatgatgtagatgggctgtatacatacacatttgaagcagaaagaaaggaaaactgcccagcttgtagccagcttcctcaaaatattcagttttctccatcagctaaactacaggaggttttggattatctaaccaatagtgcttctctgcaaatgaaatctccagccatcacagccaccctagagggaaaaaatagaacactttacttacagtcggtaacctctattgaagaacgaacaaggccaaatctctccaaaacattgaaagaattggggcttgttgatggacaagaactggcggttgctgatgtcaccaccccacagactgtactattcaaacttcattttacttcttaaggaaaatctccacataatagaaaactcatggaaataatatactttgtggatgctaagaagttgaatcgatgtcatttttagcaatagtgttgccacgatttgtctttttttatataatgaaccactcttttttaactttgtaaccttcccttgaagacagaattttggtgttggtgcttgtaagcattttcattaataatatgagaaatgatacctgatgggagaaagactggcgcatcttctcccatcagccacgtcttggactgctgttttgataaccaacaagaggtcaatgtatagaaatccgctgatgggcc

SEQ ID NO: 437412 - DNA, 905 bp, Homo sapiens
aaaccccacatcaccccccccacctccgaccgacaaaaaaaaaagaagccttagtcggtaacctctattgaagaacgaacaaggccaaatctctccaaaacattgaaagaattggggcttgttgatggacaagaactggcggttgctgatgtcaccaccccacagactgtactattcaaacttcattttacttcttaaggaaaatctccacataatagaaaactcatggaaataatatactttgtggatgctaagaagttgaatcgatgtcatttttagcaatagtgttgccacgatttgtctttttttatataatgaaccactcttttttaactttgtaaccttcccttgaagacagaattttggtgttggtgcttgtaagcattttcattaataatatgagaaatgatacctggagagagagattatgagcaaatgtattgcttcttttagaggaggaagcatacaacctcttttgtgtgaattttgttattatggtcaaagaatgcattcctaagttttcatttgagtacccaaatacacaaaaggtgtccctttaaggaaaataaagaattaagttttaaataacattacattttacaatctgacatctggagtatattgaacataggctatttcttgatataacactcatttaattgtggccatccaaatgaatattattgcagaatttatcttgttcataatgatttgtaaatggtgttatagctgaatacctgtgcatgaaaatgggcaatattttcatctgtttacttgtagtgccatagaggccaatatgcacaatattaactaatgccaagacatggctgtttaaaaaatttaatgttcaaacagttatcactgatgcttttgcactatttattaataaaatcatatattgtgta

SEQ ID NO: 437413 - DNA, 1157 bp, Homo sapiens
acctgggaagaggcggagaacaatatggcggatggcgaggagccggagaagaaaagaaggagaatagaggagctgctggctgagaaaatggctgttgatggtgggtgtggggacactggagactgggaaggtcgctggaaccatgtaaagaagttcctcgagcgatctggacccttcacacaccctgatttcgaaccgagcactgaatctctccagttcttgttagatacatgtaaagttctagtcattggagctggcggcttaggatgtgagctcctgaaaaatctggccttgtctggttttagacagattcatgttatagatatggacactatagatgtttccaatctaaataggcagtttttatttaggcctaaagatattggaagacctaaggctgaagttgctgcagaatttctaaatgacagagttcctaattgcaatgtagttccacatttcaacaagattcaagattttaacgacactttctatcgacaatttcatattattgtatgtggactggactctatcatcgccagaagatggataaatggcatgctgatatctcttctaaattatgaagatggtgtcttagatccaagctccattgtccctttgatagatggggggacagaaggttttaaaggaaatgcccgggtgattctgcctggaatgactgcttgtatcgaatgcacgctggaactttatccaccacaggttaattttcccatgtgcaccattgcatctatgcccaggctaccagaacactgtattgagtatgtaaggatgttgcagtggcctaaggagcagccttttggagaaggggttccattagatggagatgatcctgaacatatacaatggattttccaaaaatccctagagagagcatcacaatataatattaggggtgttacgtataggctcactcaaggggtagtaaaaagaatcattcctgcagtagcttccacaaatgcagtcattgcagctgtggtgtgccactgaggtttttaaaataggccaaaagtggcatttcatttccttggaaataattacttgggggtgtacggacggtcaaagggggcggtgtaccctcaccccctttgcgggcccaaaacaaaggggaacgggcccacttgttatcgggtcccacaaat

SEQ ID NO: 437414 - DNA, 993 bp, Homo sapiens
acctgggaagaggcggagaacaatatggcggatggcgaggagccggagaagaaaagaaggagaatagaggagctgctggctgagaaaatggctgttgatggtgggtgtggggacactggagactgggaaggtcgctggaaccatgtaaagaagttcctcgagcgatctggacccttcacacaccctgatttcgaaccgagcactgaatctctccagttcttgttagatacatgtaaagttctagtcattggagctggcggcttaggatgtgagctcctgaaaaatctggccttgtctggttttagacagattcatgttatagatatggacactatagatgtttccaatctaaataggcagtttttatttaggcctaaagatattggaagacctaaggctgaagttgctgcagaatttctaaatgacagagttcctaattgcaatgtagttccacatttcaacaagattcaagattttaacgacactttctatcgacaatttcatattattgtatgtggactggactctatcatcgccagaagatggataaatggcatgctgatatctcttctaaattatgaagatggtgtcttagatccaagctccattgtccctttgatagatggggggacagaaggttttaaaggaaatgcccgggtgattctgcctggaatgactgcttgtatcgaatgcacgctggaactttatccaccacaggttaattttcccatgtgcaccattgcatctatgcccaggctaccagaacactgtattgagtatgtaaggatgttgcagtggcctaaggagcagccttttggagaaagggggtaccattagatctggcgcatgatcctgaaaaatattaaaaggggatttacaaaaaatccctagagagaagaatcaagacacataactataaggggaggtaacagtaataggggtcactcacaggaggtcagtaaaaaaagaatacataacggcgtaagattcccc

SEQ ID NO: 437415 - DNA, 119 bp, Homo sapiens
gtaagtattgtagatttttgttatgttgtaaaaatcatttttgtgatttttgaaaccttaaaaaaattatcttttgataaaaattatgtttgatacttctctctcatcataatctttag

SEQ ID NO: 437416 - DNA, 217 bp, Homo sapiens
taatttaagagaactcttttattttaaagaaatgaccatattttaattgatatgttttttcaggggtagtaaaaagaatcattcctgcagtagcttccacaaatgcagtcattgcaggtgaggaagaaaaggccatcacttagtttattttgctttctttagtttttgacgttgctgcagcttttttgtgttgtaggaatttgatatcttcttggat

SEQ ID NO: 437417 - DNA, 2120 bp, Homo sapiens
ctacgtttccagtgacctgacagcagaggaggggaggagccggagaagaaaagaaggagaatagaggagctgctggctgagaaaatggctgttgatggtgggtgtggggacactggagactgggaaggtcgctggaaccatgtaaagaagttcctcgagcgatctggacccttcacacaccctgatttcgaaccgagcactgaatctctccagttcttgttagatacatgtaaagttctagtcattggagctggcggcttaggatgtgagctcctgaaaaatctggccttgtctggttttagacagattcatgttatagatatggacactatagatgtttccaatctaaataggcagtttttatttaggcctaaagatattggaagacctaaggctgaagttgctgcagaatttctaaatgacagagttcctaattgcaatgtagttccacatttcaacaagattcaagattttaacgacactttctatcgacaatttcatattattgtatgtggactggactctatcatcgccagaagatggataaatggcatgctgatatctcttctaaattatgaagatggtgtcttagatccaagctccattgtccctttgatagatggggggacagaaggttttaaaggaaatgcccgggtgattctgcctggaatgactgcttgtatcgaatgcacgctggaactttatccaccacaggttaattttcccatgtgcaccattgcatctatgcccaggctaccagaacactgtattgagtatgtaaggatgttgcagtggcctaaggagcagccttttggagaaggggttccattagatggagatgatcctgaacatatacaatggattttccaaaaatccctagagagagcatcacaatataatattaggggtgttacgtataggctcactcaaggggtagtaaaaagaatcattcctgcagtagcttccacaaatgcagtcattgcagctgtgtgtgccactgaggtttttaaaatagccacaagtgcatacattcccttgaataattacttggtgtttaatgatgtagatgggctgtatacatacacatttgaagcagaaagaaaggaaaactgcccagcttgtagccagcttcctcaaaatattcagttttctccatcagctaaactacaggaggttttggattatctaaccaatagtgcttctctgcaaatgaaatctccagccatcacagccaccctagagggaaaaaatagaacactttacttacagtcggtaacctctattgaagaacgaacaaggccaaatctctccaaaacattgaaagaattggggcttgttgatggacaagaactggcggttgctgatgtcaccaccccacagactgtactattcaaacttcattttacttcttaaggaaaatctccacataatagaaaactcatggaaataatatactttgtggatgctaagaagttgaatcgatgtcatttttagcaatagtgttgccacgatttgtctttttttatataatgaaccactcttttttaactttgtaaccttcccttgaagacagaattttggtgttggtgcttgtaagcattttcattaataatatgagaaatgatacctggagagagagattatgagcaaatgtattgcttcttttagaggaggaagcatacaacctcttttgtgtgaattttgttattatggtcaaagaatgcattcctaagttttcatttgagtacccaaatacacaaaaggtgtccctttaaggaaaataaagaattaagttttaaataacattacattttacaatctgacatctggagtatattgaacataggctatttcttgatataacactcatttaattgtggccatccaaatgaatattattgcagaatttatcttgttcataatgatttgtaaatggtgttatagctgaatacctgtgcatgaaaatgggcaatattttcatctgtttacttgtagtgccatagaggccaatatgcacaatattaactaatgccaagacatggctgtttaaaaaatttaatgttcaaacagttatcactgatgcttttgcactatttattaataaaatcatatattgtgta

SEQ ID NO: 437418 - DNA, 668 bp, Homo sapiens
acctgggaagaggcggagaacaatatggcggatggcgaggagccggagaagaaaagaaggagaatagaggagctgctggctgagaaaatggctgttgatggtgggtgtggggacactggagactgggaaggtcgctggaaccatgtaaagaagttcctcgagcgatctggacccttcacacaccctgatttcgaaccgagcactgaaagtgagaaacgtttatttttaaataactgctctaatagttttatgtttcaaaactaatagaatgcttcttttttaatttgctcttacaatgaaaatactaataaaattgttttgtgaaactaaatttttcttaaaatatgagattgaatattcacaactgattttgtttgaatatttgagtcttaacatttctcatgtaatataagttgaaaatttttgtgagaaaaatctaacttcatgacctcatgtaaaaatttaaaatgctttctgaaacatactccccttttgtagtgctactgtgagaaattaattttgataggagtataggtgtgcttacttaaattttgaaatttagttggaatgaacatcttagctttgagtataattaattgcatgttaagaattatgtaagtactaaataatagaggcgtagaatttggactgatagtgtctatcttaag

SEQ ID NO: 437419 - DNA, 2144 bp, Homo sapiens
  misc_feature (2140)..(2140): n is a, c, g, or t
acctgggaagaggcggagaacaatatggcggatggcgaggagccggagaagaaaagaaggagaatagaggagctgctggctgagaaaatggctgttgatggtgggtgtggggacactggagactgggaaggtcgctggaaccatgtaaagaagttcctcgagcgatctggacccttcacacaccctgatttcgaaccgagcactgaatctctccagttcttgttagatacatgtaaagttctagtcattggagctggcggcttaggatgtgagctcctgaaaaatctggccttgtctggttttagacagattcatgttatagatatggacactatagatgtttccaatctaaataggcagtttttatttaggcctaaagatattggaagacctaaggctgaagttgctgcagaatttctaaatgacagagttcctaattgcaatgtagttccacatttcaacaagattcaagattttaacgacactttctatcgacaatttcatattattgtatgtggactggactctatcatcgccagaagatggataaatggcatgctgatatctcttctaaattatgaagatggtgtcttagatccaagctccattgtccctttgatagatggggggacagaaggttttaaaggaaatgcccgggtgattctgcctggaatgactgcttgtatcgaatgcacgctggaactttatccaccacaggttaattttcccatgtgcaccattgcatctatgcccaggctaccagaacactgtattgagtatgtaaggatgttgcagtggcctaaggagcagccttttggagaaggggttccattagatggagatgatcctgaacatatacaatggattttccaaaaatccctagagagagcatcacaatataatattaggggtgttacgtataggctcactcaaggggtagtaaaaagaatcattcctgcagtagcttccacaaatgcagtcattgcagctgtgtgtgccactgaggtttttaaaatagccacaagtgcatacattcccttgaataattacttggtgtttaatgatgtagatgggctgtatacatacacatttgaagcagaaagaaaggaaaactgcccagcttgtagccagcttcctcaaaatattcagttttctccatcagctaaactacaggaggttttggattatctaaccaatagtgcttctctgcaaatgaaatctccagccatcacagccaccctagagggaaaaaatagaacactttacttacagtcggtaacctctattgaagaacgaacaaggccaaatctctccaaaacattgaaagaattggggcttgttgatggacaagaactggcggttgctgatgtcaccaccccacagactgtactattcaaacttcattttacttcttaaggaaaatctccacataatagaaaactcatggaaataatatactttgtggatgctaagaagttgaatcgatgtcatttttagcaatagtgttgccacgatttgtctttttttatataatgaaccactcttttttaactttgtaaccttcccttgaagacagaattttggtgttggtgcttgtaagcattttcattaataatatgagaaatgatacctggagagagagattatgagcaaatgtattgcttcttttagaggaggaagcatacaacctcttttgtgtgaattttgttattatggtcaaagaatgcattcctaagttttcatttgagtacccaaatacacaaaaggtgtccctttaaggaaaataaagaattaagttttaaataacattacattttacaatctgacatctggagtatattgaacataggctatttcttgatataacactcatttaattgtggccatccaaatgaatattattgcagaatttatcttgttcataatgatttgtaaatggtgttatagctgaatacctgtgcatgaaaatgggcaatattttcatctgtttacttgtagtgccatagaggccaatatgcacaatattaactaatgccaagacatggctgtttaaaaaatttaatgttcccccggttatgggtggcgcattcacccttttttaaaaaaacctacccaattgtgtaaaaaaaaattgtaatgnggag

SEQ ID NO: 437420 - DNA, 2002 bp, Homo sapiens
acctgggaagaggcggagaacaatatggcggatggcgaggagccggagaagaaaagaaggagaatagaggagctgctggctgagaatctctccagttcttgttagatacatgtaaagttctagtcattggagctggcggcttaggatgtgagctcctgaaaaatctggccttgtctggttttagacagattcatgttatagatatggacactatagatgtttccaatctaaataggcagtttttatttaggcctaaagatattggaagacctaaggctgaagttgctgcagaatttctaaatgacagagttcctaattgcaatgtagttccacatttcaacaagattcaagattttaacgacactttctatcgacaatttcatattattgtatgtggactggactctatcatcgccagaagatggataaatggcatgctgatatctcttctaaattatgaagatggtgtcttagatccaagctccattgtccctttgatagatggggggacagaaggttttaaaggaaatgcccgggtgattctgcctggaatgactgcttgtatcgaatgcacgctggaactttatccaccacaggttaattttcccatgtgcaccattgcatctatgcccaggctaccagaacactgtattgagtatgtaaggatgttgcagtggcctaaggagcagccttttggagaaggggttccattagatggagatgatcctgaacatatacaatggattttccaaaaatccctagagagagcatcacaatataatattaggggtgttacgtataggctcactcaaggggtagtaaaaagaatcattcctgcagtagcttccacaaatgcagtcattgcagctgtgtgtgccactgaggtttttaaaatagccacaagtgcatacattcccttgaataattacttggtgtttaatgatgtagatgggctgtatacatacacatttgaagcagaaagaaaggaaaactgcccagcttgtagccagcttcctcaaaatattcagttttctccatcagctaaactacaggaggttttggattatctaaccaatagtgcttctctgcaaatgaaatctccagccatcacagccaccctagagggaaaaaatagaacactttacttacagtcggtaacctctattgaagaacgaacaaggccaaatctctccaaaacattgaaagaattggggcttgttgatggacaagaactggcggttgctgatgtcaccaccccacagactgtactattcaaacttcattttacttcttaaggaaaatctccacataatagaaaactcatggaaataatatactttgtggatgctaagaagttgaatcgatgtcatttttagcaatagtgttgccacgatttgtctttttttatataatgaaccactcttttttaactttgtaaccttcccttgaagacagaattttggtgttggtgcttgtaagcattttcattaataatatgagaaatgatacctggagagagagattatgagcaaatgtattgcttcttttagaggaggaagcatacaacctcttttgtgtgaattttgttattatggtcaaagaatgcattcctaagttttcatttgagtacccaaatacacaaaaggtgtccctttaaggaaaataaagaattaagttttaaataacattacattttacaatctgacatctggagtatattgaacataggctatttcttgatataacactcatttaattgtggccatccaaatgaatattattgcagaatttatcttgttcataatgatttgtaaatggtgttatagctgaatacctgtgcatgaaaatgggcaatattttcatctgtttacttgtagtgccatagaggccaatatgcacaatattaactaatgccaagacatggctgtttaaaaaatttaatgttcaaacagttatcactgatgcttttgcactatttattaataaaatcatatattgtgta

SEQ ID NO: 437421 - DNA, 2039 bp, Homo sapiens
acctgggaagaggcggagaacaatatggcggatggcgaggagccaatggctgttgatggtgggtgtggggacactggagactgggaaggtcgctggaaccatgtaaagaagttcctcgagcgatctggacccttcacacaccctgatttcgaaccgagcactgaatctctccagttcttgttagatacatgtaaagttctagtcattggagctggcggcttaggatgtgagctcctgaaaaatctgactatagatgtttccaatctaaataggcagtttttatttaggcctaaagatattggaagacctaaggctgaagttgctgcagaatttctaaatgacagagttcctaattgcaatgtagttccacatttcaacaagattcaagattttaacgacactttctatcgacaatttcatattattgtatgtggactggactctatcatcgccagaagatggataaatggcatgctgatatctcttctaaattatgaagatggtgtcttagatccaagctccattgtccctttgatagatggggggacagaaggttttaaaggaaatgcccgggtgattctgcctggaatgactgcttgtatcgaatgcacgctggaactttatccaccacaggttaattttcccatgtgcaccattgcatctatgcccaggctaccagaacactgtattgagtatgtaaggatgttgcagtggcctaaggagcagccttttggagaaggggttccattagatggagatgatcctgaacatatacaatggattttccaaaaatccctagagagagcatcacaatataatattaggggtgttacgtataggctcactcaaggggtagtaaaaagaatcattcctgcagtagcttccacaaatgcagtcattgcagctgtgtgtgccactgaggtttttaaaatagccacaagtgcatacattcccttgaataattacttggtgtttaatgatgtagatgggctgtatacatacacatttgaagcagaaagaaaggaaaactgcccagcttgtagccagcttcctcaaaatattcagttttctccatcagctaaactacaggaggttttggattatctaaccaatagtgcttctctgcaaatgaaatctccagccatcacagccaccctagagggaaaaaatagaacactttacttacagtcggtaacctctattgaagaacgaacaaggccaaatctctccaaaacattgaaagaattggggcttgttgatggacaagaactggcggttgctgatgtcaccaccccacagactgtactattcaaacttcattttacttcttaaggaaaatctccacataatagaaaactcatggaaataatatactttgtggatgctaagaagttgaatcgatgtcatttttagcaatagtgttgccacgatttgtctttttttatataatgaaccactcttttttaactttgtaaccttcccttgaagacagaattttggtgttggtgcttgtaagcattttcattaataatatgagaaatgatacctggagagagagattatgagcaaatgtattgcttcttttagaggaggaagcatacaacctcttttgtgtgaattttgttattatggtcaaagaatgcattcctaagttttcatttgagtacccaaatacacaaaaggtgtccctttaaggaaaataaagaattaagttttaaataacattacattttacaatctgacatctggagtatattgaacataggctatttcttgatataacactcatttaattgtggccatccaaatgaatattattgcagaatttatcttgttcataatgatttgtaaatggtgttatagctgaatacctgtgcatgaaaatgggcaatattttcatctgtttacttgtagtgccatagaggccaatatgcacaatattaactaatgccaagacatggctgtttaaaaaatttaatgttcaaacagttatcactgatgcttttgcactatttattaataaaatcatatattgtgta

SEQ ID NO: 437422 - DNA, 1998 bp, Homo sapiens
acctgggaagaggcggagaacaatatggcggatggcgaggagccggagaagaaaagaaggagaatagaggagctgctggctgagaaaatggctgttgatggtgggtgtggggacactggagactgggaaggtcgctggaaccatgtaaagaagttcctcgagcgatctggacccttcacacaccctgatttcgaaccgagcactgaatctctccagttcttgttagatacatgtaaagttctagtcattggagctggcggcttaggatgtgagctcctgaaaaatctggccttgtctggttttagacagattcatgttatagatatggacactatagatgtttccaatctaaataggcagtttttatttagaatttcatattattgtatgtggactggactctatcatcgccagaagatggataaatggcatgctgatatctcttctaaattatgaagatggtgtcttagatccaagctccattgtccctttgatagatggggggacagaaggttttaaaggaaatgcccgggtgattctgcctggaatgactgcttgtatcgaatgcacgctggaactttatccaccacaggttaattttcccatgtgcaccattgcatctatgcccaggctaccagaacactgtattgagtatgtaaggatgttgcagtggcctaaggagcagccttttggagaaggggttccattagatggagatgatcctgaacatatacaatggattttccaaaaatccctagagagagcatcacaatataatattaggggtgttacgtataggctcactcaaggggtagtaaaaagaatcattcctgcagtagcttccacaaatgcagtcattgcagctgtgtgtgccactgaggtttttaaaatagccacaagtgcatacattcccttgaataattacttggtgtttaatgatgtagatgggctgtatacatacacatttgaagcagaaagaaaggaaaactgcccagcttgtagccagcttcctcaaaatattcagttttctccatcagctaaactacaggaggttttggattatctaaccaatagtgcttctctgcaaatgaaatctccagccatcacagccaccctagagggaaaaaatagaacactttacttacagtcggtaacctctattgaagaacgaacaaggccaaatctctccaaaacattgaaagaattggggcttgttgatggacaagaactggcggttgctgatgtcaccaccccacagactgtactattcaaacttcattttacttcttaaggaaaatctccacataatagaaaactcatggaaataatatactttgtggatgctaagaagttgaatcgatgtcatttttagcaatagtgttgccacgatttgtctttttttatataatgaaccactcttttttaactttgtaaccttcccttgaagacagaattttggtgttggtgcttgtaagcattttcattaataatatgagaaatgatacctggagagagagattatgagcaaatgtattgcttcttttagaggaggaagcatacaacctcttttgtgtgaattttgttattatggtcaaagaatgcattcctaagttttcatttgagtacccaaatacacaaaaggtgtccctttaaggaaaataaagaattaagttttaaataacattacattttacaatctgacatctggagtatattgaacataggctatttcttgatataacactcatttaattgtggccatccaaatgaatattattgcagaatttatcttgttcataatgatttgtaaatggtgttatagctgaatacctgtgcatgaaaatgggcaatattttcatctgtttacttgtagtgccatagaggccaatatgcacaatattaactaatgccaagacatggctgtttaaaaaatttaatgttcaaacagttatcactgatgcttttgcactatttattaataaaatcatatattgtgta

SEQ ID NO: 437423 - DNA, 1454 bp, Homo sapiens
acctgggaagaggcggagaacaatatggcggatggcgaggagccggagaagaaaagaaggagaatagaggagctgctggctgagaaaatggctgttgatggtgggtgtggggacactggagactgggaaggtcgctggaaccatgtaaagaagttcctcgagcgatctggacccttcacacaccctgatttcgaaccgagcactgaatctctccagttcttgttagatacatgtaaagttctagtcattggagctggcggcttaggatgtgagctcctgaaaaatctggccttgtctggttttagacagattcatgttatagatatggacactatagatgtttccaatctaaataggcagtttttatttaggcctaaagatattggaagacctaaggctgaagttgctgcagaatttctaaatgacagagttcctaattgcaatgtagttccacatttcaacaagattcaagattttaacgacactttctatcgacaatttcatattattgtatgtggactggactctatcatcgccagaagatggataaatggcatgctgatatctcttctaaattatgaagatggtgtcttagatccaagctccattgtccctttgatagatggggggacagaaggttttaaaggaaatgcccgggtgattctgcctggaatgactgcttgtatcgaatgcacgctggaactttatccaccacaggttaattttcccatgtgcaccattgcatctatgcccaggctaccagaacactgtattgagtatgtaaggatgttgcagtggcctaaggagcagccttttggagaaggggttccattagatggagatgatcctgaacatatacaatggattttccaaaaatccctagagagagcatcacaatataatattaggggtgttacgtataggctcactcaaggggtagtaaaaagaatcattcctgcagtagcttccacaaatgcagtcattgcagctgtgtgtgccactgaggtttttaaaatagccacaagtgcatacattcccttgaataattacttggtgtttaatgatgtagatgggctgtatacatacacatttgaagcagaaagaaaggaaaactgcccagcttgtagccagcttcctcaaaatattcagttttctccatcagctaaactacaggaggttttggattatctaaccaatagtgcttctctgcaaatgaaatctccagccatcacagccaccctgatgggacgaagatggatcttcgtcccatcagtcaaaaaaatttatgaaaccatgtatttcctcacctgttttaagtaaatgcttaattttttcttcatttttacaaagtaacacacttacaacatagtatcttgcatattttaaacatgacaagaagttcagctgagccccaggaagtacaggtgcccttagctgatggagcaagatgggtc

SEQ ID NO: 437424 - DNA, 3039 bp, Homo sapiens
tggttgccttagattcggttatgtaaattgtcgcaaccactaacaattgtggtctctggtgatcttatttttaaagcctgtattatttaaaatgcatttttattgaaaggcctgcattaaactgaatggtttcacaggcatttgcttgtcctgcatagtaaggaggtagaatacatagaaaattaatacaatgttttagaaacagccaagttaattttagaggcaagaacatgatttgatgctataaagtaggcattttaatattgtaaacatatactttggctgtattgaaaaatataaatccatgatggctgtacaaataatttagcctcattcattttttaaaggaattattccttaagacatgccatctctttttagatatactcaaaagactgagaggcaaaacttggcttttagctgcagcacatagccctgttatatttgatttattttacatttcatatgaaagcataattttgtccacatgtgactcaaattgcattggtaattttttttttttttgtaagttaaaaaaactacagagacactaaaggtgaaaatggatgagacaattatagtattattttcattggtctttttttttgagatggagtctcactctttcgccaggctagagtgcagtggcgccatctaggctcactgcaacctccgcatcccagattccagcgattctcctgcctcagcctcctgagtagctgggattacaggtgcctgccatcacgcctggctaatttttgtatttttagtagagacgggggttcaccaagttggccaggatggtctcgatctcttgaccttgtgactcacccgcatcggcctcccaaagtgctgggattacaggcatgagccaccgcacctgacggtcttttcaaagctatttatttttaggactatgtggtaatttcaccttcaggtgataaggattttttttttctcccagctagtgctatctttctcaaaataatttaaaagtaggcgagaggctaggatgtacctatatttaccatgtttacttaccaggaatattttctaagtgccatagtctttttcataatacgtatgagttttaccttttcagaggaataatttcaagtcatttatttgctcattaatgatagcagtagtcatagacttaagactattctagagatcttcatctccataagacttttacatttattttagtaaacttttctttctatgcctctttaatggagtggttctgttatttaagcctgttctaagtttgatcaaatggcaatgactaggtctagttttagtttttatttttgcaggagtctattgctaaagaattttattttgatccttgttaaatttttattttaattaataaggtagtcattcctgtagagggataagatgcttgtagagttgtgggtatcattccaaatagaactgttatgatttgggaaatattctttactacaaaggacttatttcataattacaaattttccttcatatttgcctttgtttataaaatcttcaggaatgacattctctagcaataaaaggaatgaaccgttatgtttctaagctgaaaagaggaacaggtgggtaattatcctgccatacttaaatatagtggaaaatcctctattgagaatgtggataaatgaacaattgtaagttttgcatcataaactgagaactttcttttgacaggggggaggcgggagggatagtaggtgggggtgatctgcttgcttcttttaccacaggtgatttttaagtaacttgggtttaatttacagagatgaaacatgacagtctgagtaaaatacccagtgatgtagaagtgtgcctgtttattatgtagatacagacatccagcaaaaacaggagaatcacatgctttaaagaacactttctcttaggtttccttgagatatgttcctccagtgcaagcaagataatggtttacagaatttgctttacacaaaacttgtcaagaactcatctgttaaaagcaaggaataactagtttatattttccaataatgttcaaggttttctccttaatatgtttgaaattattgattttggcatttttctaagcaatttatgtaattttatttgaagaaaatgttttgtataatgtttttcccagcctaaacagggagagtcctaacagtgttgtgcttgtatgattctgagactttatttgcgtaagtgatactactatactttatttttgacccatgcctttttaagctgtttcatattgaaaggtggaatattgtaaaaattttgtcaaagatgtactgtagtgctatttgaagtacctgtaacaaaacagttggccctctgtatccatgtactctgcatctgtggattaaaccaattgcagatcaaaaatattagaaaaaataaaaataatacaaataaaaatacagtataacagttatttaaatagcatttacattgcattaggtattagtctagggataaagtatacaggcggatgtgcgttggttatatacaaatatgtcattttatgtaagggacttgagtatacttggatttttggtatctgtgggttggggggacggtccaggaaccaataccccatggataccaagggacaactgtacttatttacctttattgtcattgcaagcttcttatggaaactttataggaatgaaaatatacatgttaagaagattaaacattagatagtagatggtttgttgcatgctagaactgttagtattgttgaatcaattactttggtttcatgaaaaaataaacgataaatatctttaaagagaactagaagaattttttgtttgagtgattccaggctgtagtatgatcatttactgaagtagtttgattggctggctaacttagaattattgtttcttgttttgtactgcaataggggttataattgtaagataaaaatgtgtgtgtgtttaagggaagtaggtggtggttaaaattcttggaaaattttcagaatactttaaaaataaagttccaagttac

SEQ ID NO: 437425 - DNA, 2824 bp, Homo sapiens
tggttgccttagattcggttatgtaaattgtcgcaaccactaacaattgtggtctctggtgatcttatttttaaagcctgtattatttaaaatgcatttttattgaaaggcctgcattaaactgaatggtttcacaggcatttgcttgtcctgcatagtaaggaggtagaatacatagaaaattaatacaatgttttagaaacagccaagttaattttagaggcaagaacatgatttgatgctataaagtaggcattttaatattgtaaacatatactttggctgtattgaaaaatataaatccatgatggctgtacaaataatttagcctcattcattttttaaaggaattattccttaagacatgccatctctttttagatatactcaaaagactgagaggcaaaacttggcttttagctgcagcacatagccctgttatatttgatttattttacatttcatatgaaagcataattttgtccacatgtgactcaaattgcattggtaattttttttttttttgtaagttaaaaaaactacagagacactaaaggtgaaaatggatgagacaattatagtattattttcattggtctttttttttgagatggagtctcactctttcgccaggctagagtgcagtggcgccatctaggctcactgcaacctccgcatcccagattccagcgattctcctgcctcagcctcctgagtagctgggattacaggtgcctgccatcacgcctggctaatttttgtatttttagtagagacgggggttcaccaagttggccaggatggtctcgatctcttgaccttgtgactcacccgcatcggcctcccaaagtgctgggattacaggcatgagccaccgcacctgacggtcttttcaaagctatttatttttaggactatgtggtaatttcaccttcaggtgataaggattttttttttctcccagctagtgctatctttctcaaaataatttaaaagtaggcgagaggctaggatgtacctatatttaccatgtttacttaccaggaatattttctaagtgccatagtctttttcataatacgtatgagttttaccttttcagaggaataatttcaagtcatttatttgctcattaatgatagcagtagtcatagacttaagactattctagagatcttcatctccataagacttttacatttattttagtaaacttttctttctatgcctctttaatggagtggttctgttatttaagcctgttctaagtttgatcaaatggcaatgactaggtctagttttagtttttatttttgcaggagtctattgctaaagaattttattttgatccttgttaaatttttattttaattaataaggtagtcattcctgtagagggataagatgcttgtagagttgtgggtatcattccaaatagaactgttatgatttgggaaatattctttactacaaaggacttatttcataattacaaattttccttcatatttgcctttgtttataaaatcttcaggaatgacattctctagcaataaaaggaatgaaccgttatgtttctaagctgaaaagaggaacaggtgggtaattatcctgccatacttaaatatagtggaaaatcctctattgagaatgtggataaatgaacaattgtaagttttgcatcataaactgagaactttcttttgacaggggggaggcgggagggatagtaggtgggggtgatctgcttgcttcttttaccacaggtgatttttaagtaacttgggtttaatttacagagatgaaacatgacagtctgagtaaaatacccagtgatgtagaagtgtgcctgtttattatgtagatacagacatccagcaaaaacaggagaatcacatgctttaaagaacactttctcttaggtttccttgagatatgttcctccagtgcaagcaagataatggtttacagaatttgctttacacaaaacttgtcaagaactcatctgttaaaagcaaggaataactagtttatattttccaataatgttcaaggttttctccttaatatgtttgaaattattgattttggcatttttctaagcaatttatgtaattttatttgaagaaaatgttttgtataatgtttttcccagcctaaacagggagagtcctaacagtgttgtgcttgtatgattctgagactttatttgcgtaagtgatactactatactttatttttgacccatgcctttttaagctgtttcatattgaaaggtggaatattgtaaaaattttgtcaaagatgtactgtagtgctatttgaagtacctgtaacaaaacagttggccctctgtatccatgtactctgcatctgtggattaaaccaattgcagatcaaaaatattagaaaaaataaaaataatacaaataaaaatacagtataacagttatttaaatagcatttacattgcattaggtattagtctagggataaagtatacaggcggatgtgcgttggttatatacaaatatgtcattttatgtaagggacttgagtatacttggatttttggtatctgtgggttggggggacggtccaggaaccaataccccatggataccaagggacaactgtacttatttacctttattgtcattgcaagcttcttatggaaactttataggaatgaaaatatacatgttaagaagattaaacattagatagtagatggtttgttgcatgctagaactgttagtattgttgaatcaattactttggtttcatgaaaaaataaacgataaatatctttaaagagaactag

SEQ ID NO: 437426 - DNA, 298 bp, Homo sapiens
  misc_feature (18)..(18): n is a, c, g, or t
  misc_feature (20)..(20): n is a, c, g, or t
  misc_feature (23)..(23): n is a, c, g, or t
acatgatagaatcgagcncngtncccctagtttagaagtttaaatagcatttacattgcattaggtattagtctagggataaagtatacaggcggatgtgcgttggttatatacaaatatgtcattttatgtaagggacttgagtatacttggatttttggtatctgtgggttggggggacggtccaggaaccaataccccatggataccaagggacaactgtacttatttacctttattgtcattgctgcctggggaacttctaaaactaggtgctattgaaacttctaaaactagg

SEQ ID NO: 437427 - DNA, 2964 bp, Homo sapiens
tggttgccttagattcggttatgtaaattgtcgcaaccactaacaattgtggtctctggtgatcttatttttaaagcctgtattatttaaaatgcatttttattgaaaggcctgcattaaactgaatggtttcacaggcatttgcttgtcctgcatagtaaggaggtagaatacatagaaaattaatacaatgttttagaaacagccaagttaattttagaggcaagaacatgatttgatgctataaagtaggcattttaatattgtaaacatatactttggctgtattgaaaaatataaatccatgatggctgtacaaataatttagcctcattcattttttaaaggaattattccttaagacatgccatctctttttagatatactcaaaagactgagaggcaaaacttggcttttagctgcagcacatagccctgttatatttgatttattttacatttcatatgaaagcataattttgtccacatgtgactcaaattgcattggtaattttttttttttttgtaagttaaaaaaactacagagacactaaaggtgaaaatggatgagacaattatagtattattttcattggtctttttttttgagatggagtctcactctttcgccaggctagagtgcagtggcgccatctaggctcactgcaacctccgcatcccagattccagcgattctcctgcctcagcctcctgagtagctgggattacaggtgcctgccatcacgcctggctaatttttgtatttttagtagagacgggggttcaccaagttggccaggatggtctcgatctcttgaccttgtgactcacccgcatcggcctcccaaagtgctgggattacaggcatgagccaccgcacctgacggtcttttcaaagctatttatttttaggactatgtggtaatttcaccttcaggtgataaggattttttttttctcccagctagtgctatctttctcaaaataatttaaaagtaggcgagaggctaggatgtacctatatttaccatgtttacttaccaggaatattttctaagtgccatagtctttttcataatacgtatgagttttaccttttcagaggaataatttcaagtcatttatttgctcattaatgatagcagtagtcatagacttaagactattctagagatcttcatctccataagacttttacatttattttagtaaacttttctttctatgcctctttaatggagtggttctgttatttaagcctgttctaagtttgatcaaatggcaatgactaggtctagttttagtttttatttttgcaggagtctattgctaaagaattttattttgatccttgttaaatttttattttaattaataaggtagtcattcctgtagagggataagatgcttgtagagttgtgggtatcattccaaatagaactgttatgatttgggaaatattctttactacaaaggacttatttcataattacaaattttccttcatatttgcctttgtttataaaatcttcaggaatgacattctctagcaataaaaggaatgaaccgttatgtttctaagctgaaaagaggaacaggtgggtaattatcctgccatacttaaatatagtggaaaatcctctattgagaatgtggataaatgaacaattgtaagttttgcatcataaactgagaactttcttttgacaggggggaggcgggagggatagtaggtgggggtgatctgcttgcttcttttaccacaggtgatttttaagtaacttgggtttaatttacagagatgaaacatgacagtctgagtaaaatacccagtgatgtagaagtgtgcctgtttattatgtagatacagacatccagcaaaaacaggagaatcacatgctttaaagaacactttctcttaggtttccttgagatatgttcctccagtgcaagcaagataatggtttacagaatttgctttacacaaaacttgtcaagaactcatctgttaaaagcaaggaataactagtttatattttccaataatgttcaaggttttctccttaatatgtttgaaattattgattttggcatttttctaagcaatttatgtaattttatttgaagaaaatgttttgtataatgtttttcccagcctaaacagggagagtcctaacagtgttgtgcttgtatgattctgagactttatttgcgtaagtgatactactatactttatttttgacccatgcctttttaagctgtttcatattgaaaggtggaatattgtaaaaattttgtcaaagatgtactgtagtgctatttgaagtacctgtaacaaaacagttggccctctgtatccatgtactctgcatctgtggattaaaccaattgcagatcaaaaatattagaaaaaataaaaataatacaaataaaaatacagtataacagttatttaaatagcatttacattgcattaggtattagtctagggataaagtatacaggcggatgtgcgttggttatatacaaatatgtcattttatgtaagggacttgagtatacttggatttttggtatctgtgggttggggggacggtccaggaaccaataccccatggataccaagggacaactgtacttatttacctttattgtcattgcaagcttcttatggaaactttataggaatgaaaatatacatgttaagaagattaaacattagatagtagatggtttgttgcatgctagaactgttagtattgttgaatcaattactttggtttcatgaaaaaataaacgataaatatctttaaagagaactagaagaattttttgtttgagtgattccaggctgtagtatgatcatttactgaagtagtttgattggctggctaacttagaattattgtttcttgttttgtactgcaataaagaaggaaataacgggatcctctagaacagct

SEQ ID NO: 437428 - DNA, 2712 bp, Homo sapiens
tggttgccttagattcggttatgtaaattgtcgcaaccactaacaattgtggtctctggtgatcttatttttaaagcctgtattatttaaaatgcatttttattgaaaggcctgcattaaactgaatggtttcacaggcatttgcttgtcctgcatagtaaggaggtagaatacatagaaaattaatacaatgttttagaaacagccaagttaattttagaggcaagaacatgatttgatgctataaagtaggcattttaatattgtaaacatatactttggctgtattgaaaaatataaatccatgatggctgtacaaataatttagcctcattcattttttaaaggaattattccttaagacatgccatctctttttagatatactcaaaagactgagaggcaaaacttggcttttagctgcagcacatagccctgttatatttgatttattttacatttcatatgaaagcataattttgtccacatgtgactcaaattgcattggtaattttttttttttttgtaagttaaaaaaactacagagacactaaaggtgaaaatggatgagacaattatagtattattttcattggtctttttttttgagatggagtctcactctttcgccaggctagagtgcagtggcgccatctaggctcactgcaacctccgcatcccagattccagcgattctcctgcctcagcctcctgagtagctgggattacaggtgcctgccatcacgcctggctaatttttgtatttttagtagagacgggggttcaccaagttggccaggatggtctcgatctcttgaccttgtgactcacccgcatcggcctcccaaagtgctgggattacaggcatgagccaccgcacctgacggtcttttcaaagctatttatttttaggactatgtggtaatttcaccttcaggtgataaggattttttttttctcccagctagtgctatctttctcaaaataatttaaaagtaggcgagaggctaggatgtacctatatttaccatgtttacttaccaggaatattttctaagtgccatagtctttttcataatacgtatgagttttaccttttcagaggaataatttcaagtcatttatttgctcattaatgatagcagtagtcatagacttaagactattctagagatcttcatctccataagacttttacatttattttagtaaacttttctttctatgcctctttaatggagtggttctgttatttaagcctgttctaagtttgatcaaatggcaatgactaggtctagttttagtttttatttttgcaggagtctattgctaaagaattttattttgatccttgttaaatttttattttaattaataaggtagtcattcctgtagagggataagatgcttgtagagttgtgggtatcattccaaatagaactgttatgatttgggaaatattctttactacaaaggacttatttcataattacaaattttccttcatatttgcctttgtttataaaatcttcaggaatgacattctctagcaataaaaggaatgaaccgttatgtttctaagctgaaaagaggaacaggtgggtaattatcctgccatacttaaatatagtggaaaatcctctattgagaatgtggataaatgaacaattgtaagttttgcatcataaactgagaactttcttttgacaggggggaggcgggagggatagtaggtgggggtgatctgcttgcttcttttaccacaggtgatttttaagtaacttgggtttaatttacagagatgaaacatgacagtctgagtaaaatacccagtgatgtagaagtgtgcctgtttattatgtagatacagacatccagcaaaaacaggagaatcacatgctttaaagaacactttctcttaggtttccttgagatatgttcctccagtgcaagcaagataatggtttacagaatttgctttacacaaaacttgtcaagaactcatctgttaaaagcaaggaataactagtttatattttccaataatgttcaaggttttctccttaatatgtttgaaattattgattttggcatttttctaagcaatttatgtaattttatttgaagaaaatgttttgtataatgtttttcccagcctaaacagggagagtcctaacagtgttgtgcttgtatgattctgagactttatttgcgtaagtgatactactatactttatttttgacccatgcctttttaagctgtttcatattgaaaggtggaatattgtaaaaattttgtcaaagatgtactgtagtgctatttgaagtacctgtaacaaaacagttggccctctgtatccatgtactctgcatctgtggattaaaccaattgcagatcaaaaatattagaaaaaataaaaataatacaaataaaaatacagtataacagttatttaaatagcatttacattgcattaggtattagtctagggataaagtatacaggcggatgtgcgttggttatatacaaatatgtcattttatgtaagggacttgagtatacttggatttttggtatctgtgggttggggggacggtccaggaaccaataccccatggataccaagggacaactgtacttatttacctttattgtcattgctgcctggggaacttctaaaactaggtgctattgaaacttctaaaactagg

SEQ ID NO: 437429 - DNA, 2769 bp, Homo sapiens
tggttgccttagattcggttatgtaaattgtcgcaaccactaacaattgtggtctctggtgatcttatttttaaagcctgtattatttaaaatgcatttttattgaaaggcctgcattaaactgaatggtttcacaggcatttgcttgtcctgcatagtaaggaggtagaatacatagaaaattaatacaatgttttagaaacagccaagttaattttagaggcaagaacatgatttgatgctataaagtaggcattttaatattgtaaacatatactttggctgtattgaaaaatataaatccatgatggctgtacaaataatttagcctcattcattttttaaaggaattattccttaagacatgccatctctttttagatatactcaaaagactgagaggcaaaacttggcttttagctgcagcacatagccctgttatatttgatttattttacatttcatatgaaagcataattttgtccacatgtgactcaaattgcattggtaattttttttttttttgtaagttaaaaaaactacagagacactaaaggtgaaaatggatgagacaattatagtattattttcattggtctttttttttgagatggagtctcactctttcgccaggctagagtgcagtggcgccatctaggctcactgcaacctccgcatcccagattccagcgattctcctgcctcagcctcctgagtagctgggattacaggtgcctgccatcacgcctggctaatttttgtatttttagtagagacgggggttcaccaagttggccaggatggtctcgatctcttgaccttgtgactcacccgcatcggcctcccaaagtgctgggattacaggcatgagccaccgcacctgacggtcttttcaaagctatttatttttaggactatgtggtaatttcaccttcaggtgataaggattttttttttctcccagctagtgctatctttctcaaaataatttaaaagtaggcgagaggctaggatgtacctatatttaccatgtttacttaccaggaatattttctaagtgccatagtctttttcataatacgtatgagttttaccttttcagaggaataatttcaagtcatttatttgctcattaatgatagcagtagtcatagacttaagactattctagagatcttcatctccataagacttttacatttattttagtaaacttttctttctatgcctctttaatggagtggttctgttatttaagcctgttctaagtttgatcaaatggcaatgactaggtctagttttagtttttatttttgcaggagtctattgctaaagaattttattttgatccttgttaaatttttattttaattaataaggtagtcattcctgtagagggataagatgcttgtagagttgtgggtatcattccaaatagaactgttatgatttgggaaatattctttactacaaaggacttatttcataattacaaattttccttcatatttgcctttgtttataaaatcttcaggaatgacattctctagcaataaaaggaatgaaccgttatgtttctaagctgaaaagaggaacaggtgggtaattatcctgccatacttaaatatagtggaaaatcctctattgagaatgtggataaatgaacaattgtaagttttgcatcataaactgagaactttcttttgacaggggggaggcgggagggatagtaggtgggggtgatctgcttgcttcttttaccacaggtgatttttaagtaacttgggtttaatttacagagatgaaacatgacagtctgagtaaaatacccagtgatgtagaagtgtgcctgtttattatgtagatacagacatccagcaaaaacaggagaatcacatgctttaaagaacactttctcttaggtttccttgagatatgttcctccagtgcaagcaagataatggtttacagaatttgctttacacaaaacttgtcaagaactcatctgttaaaagcaaggaataactagtttatattttccaataatgttcaaggttttctccttaatatgtttgaaattattgattttggcatttttctaagcaatttatgtaattttatttgaagaaaatgttttgtataatgtttttcccagcctaaacagggagagtcctaacagtgttgtgcttgtatgattctgagactttatttgcgtaagtgatactactatactttatttttgacccatgcctttttaagctgtttcatattgaaaggtggaatattgtaaaaattttgtcaaagatgtacttctgcatctgtggattaaaccaattgcagatcaaaaatattagaaaaaataaaaataatacaaataaaaatacagtataacagttatttaaatagcatttacattgcattaggtattagtctagggataaagtatacaggcggatgtgcgttggttatatacaaatatgtcattttatgtaagggacttgagtatacttggatttttggtatctgtgggttggggggacggtccaggaaccaataccccatggataccaagggacaactgtacttatttacctttattgtcattgcaagcttcttatggaaactttataggaatgaaaatatacatgttaagaagattaaacattagatagtagatggtttgttgcatgctagaactgttagtattgttgaatcaattactttggtttcatgaaaaaataaacgataaatatctttaaagagaactag

SEQ ID NO: 437430 - DNA, 667 bp, Homo sapiens
cctaatgtacttttggaatcagagcaaagcaatcctttttgcagttattcagagcatcaggagaaaaatgatgtcttcctgtaccgatgcagtgtttgtgctaaaagtttccgatctccatctaaactggaaagacactacctaattcatgcagggcagaaaccatttgaatgctcagtttgtggcaaaacattcagacaggctcctcactggaagagacatcaacttactcactttaaagaacgaccacaagggaaagtggttgccttagattcggttatgtaaattgtcgcaaccactaacaattgtggtctctggtgatcttatttttaaagcctgtattatttaaaatgcatttttattgaaaggcctgcattaaactgaatggtttcacaggcatttgcttgtcctgcatagtaaggaggtagaatacatagaaaattaatacaatgttttagaaacagccaagttaattttagaggcaagaacatgatttgatgctataaagtaggcattttaatattgtaaacatatactttggctgtattgaaaaatataaatccatgatggctgtacaaataatttagcctcattcattttttaaaggaattattccttaagacatgccatctctttttagatatactcaaaagactgagaggcaaaa

SEQ ID NO: 437431 - DNA, 896 bp, Homo sapiens
ctgacaaatggtcccatgggtccgggggcacgcttttcacaacgtggagatgcagggtcatgggctgcctgctaccacgaggcggaaggggatggtgctgggcaccagcctgccccggggctgggtttctcctgggcctgggccgaggggtggaggcctgtgggtgacgtgttcaagacggctcagcaaccccacctgacagtgtccaggtggggcctctcccccacccccaggctccccagggagcacagcctccactcctacacactggctactctgccggagggggaggccgtgctggagtgatgcctggcgcgtgttgtgtgatgggagaattgggtatttacagtttaataacgagatctcgatgccgtcgatcggccctgctccaggcccttggcttatctggcttttgaacgtggtttatagagtggtgacggtgccgcttattaaatgcttagctgggcctggcgtgggtgtggcggccgccagggccccggtgctggctcgggcaggtgttgcagcgggagcctcaagggatgaaaggtggctctccggtgctccctcctcaccaaggaggcttctctcagggcttcttattaaaagccgatgtaaaggacctgcgcgatggctcacgcctgtaatcccagcactttaggaggtcaaggcgggaggatcccttgagctcaggagtttgagagcagcctggacaatatagcaagactccacctctacaaaagtcaaaaattagccaggcatgatggttgcacctgtggtcccagctactcaggaggctgaggtgggaggattgcttgagcccaggagttggagaccgcagtgagctatgatcgcgccgtgtgctccagcctgggtgacagagcacccaggctcaaaaa

SEQ ID NO: 437432 - DNA, 218 bp, Homo sapiens
gcggccgcctactactactactgctcgaattcaagcttctaacgatgtacggggacatgtaacagccaggagtgttaagcgttcagtgatgtggggtgaaaagttactacctgtcaaggtttgtgttaccctcctgtaaatggtgtacataatgtattgttggtaattattttggtacttttatgatgtatatttattaaacagatttttacaaatga

SEQ ID NO: 437433 - DNA, 803 bp, Homo sapiens
tctacataatgagtctctcaaatttctgtgcataaccagtatcccaagaatgtacctgcccccctttaatagcttactctttttttaaagagaagcattaaaggcaaactccctcagcctgtaaagttcattatatttgggctatggagaatggagtccaagagttatttccagtagtggcctccccatcccggtagcttggcagagctccgctccggaagcttaacgtgtcttttttccccttgttttcagctgccctatgatgactgtgtgtttggaggccagcgtctgacgttatgagcgcaaaggggctgaaagaacatggacttgtatatttgtacaaaaaaaaagttttatttttctaaaaaaagaaaaaagaagaaaaaatttaaagggtgtacttatatccacactgcacactgcctggcccaaaacgtcttattgtggtaggatcagccctcattttgttgcttttgtgaactttttgtaggggacgagaaagatcattgaaattctgagaaaacttcttttaaacctcacctttgtggggtttttggagaaggttatcaaaaatttcatggaaggaccacattttatatttattgtgcttcgagtgactgaccccagtggtatcctgtgacatgtaacagccaggagtgttaagcgttcagtgatgtggggtgaaaagttactacctgtcaaggtttgtgttaccctcctgtaaatggtgtacataatgtattgttggtaattattttggtacttttatgatgtatatttattaaacagatttttacaaatga

SEQ ID NO: 437434 - DNA, 1166 bp, Homo sapiens
aaaagatcaaaaaacggaaaggaccggcaggttggcaaaccccaaagagggaccgcccatcaggtcggcgtccttgggatctcagcagccgacgaccccaattcaaatcgatcgtgggaaaccccagggaaagaaggctcacttgcagagggacaggattacagggtgcaggctgcagggaagtaccggggggagggggcctggtcggaaggactttccagccactcggcgctcatcaaaaagttccctgtccgtgaccctagtggctcatcgcagggagtttctccgatgaaccccagctcagggtttaggcttctttttccccctagcagaggacgaagccagttctctttttctggtctgactggcttggaaattccccgagcctgaccccgccccagagaaatccccagccagcgtttatagggcgccgcggcggcgctgcagagcccacagcagtccgtgccgccgtcccgcccgccagcgccccagcgaggaagcagcgcgcagcccgcggcccagcgcacccgcagcagcgcccgcagctcgtccgcgccatgttccaggcggccgagcgcccccaggagtgggccatggagggcccccgcgacgggctgaagaaggagcggctactggacgaccgccacgacagcggcctggactccatgaaagacgaggagtacgagcagatggtcaaggagctgcaggagatccgcctcgagccgcaggaggtgccgcgcggctcggagccctggaagcagcagctcaccgaggacggggactcgttcctgcacttggccatcatccatgaagaaaaggcactgaccatggaagtgatccgccaggtgaagggagacctggccttcctcaacttccagaacaacctgcagcagactccactccacttggctgtgatcaccaaccagccagaaattgctgaggcacttctgggagctggctgtgatcctgagctccgagactttcgaggaaatacccccctacaccttgcctgtgagcagggctgcctggccagcgtgggagtcctgactcagtccttgacaccggactcatcctcctgaaggtacaatacatggccccgttttacctttagctcttcatggtactggatcgggagcttgggctgggtgcgtgcatgtcggaccgta

SEQ ID NO: 437435 - DNA, 2649 bp, Homo sapiens
  misc_feature (2028)..(2028): n is a, c, g, or t
  misc_feature (2031)..(2031): n is a, c, g, or t
  misc_feature (2035)..(2035): n is a, c, g, or t
aaaagatcaaaaaacggaaaggaccggcaggttggcaaaccccaaagagggaccgcccatcaggtcggcgtccttgggatctcagcagccgacgaccccaattcaaatcgatcgtgggaaaccccagggaaagaaggctcacttgcagagggacaggattacagggtgcaggctgcagggaagtaccggggggagggggcctggtcggaaggactttccagccactcggcgctcatcaaaaagttccctgtccgtgaccctagtggctcatcgcagggagtttctccgatgaaccccagctcagggtttaggcttctttttccccctagcagaggacgaagccagttctctttttctggtctgactggcttggaaattccccgagcctgaccccgccccagagaaatccccagccagcgtttatagggcgccgcggcggcgctgcagagcccacagcagtccgtgccgccgtcccgcccgccagcgccccagcgaggaagcagcgcgcagcccgcggcccagcgcacccgcagcagcgcccgcagctcgtccgcgccatgttccaggcggccgagcgcccccaggagtgggccatggagggcccccgcgacgggctgaagaaggagcggctactggacgaccgccacgacagcggcctggactccatgaaagacgaggagtacgagcagatggtcaaggagctgcaggagatccgcctcgagccgcaggaggtgccgcgcggctcggagccctggaagcagcagctcaccgaggacggggactcgttcctgcacttggccatcatccatgaagaaaaggcactgaccatggaagtgatccgccaggtgaagggagacctggccttcctcaacttccagaacaacctgcagcagactccactccacttggctgtgatcaccaaccagccagaaattgctgaggcacttctgggagctggctgtgatcctgagctccgagactttcgaggaaatacccccctacaccttgcctgtgagcagggctgcctggccagcgtgggagtcctgactcagtcctgcaccaccccgcacctccactccatcctgaaggctaccaactacaatggccacacgtgtctacacttagcctctatccatggctacctgggcatcgtggagcttttggtgtccttgggtgctgatgtcaatgctcaggagccctgtaatggccggactgcccttcacctcgcagtggacctgcaaaatcctgacctggtgtcactcctgttgaagtgtggggctgatgtcaacagagttacctaccagggctattctccctaccagctcacctggggccgcccaagcacccggatacagcagcagctgggccagctgacactagaaaaccttcagatgctgccagagagtgaggatgaggagagctatgacacagagtcagagttcacggagttcacagaggacgagctgccctatgatgactgtgtgtttggaggccagcgtctgacgttatgagcgcaaaggggctgaaagaacatggacttgtatatttgtacaaaaaaaaagttttatttttctaaaaaaagaaaaaagaagaaaaaatttaaagggtgtacttatatccacactgcacactgcctggcccaaaacgtcttattgtggtaggatcagccctcattttgttgcttttgtgaactttttgtaggggacgagaaagatcattgaaattctgagaaaacttcttttaaacctcacctttgtggggtttttggagaaggttatcaaaaatttcatggaaggaccacattttatatttattgtgcttcgagtgactgaccccagtggtatcctgtgacatgtaacagccaggagtgttaagcgttcagtgatgtggggtgaaaagttactacctgtcaaggtttgtgttaccctcctgtaaatggtgtacataatgtattgttggtaattattttggtacttttatgatgtatatttattaaacagatttttacaaatgaaaaaaaaaaaaaanaanaaanaaaaaaatgtgtgtgtggggcggccggggcccgtggagaaaagtttctaaaacacattgtggttgtggggggcggggcccagacaggggataggatacaccggggccaaaggcgtggccccaagaagagaaccggggtccgagaacacggctgtggggcatccccaccacaaaaaaaaaacgcccgggacgggacacgagacgggtttcggaaacaaatcacaagggacccacgggggccacacgggggctcttatacacgggaggccaagggcagcacgggactactaaaaatacgccccgggggggggagtaaaaaatagaagagaggaaacgcaaaggacgagaacacacggaggacgcgagagcgtaacagccaagagagggcagaacagaaggaacgggcaaaacggagagggagcggagggaaggggagaggcgacgggcggaagacgagggcaaggcgggggcggaggaagagcgcaaagacgaagaggaaagacaagagacgagagggggaagacgggggagacggacagccgcaaagagaagagaagagagaaggaggggaaaacggaaggggagcggaaggacgaggcacagaaagagagaaac

SEQ ID NO: 437436 - DNA, 2138 bp, Homo sapiens
  misc_feature (2028)..(2028): n is a, c, g, or t
  misc_feature (2031)..(2031): n is a, c, g, or t
  misc_feature (2035)..(2035): n is a, c, g, or t
  misc_feature (2095)..(2095): n is a, c, g, or t
aaaagatcaaaaaacggaaaggaccggcaggttggcaaaccccaaagagggaccgcccatcaggtcggcgtccttgggatctcagcagccgacgaccccaattcaaatcgatcgtgggaaaccccagggaaagaaggctcacttgcagagggacaggattacagggtgcaggctgcagggaagtaccggggggagggggcctggtcggaaggactttccagccactcggcgctcatcaaaaagttccctgtccgtgaccctagtggctcatcgcagggagtttctccgatgaaccccagctcagggtttaggcttctttttccccctagcagaggacgaagccagttctctttttctggtctgactggcttggaaattccccgagcctgaccccgccccagagaaatccccagccagcgtttatagggcgccgcggcggcgctgcagagcccacagcagtccgtgccgccgtcccgcccgccagcgccccagcgaggaagcagcgcgcagcccgcggcccagcgcacccgcagcagcgcccgcagctcgtccgcgccatgttccaggcggccgagcgcccccaggagtgggccatggagggcccccgcgacgggctgaagaaggagcggctactggacgaccgccacgacagcggcctggactccatgaaagacgaggagtacgagcagatggtcaaggagctgcaggagatccgcctcgagccgcaggaggtgccgcgcggctcggagccctggaagcagcagctcaccgaggacggggactcgttcctgcacttggccatcatccatgaagaaaaggcactgaccatggaagtgatccgccaggtgaagggagacctggccttcctcaacttccagaacaacctgcagcagactccactccacttggctgtgatcaccaaccagccagaaattgctgaggcacttctgggagctggctgtgatcctgagctccgagactttcgaggaaatacccccctacaccttgcctgtgagcagggctgcctggccagcgtgggagtcctgactcagtcctgcaccaccccgcacctccactccatcctgaaggctaccaactacaatggccacacgtgtctacacttagcctctatccatggctacctgggcatcgtggagcttttggtgtccttgggtgctgatgtcaatgctcaggagccctgtaatggccggactgcccttcacctcgcagtggacctgcaaaatcctgacctggtgtcactcctgttgaagtgtggggctgatgtcaacagagttacctaccagggctattctccctaccagctcacctggggccgcccaagcacccggatacagcagcagctgggccagctgacactagaaaaccttcagatgctgccagagagtgaggatgaggagagctatgacacagagtcagagttcacggagttcacagaggacgagctgccctatgatgactgtgtgtttggaggccagcgtctgacgttatgagcgcaaaggggctgaaagaacatggacttgtatatttgtacaaaaaaaaagttttatttttctaaaaaaagaaaaaagaagaaaaaatttaaagggtgtacttatatccacactgcacactgcctggcccaaaacgtcttattgtggtaggatcagccctcattttgttgcttttgtgaactttttgtaggggacgagaaagatcattgaaattctgagaaaacttcttttaaacctcacctttgtggggtttttggagaaggttatcaaaaatttcatggaaggaccacattttatatttattgtgcttcgagtgactgaccccagtggtatcctgtgacatgtaacagccaggagtgttaagcgttcagtgatgtggggtgaaaagttactacctgtcaaggtttgtgttaccctcctgtaaatggtgtacataatgtattgttggtaattattttggtacttttatgatgtatatttattaaacagatttttacaaatgaaaaaaaaaaaaaanaanaaanaaaaaaaaaaaaaaaaaaaaaaaaaaaaaaaaaaaaaaaaaaaaaaaaaaaaaaaaaaanaggaggggggcgcgcgcccgagacccccccgggggggcgccca

SEQ ID NO: 437437 - DNA, 2053 bp, Homo sapiens
aaaagatcaaaaaacggaaaggaccggcaggttggcaaaccccaaagagggaccgcccatcaggtcggcgtccttgggatctcagcagccgacgaccccaattcaaatcgatcgtgggaaaccccagggaaagaaggctcacttgcagagggacaggattacagggtgcaggctgcagggaagtaccggggggagggggcctggtcggaaggactttccagccactcggcgctcatcaaaaagttccctgtccgtgaccctagtggctcatcgcagggagtttctccgatgaaccccagctcagggtttaggcttctttttccccctagcagaggacgaagccagttctctttttctggtctgactggcttggaaattccccgagcctgaccccgccccagagaaatccccagccagcgtttatagggcgccgcggcggcgctgcagagcccacagcagtccgtgccgccgtcccgcccgccagcgccccagcgaggaagcagcgcgcagcccgcggcccagcgcacccgcagcagcgcccgcagctcgtccgcgccatgttccaggcggccgagcgcccccaggagtgggccatggagggcccccgcgacgggctgaagaaggagcggctactggacgaccgccacgacagcggcctggactccatgaaagacgaggagtacgagcagatggtcaaggagctgcaggagatccgcctcgagccgcaggaggtgccgcgcggctcggagccctggaagcagcagctcaccgaggacggggactcgttcctgcacttggccatcatccatgaagaaaaggcactgaccatggaagtgatccgccaggtgaagggagacctggccttcctcaacttccagaacaacctgcagcagactccactccacttggctgtgatcaccaaccagccagaaattgctgaggcacttctgggagctggctgtgatcctgagctccgagactttcgaggaaatacccccctacaccttgcctgtgagcagggctgcctggccagcgtgggagtcctgactcagtcctgcaccaccccgcacctccactccatcctgaaggctaccaactacaatggccacacgtgtctacacttagcctctatccatggctacctgggcatcgtggagcttttggtgtccttgggtgctgatgtcaatgctcaggagccctgtaatggccggactgcccttcacctcgcagtggacctgcaaaatcctgacctggtgtcactcctgttgaagtgtggggctgatgtcaacagagttacctaccagggctattctccctaccagctcacctggggccgcccaagcacccggatacagcagcagctgggccagctgacactagaaaaccttcagatgctgccagagagtgaggatgaggagagctatgacacagagtcagagttcacggagttcacagaggacgagctgccctatgatgactgtgtgtttggaggccagcgtctgacgttatgagcgcaaaggggctgaaagaacatggacttgtatatttgtacaaaaaaaaagttttatttttctaaaaaaagaaaaaagaagaaaaaatttaaagggtgtacttatatccacactgcacactgcctggcccaaaacgtcttattgtggtaggatcagccctcattttgttgcttttgtgaactttttgtaggggacgagaaagatcattgaaattctgagaaaacttcttttaaacctcacctttgtggggtttttggagaaggttatcaaaaatttcatggaaggaccacattttatatttattgtgcttcgagtgactgaccccagtggtatcctgtgacatgtaacagccaggagtgttaagcgttcagtgatgtggggtgaaaagttactacctgtcaaggtttgtgttaccctcctgtaaatggtgtacataatgtattgttggtaattattttggtacttttatgatgtatatttattaaacagatttttacaaatgagtcgacgcggccgcgaatttagtagtagtaatagtagta

SEQ ID NO: 437438 - DNA, 1992 bp, Homo sapiens
aaaagatcaaaaaacggaaaggaccggcaggttggcaaaccccaaagagggaccgcccatcaggtcggcgtccttgggatctcagcagccgacgaccccaattcaaatcgatcgtgggaaaccccagggaaagaaggctcacttgcagagggacaggattacagggtgcaggctgcagggaagtaccggggggagggggcctggtcggaaggactttccagccactcggcgctcatcaaaaagttccctgtccgtgaccctagtggctcatcgcagggagtttctccgatgaaccccagctcagggtttaggcttctttttccccctagcagaggacgaagccagttctctttttctggtctgactggcttggaaattccccgagcctgaccccgccccagagaaatccccagccagcgtttatagggcgccgcggcggcgctgcagagcccacagcagtccgtgccgccgtcccgcccgccagcgccccagcgaggaagcagcgcgcagcccgcggcccagcgcacccgcagcagcgcccgcagctcgtccgcgccatgttccaggcggccgagcgcccccaggagtgggccatggagggcccccgcgacgggctgaagaaggagcggctactggacgaccgccacgacagcggcctggactccatgaaagacgaggagtacgagcagatggtcaaggagctgcaggagatccgcctcgagccgcaggaggtgccgcgcggctcggagccctggaagcagcagctcaccgaggacggggactcgttcctgcacttggccatcatccatgaagaaaaggcactgaccatggaagtgatccgccaggtgaagggagacctggccttcctcaacttccagaacaacctgcagcagactccactccacttggctgtgatcaccaaccagccagaaattgctgaggcacttctgggagctggctgtgatcctgagctccgagactttcgaggaaatacccccctacaccttgcctgtgagcagggctgcctggccagcgtgggagtcctgactcagtcctgcaccaccccgcacctccactccatcctgaaggctaccaactacaatggccacacgtgtctacacttagcctctatccatggctacctgggcatcgtggagcttttggtgtccttgggtgctgatgtcaatgctcaggagccctgtaatggccggactgcccttcacctcgcagtggacctgcaaaatcctgacctggtgtcactcctgttgaagtgtggggctgatgtcaacagagttacctaccagggctattctccctaccagctcacctggggccgcccaagcacccggatacagcagcagctgggccagctgacactagaaaaccttcagatgctgccagagagtgaggatgaggagagctatgacacagagtcagagttcacggagttcacagaggacgagctgccctatgatgactgtgtgtttggaggccagcgtctgacgttatgagcgcaaaggggctgaaagaacatggacttgtatatttgtacaaaaaaaaagttttatttttctaaaaaaagaaaaaagaagaaaaaatttaaagggtgtacttatatccacactgcacactgcctggcccaaaacgtcttattgtggtaggatcagccctcattttgttgcttttgtgaactttttgtaggggacgagaaagatcattgaaattctgagaaaacttcttttaaacctcacctttgtggggtttttggagaaggttatcaaaaatttcatggaaggaccacattttatatttattgtgcttcgagtgactgaccccagtggtatcctgtgacatgtaacagccaggagtgttaagcgttcagtgatgtggggtgtgtattgttggcaataatttggtccttctatgacgcctatttatcaaaccactttttcccatcccatctgccaaccgcccgtcgcccccctttggccc

SEQ ID NO: 437439 - DNA, 1245 bp, Homo sapiens
tgccagccctccccacccccctgtctaggaggagcagcacccaacaggagacacgggttgaggggaactcggggtgtgggtttggtccatggcttactttctctggtctctcttgcattcgtagactccactccacttggctgtgatcaccaaccagccagaaattgctgaggcacttctgggagctggctgtgatcctgagctccgagactttcgaggaaatacccccctacaccttgcctgtgagcagggctgcctggccagcgtgggagtcctgactcagtcctgcaccaccccgcacctccactccatcctgaaggctaccaactacaatggccacacgtgtctacacttagcctctatccatggctacctgggcatcgtggagcttttggtgtccttgggtgctgatgtcaatgctcaggagccctgtaatggccggactgcccttcacctcgcagtggacctgcaaaatcctgacctggtgtcactcctgttgaagtgtggggctgatgtcaacagagttacctaccagggctattctccctaccagctcacctggggccgcccaagcacccggatacagcagcagctgggccagctgacactagaaaaccttcagatgctgccagagagtgaggatgaggagagctatgacacagagtcagagttcacggagttcacagaggacgagctgccctatgatgactgtgtgtttggaggccagcgtctgacgttatgagcgcaaaggggctgaaagaacatggacttgtatatttgtacaaaaaaaaagttttatttttctaaaaaaagaaaaaagaagaaaaaatttaaagggtgtacttatatccacactgcacactgcctggcccaaaacgtcttattgtggtaggatcagccctcattttgttgcttttgtgaactttttgtaggggacgagaaagatcattgaaattctgagaaaacttcttttaaacctcacctttgtggggtttttggagaaggttatcaaaaatttcatggaaggaccacattttatatttattgtgcttcgagtgactgaccccagtggtatcctgtgacatgtaacagccaggagtgttaagcgttcagtgatgtggggtgaaaagttactacctgtcaaggtttgtgttaccctcctgtaaatggtgtacataatgtattgttggtaattattttggtacttttatgatgtatatttattaaacagatttttacaaatga

SEQ ID NO: 437440 - DNA, 2302 bp, Homo sapiens
aaaagatcaaaaaacggaaaggaccggcaggttggcaaaccccaaagagggaccgcccatcaggtcggcgtccttgggatctcagcagccgacgaccccaattcaaatcgatcgtgggaaaccccagggaaagaaggctcacttgcagagggacaggattacagggtgcaggctgcagggaagtaccggggggagggggcctggtcggaaggactttccagccactcggcgctcatcaaaaagttccctgtccgtgaccctagtggctcatcgcagggagtttctccgatgaaccccagctcagggtttaggcttctttttccccctagcagaggacgaagccagttctctttttctggtctgactggcttggaaattccccgagcctgaccccgccccagagaaatccccagccagcgtttatagggcgccgcggcggcgctgcagagcccacagcagtccgtgccgccgtcccgcccgccagcgccccagcgaggaagcagcgcgcagcccgcggcccagcgcacccgcagcagcgcccgcagctcgtccgcgccatgttccaggcggccgagcgcccccaggagtgggccatggagggcccccgcgacgggctgaagaaggagcggctactggacgaccgccacgacagcggcctggactccatgaaagacgaggagtacgagcagatggtcaaggagctgcaggagatccgcctcgagccgcaggaggtgccgcgcggctcggagccctggaagcagcagctcaccgaggacggggactcgttcctgcacttggccatcatccatgaagaaaaggcactgaccatggaagtgatccgccaggtgaagggagacctggccttcctcaacttccagaacaacctgcagcagactccactccacttggctgtgatcaccaaccagccagaaattgctgaggcacttctgggagctggctgtgatcctgagctccgagactttcgaggaaatacccccctacaccttgcctgtgagcagggctgcctggccagcgtgggagtcctgactcagtcctgcaccaccccgcacctccactccatcctgaaggctaccaactacaatggtatgtctgcctccctgccctgccccaccccctcggagggcaggtgacgtggagaaggggcaggtgggccaacttaaggagtccaggcaagagcttaaactcctaacatttggaaggttgagaaaatatgtgtgcaaagtgcctattggatgcctttataaagttctttcagaacccagactgtgggttcttaaaattcagaagataagactacttgttccataaaagaataggtgaaaggagtgagggttgaaacaggtggttatacttttttccttttgttcttccgccacacgtgtctacacttagcctctatccatggctacctgggcatcgtggagcttttggtgtccttgggtgctgatgtcaatgctcaggagccctgtaatggccggactgcccttcacctcgcagtggacctgcaaaatcctgacctggtgtcactcctgttgaagtgtggggctgatgtcaacagagttacctaccagggctattctccctaccagctcacctggggccgcccaagcacccggatacagcagcagctgggccagctgacactagaaaaccttcagatgctgccagagagtgaggatgaggagagctatgacacagagtcagagttcacggagttcacagaggacgagctgccctatgatgactgtgtgtttggaggccagcgtctgacgttatgagcgcaaaggggctgaaagaacatggacttgtatatttgtacaaaaaaaaagttttatttttctaaaaaaagaaaaaagaagaaaaaatttaaagggtgtacttatatccacactgcacactgcctggcccaaaacgtcttattgtggtaggatcagccctcattttgttgcttttgtgaactttttgtaggggacgagaaagatcattgaaattctgagaaaacttcttttaaacctcacctttgtggggtttttggagaaggttatcaaaaatttcatggaaggaccacattttatatttattgtgcttcgagtgactgaccccagtggtatcctgtgacatgtaacagccaggagtgttaagcgttcagtgatgtggggtgaaaagttactacctgtcaaggtttgtgttaccctcctgtaaatggtgtacataatgtattgttggtaattattttggtacttttatgatgtatatttattaaacagatttttacaaatga

SEQ ID NO: 437441 - DNA, 1106 bp, Homo sapiens
gcggcgcctaataattactaaattcgcggccgctcgacctgggagctggctgtgaagtccctctgctggtgcttcaagcagtttgaaggcctatacgtcgactgtgagcagggctgcctggccagcgtgggagtcctgactcagtcctgcaccaccccgcacctccactccatcctgaaggctaccaactacaatggccacacgtgtctacacttagcctctatccatggctacctgggcatcgtggagcttttggtgtccttgggtgctgatgtcaatgctcaggagccctgtaatggccggactgcccttcacctcgcagtggacctgcaaaatcctgacctggtgtcactcctgttgaagtgtggggctgatgtcaacagagttacctaccagggctattctccctaccagctcacctggggccgcccaagcacccggatacagcagcagctgggccagctgacactagaaaaccttcagatgctgccagagagtgaggatgaggagagctatgacacagagtcagagttcacggagttcacagaggacgagctgccctatgatgactgtgtgtttggaggccagcgtctgacgttatgagcgcaaaggggctgaaagaacatggacttgtatatttgtacaaaaaaaaagttttatttttctaaaaaaagaaaaaagaagaaaaaatttaaagggtgtacttatatccacactgcacactgcctggcccaaaacgtcttattgtggtaggatcagccctcattttgttgcttttgtgaactttttgtaggggacgagaaagatcattgaaattctgagaaaacttcttttaaacctcacctttgtggggtttttggagaaggttatcaaaaatttcatggaaggaccacattttatatttattgtgcttcgagtgactgaccccagtggtatcctgtgacatgtaacagccaggagtgttaagcgttcagtgatgtggggtgaaaagttactacctgtcaaggtttgtgttaccctcctgtaaatggtgtacataatgtattgttggtaattattttggtacttttatgatgtatatttattaaacagatttttacaaatga

SEQ ID NO: 437442 - DNA, 2343 bp, Homo sapiens
aaaagatcaaaaaacggaaaggaccggcaggttggcaaaccccaaagagggaccgcccatcaggtcggcgtccttgggatctcagcagccgacgaccccaattcaaatcgatcgtgggaaaccccagggaaagaaggctcacttgcagagggacaggattacagggtgcaggctgcagggaagtaccggggggagggggcctggtcggaaggactttccagccactcggcgctcatcaaaaagttccctgtccgtgaccctagtggctcatcgcagggagtttctccgatgaaccccagctcagggtttaggcttctttttccccctagcagaggacgaagccagttctctttttctggtctgactggcttggaaattccccgagcctgaccccgccccagagaaatccccagccagcgtttatagggcgccgcggcggcgctgcagagcccacagcagtccgtgccgccgtcccgcccgccagcgccccagcgaggaagcagcgcgcagcccgcggcccagcgcacccgcagcagcgcccgcagctcgtccgcgccatgttccaggcggccgagcgcccccaggagtgggccatggagggcccccgcgacgggctgaagaaggagcggctactggacgaccgccacgacagcggcctggactccatgaaagacgaggagtacgagcagatggtcaaggagctgcaggagatccgcctcgagccgcaggaggtgccgcgcggctcggagccctggaagcagcagctcaccgaggacggggactcgttcctgcacttggccatcatccatgaagaaaaggcactgaccatggaagtgatccgccaggtgaagggagacctggccttcctcaacttccagaacaacctgcagcagactccactccacttggctgtgatcaccaaccagccagaaattgctgaggcacttctgggagctggctgtgatcctgagctccgagactttcgaggaaatacccccctacaccttgcctgtgagcagggctgcctggccagcgtgggagtcctgactcagtcctgcaccaccccgcacctccactccatcctgaaggctaccaactacaatggtatgtctgcctccctgccctgccccaccccctcggagggcaggtgacgtggagaaggggcaggtgggccaacttaaggagtccaggcaagagcttaaactcctaacatttggaaggttgagaaaatatgtgtgcaaagtgcctattggatgcctttataaagttctttcagaacccagactgtgggttcttaaaattcagaagataagactacttgttccagccacacgtgtctacacttagcctctatccatggctacctgggcatcgtggagcttttggtgtccttgggtgctgatgtcaatgctcaggttggtgcttcctgcccccgacgcactgagtcaggctcctcgtgcttatgttgtgagcagaaattccaaatgcagccataagcatctcaaattccttttggtttcaggagccctgtaatggccggactgcccttcacctcgcagtggacctgcaaaatcctgacctggtgtcactcctgttgaagtgtggggctgatgtcaacagagttacctaccagggctattctccctaccagctcacctggggccgcccaagcacccggatacagcagcagctgggccagctgacactagaaaaccttcagatgctgccagagagtgaggatgaggagagctatgacacagagtcagagttcacggagttcacagaggacgagctgccctatgatgactgtgtgtttggaggccagcgtctgacgttatgagcgcaaaggggctgaaagaacatggacttgtatatttgtacaaaaaaaaagttttatttttctaaaaaaagaaaaaagaagaaaaaatttaaagggtgtacttatatccacactgcacactgcctggcccaaaacgtcttattgtggtaggatcagccctcattttgttgcttttgtgaactttttgtaggggacgagaaagatcattgaaattctgagaaaacttcttttaaacctcacctttgtggggtttttggagaaggttatcaaaaatttcatggaaggaccacattttatatttattgtgcttcgagtgactgaccccagtggtatcctgtgacatgtaacagccaggagtgttaagcgttcagtgatgtggggtgaaaagttactacctgtcaaggtttgtgttaccctcctgtaaatggtgtacataatgtattgttggtaattattttggtacttttatgatgtatatttattaaacagatttttacaaatga

SEQ ID NO: 437443 - DNA, 1111 bp, Homo sapiens
cgaaattaatcctccatgacataaatttggtatatctgtatagttaggacaaagttaagttcagaacaccgctgttgacacctaataatttatttctttttttgagacagagtcccactctgtcgcccaggctggagtgcagtgacgcagtctcggcccaccgcaacctccgctccatcctgaaggctaccaactacaatggccacacgtgtctacacttagcctctatccatggctacctgggcatcgtggagcttttggtgtccttgggtgctgatgtcaatgctcaggagccctgtaatggccggactgcccttcacctcgcagtggacctgcaaaatcctgacctggtgtcactcctgttgaagtgtggggctgatgtcaacagagttacctaccagggctattctccctaccagctcacctggggccgcccaagcacccggatacagcagcagctgggccagctgacactagaaaaccttcagatgctgccagagagtgaggatgaggagagctatgacacagagtcagagttcacggagttcacagaggacgagctgccctatgatgactgtgtgtttggaggccagcgtctgacgttatgagcgcaaaggggctgaaagaacatggacttgtatatttgtacaaaaaaaaagttttatttttctaaaaaaagaaaaaagaagaaaaaatttaaagggtgtacttatatccacactgcacactgcctggcccaaaacgtcttattgtggtaggatcagccctcattttgttgcttttgtgaactttttgtaggggacgagaaagatcattgaaattctgagaaaacttcttttaaacctcacctttgtggggtttttggagaaggttatcaaaaatttcatggaaggaccacattttatatttattgtgcttcgagtgactgaccccagtggtatcctgtgacatgtaacagccaggagtgttaagcgttcagtgatgtggggtgaaaagttactacctgtcaaggtttgtgttaccctcctgtaaatggtgtacataatgtattgttggtaattattttggtacttttatgatgtatatttattaaacagatttttacaaatga

SEQ ID NO: 437444 - DNA, 1167 bp, Homo sapiens
aaaagatcaaaaaacggaaaggaccggcaggttggcaaaccccaaagagggaccgcccatcaggtcggcgtccttgggatctcagcagccgacgaccccaattcaaatcgatcgtgggaaaccccagggaaagaaggctcacttgcagagggacaggattacagggtgcaggctgcagggaagtaccggggggagggggcctggtcggaaggactttccagccactcggcgctcatcaaaaagttccctgtccgtgaccctagtggctcatcgcagggagtttctccgatgaaccccagctcagggtttaggcttctttttccccctagcagaggacgaagccagttctctttttctggtctgactggcttggaaattccccgagcctgaccccgccccagagaaatccccagccagcgtttatagggcgccgcggcggcgctgcagagcccacagcagtccgtgccgccgtcccgcccgccagcgccccagcgaggaagcagcgcgcagcccgcggcccagcgcacccgcagcagcgcccgcagctcgtccgcgccatgttccaggcggccgagcgcccccaggagtgggccatggagggcccccgcgacgggctgaagaaggagcggctactggacgaccgccacgacagcggcctggactccatgaaagacgaggagtacgagcagatggtcaaggagctgcaggagatccgcctcgagccgcaggaggtgccgcgcggctcggagccctggaagcagcagctcaccgaggacggggactcgttcctgcacttggccatcatccatgaagaaaaggcactgaccatggaagtgatccgccaggtgaagggagacctggccttcctcaacttccagaacaacctgcagcagactccactccacttggctgtgatcaccaaccagccagaaattgctgaggcacttctgggagctggctgtgatcctgagctccgagactttcgaggaaatacccccctacaccttgcctgtgagcagggctgcctggccagcgtgggagtcctgactcagtcctgcaccaccccgcacctccactccatcctgaaggctaccaactacaatgaccacacgtgtctacacttactctatccatggctacccgactcgcctggggatccttagagtc

SEQ ID NO: 437445 - DNA, 2014 bp, Homo sapiens
aaaagatcaaaaaacggaaaggaccggcaggttggcaaaccccaaagagggaccgcccatcaggtcggcgtccttgggatctcagcagccgacgaccccaattcaaatcgatcgtgggaaaccccagggaaagaaggctcacttgcagagggacaggattacagggtgcaggctgcagggaagtaccggggggagggggcctggtcggaaggactttccagccactcggcgctcatcaaaaagttccctgtccgtgaccctagtggctcatcgcagggagtttctccgatgaaccccagctcagggtttaggcttctttttccccctagcagaggacgaagccagttctctttttctggtctgactggcttggaaattccccgagcctgaccccgccccagagaaatccccagccagcgtttatagggcgccgcggcggcgctgcagagcccacagcagtccgtgccgccgtcccgcccgccagcgccccagcgaggaagcagcgcgcagcccgcggcccagcgcacccgcagcagcgcccgcagctcgtccgcgccatgttccaggcggccgagcgcccccaggagtgggccatggagggcccccgcgacgggctgaagaaggagcggctactggacgaccgccacgacagcggcctggactccatgaaagacgaggagtacgagcagatggtcaaggagctgcaggagatccgcctcgagccgcaggaggtgccgcgcggctcggagccctggaagcagcagctcaccgaggacggggactcgttcctgcacttggccatcatccatgaagaaaaggcactgaccatggaagtgatccgccaggtgaagggagacctggccttcctcaacttccagaacaacctgcagcagactccactccacttggctgtgatcaccaaccagccagaaattgctgaggcacttctgggagctggctgtgatcctgagctccgagactttcgaggaaatacccccctacaccttgcctgtgagcagggctgcctggccagcgtgggagtcctgactcagtcctgcaccaccccgcacctccactccatcctgaaggctaccaactacaatggccacacgtgtctacacttagcctctatccatggctacctgggcatcgtggagcttttggtgtccttgggtgctgatgtcaatgctcaggagccctgtaatggccggactgcccttcacctcgcagtggacctgcaaaatcctgacctggtgtcactcctgttgaagtgtggggctgatgtcaacagagttacctaccagggctattctccctaccagctcacctggggccgcccaagcacccggatacagcagcagctgggccagctgacactagaaaaccttcagatgctgccagagagtgaggatgaggagagctatgacacagagtcagagttcacggagttcacagaggacgagctgccctatgatgactgtgtgtttggaggccagcgtctgacgttatgagcgcaaaggggctgaaagaacatggacttgtatatttgtacaaaaaaaaagttttatttttctaaaaaaagaaaaaagaagaaaaaatttaaagggtgtacttatatccacactgcacactgcctggcccaaaacgtcttattgtggtaggatcagccctcattttgttgcttttgtgaactttttgtaggggacgagaaagatcattgaaattctgagaaaacttcttttaaacctcacctttgtggggtttttggagaaggttatcaaaaatttcatggaaggaccacattttatatttattgtgcttcgagtgactgaccccagtggtatcctgtgacatgtaacagccaggagtgttaagcgttcagtgatgtggggtgaaaagttactacctgtcaaggtttgtgttaccctcctgtaaatggtgtacataatgtattgttggtaattattttggtacttttatgatgtatatttattaaacagatttttacaaatga

SEQ ID NO: 437446 - DNA, 2353 bp, Homo sapiens
  misc_feature (2332)..(2332): n is a, c, g, or t
  misc_feature (2353)..(2353): n is a, c, g, or t
aaaagatcaaaaaacggaaaggaccggcaggttggcaaaccccaaagagggaccgcccatcaggtcggcgtccttgggatctcagcagccgacgaccccaattcaaatcgatcgtgggaaaccccagggaaagaaggctcacttgcagagggacaggattacagggtgcaggctgcagggaagtaccggggggagggggcctggtcggaaggactttccagccactcggcgctcatcaaaaagttccctgtccgtgaccctagtggctcatcgcagggagtttctccgatgaaccccagctcagggtttaggcttctttttccccctagcagaggacgaagccagttctctttttctggtctgactggcttggaaattccccgagcctgaccccgccccagagaaatccccagccagcgtttatagggcgccgcggcggcgctgcagagcccacagcagtccgtgccgccgtcccgcccgccagcgccccagcgaggaagcagcgcgcagcccgcggcccagcgcacccgcagcagcgcccgcagctcgtccgcgccatgttccaggcggccgagcgcccccaggagtgggccatggagggcccccgcgacgggctgaagaaggagcggctactggacgaccgccacgacagcggcctggactccatgaaagacgaggagtacgagcagatggtcaaggagctgcaggagatccgcctcgagccgcaggaggtgccgcgcggctcggagccctggaagcagcagctcaccgaggacggggactcgttcctgcacttggccatcatccatgaagaaaaggcactgaccatggaagtgatccgccaggtgaagggagacctggccttcctcaacttccagaacaacctgcagcagactccactccacttggctgtgatcaccaaccagccagaaattgctgaggcacttctgggagctggctgtgatcctgagctccgagactttcgaggaaatacccccctacaccttgcctgtgagcagggctgcctggccagcgtgggagtcctgactcagtcctgcaccaccccgcacctccactccatcctgaaggctaccaactacaatggccacacgtgtctacacttagcctctatccatggctacctgggcatcgtggagcttttggtgtccttgggtgctgatgtcaatgctcaggagccctgtaatggccggactgcccttcacctcgcagtggacctgcaaaatcctgacctggtgtcactcctgttgaagtgtggggctgatgtcaacagagttacctaccagggctattctccctaccagctcacctggggccgcccaagcacccggatacagcagcagctgggccagctgacactagaaaaccttcagatgctgccagagagtgaggatgaggagagctatgacacagagtcagagttcacggagttcacagaggacgagctgccctatgatgactgtgtgtttggaggccagcgtctgacgttatgagcgcaaaggggctgaaagaacatggacttgtatatttgtacaaaaaaaaagttttatttttctaaaaaaagaaaaaagaagaaaaaatttaaagggtgtacttatatccacactgcacactgcctggcccaaaacgtcttattgtggtaggatcagccctcattttgttgcttttgtgaactttttgtaggggacgagaaagatcattgaaattctgagaaaacttcttttaaacctcacctttgtggggtttttggagaaggttatcaaaaatttcatggaaggaccacattttatatttattgtgcttcgagtgactgaccccagtggtatcctgtgacatgtaacagccaggagtgttaagcgttcagtgatgtggggtgaaaagttactacctgtcaaggtttgtgttaccctcctgtaaatggtgtacataatgtattgttggtaattattttggtacttttatgatgtatatttattaaacagatttttacaaatgaaaaaaaaaaaaaaaaacgggggttaattgggggggggaaaaaggggttggaattggcgcaatgggtctaaggctgtttcccggacccagtttttttgtccaggggggaaaatcgcagggtcccaaagagaggcgattaaatttcagaagccagttacctgtaaaatactcgcgaaaaaaagctaacacacagcaacgaacgcagcaccaatcacaaaaggatacagatcagcacaagacaagagccagaacatatagcagactcgcaacatcacctcaaaagaagagtagacaagatacaacatagcagtcagtcacnatctaaaaacatatttagtcn

SEQ ID NO: 437447 - DNA, 2110 bp, Homo sapiens
  misc_feature (2067)..(2067): n is a, c, g, or t
aaaagatcaaaaaacggaaaggaccggcaggttggcaaaccccaaagagggaccgcccatcaggtcggcgtccttgggatctcagcagccgacgaccccaattcaaatcgatcgtgggaaaccccagggaaagaaggctcacttgcagagggacaggattacagggtgcaggctgcagggaagtaccggggggagggggcctggtcggaaggactttccagccactcggcgctcatcaaaaagttccctgtccgtgaccctagtggctcatcgcagggagtttctccgatgaaccccagctcagggtttaggcttctttttccccctagcagaggacgaagccagttctctttttctggtctgactggcttggaaattccccgagcctgaccccgccccagagaaatccccagccagcgtttatagggcgccgcggcggcgctgcagagcccacagcagtccgtgccgccgtcccgcccgccagcgccccagcgaggaagcagcgcgcagcccgcggcccagcgcacccgcagcagcgcccgcagctcgtccgcgccatgttccaggcggccgagcgcccccaggagtgggccatggagggcccccgcgacgggctgaagaaggagcggctactggacgaccgccacgacagcggcctggactccatgaaagacgaggagtacgagcagatggtcaaggagctgcaggagatccgcctcgagccgcaggaggtgccgcgcggctcggagccctggaagcagcagctcaccgaggacggggactcgttcctgcacttggccatcatccatgaagaaaaggcactgaccatggaagtgatccgccaggtgaagggagacctggccttcctcaacttccagaacaacctgcagcagactccactccacttggctgtgatcaccaaccagccagaaattgctgaggcacttctgggagctggctgtgatcctgagctccgagactttcgaggaaatacccccctacaccttgcctgtgagcagggctgcctggccagcgtgggagtcctgactcagtcctgcaccaccccgcacctccactccatcctgaaggctaccaactacaatggccacacgtgtctacacttagcctctatccatggctacctgggcatcgtggagcttttggtgtccttgggtgctgatgtcaatgctcaggagccctgtaatggccggactgcccttcacctcgcagtggacctgcaaaatcctgacctggtgtcactcctgttgaagtgtggggctgatgtcaacagagttacctaccagggctattctccctaccagctcacctggggccgcccaagcacccggatacagcagcagctgggccagctgacactagaaaaccttcagatgctgccagagagtgaggatgaggagagctatgacacagagtcagagttcacggagttcacagaggacgagctgccctatgatgactgtgtgtttggaggccagcgtctgacgttatgagcgcaaaggggctgaaagaacatggacttgtatatttgtacaaaaaaaaagttttatttttctaaaaaaagaaaaaagaagaaaaaatttaaagggtgtacttatatccacactgcacactgcctggcccaaaacgtcttattgtggtaggatcagccctcattttgttgcttttgtgaactttttgtaggggacgagaaagatcattgaaattctgagaaaacttcttttaaacctcacctttgtggggtttttggagaaggttatcaaaaatttcatggaaggaccacattttatatttattgtgcttcgagtgactgaccccagtggtatcctgtgacatgtaacagccaggagtgttaagcgttcagtgatgtggggtgaaaagttactacctgtcaaggtttgtgttaccctcctgtaaatggtgtacataatgtattgttggtaattattttggtacttttatgatgtatatttattaaacagatttttacaaatgaaaaaaaaaaaaaaaaaaaaaaaaaaaaaaaaaaaaaaaaaaaaaaaaaaaaanaggaggggggcgcgcgcccgagacccccccgggggggcgccca

SEQ ID NO: 437448 - DNA, 1996 bp, Homo sapiens
aaaagatcaaaaaacggaaaggaccggcaggttggcaaaccccaaagagggaccgcccatcaggtcggcgtccttgggatctcagcagccgacgaccccaattcaaatcgatcgtgggaaaccccagggaaagaaggctcacttgcagagggacaggattacagggtgcaggctgcagggaagtaccggggggagggggcctggtcggaaggactttccagccactcggcgctcatcaaaaagttccctgtccgtgaccctagtggctcatcgcagggagtttctccgatgaaccccagctcagggtttaggcttctttttccccctagcagaggacgaagccagttctctttttctggtctgactggcttggaaattccccgagcctgaccccgccccagagaaatccccagccagcgtttatagggcgccgcggcggcgctgcagagcccacagcagtccgtgccgccgtcccgcccgccagcgccccagcgaggaagcagcgcgcagcccgcggcccagcgcacccgcagcagcgcccgcagctcgtccgcgccatgttccaggcggccgagcgcccccaggagtgggccatggagggcccccgcgacgggctgaagaaggagcggctactggacgaccgccacgacagcggcctggactccatgaaagacgaggagtacgagcagatggtcaaggagctgcaggagatccgcctcgagccgcaggaggtgccgcgcggctcggagccctggaagcagcagctcaccgaggacggggactcgttcctgcacttggccatcatccatgaagaaaaggcactgaccatggaagtgatccgccaggtgaagggagacctggccttcctcaacttccagaacaacctgcagcagactccactccacttggctgtgatcaccaaccagccagaaattgctgaggcacttctgggagctggctgtgatcctgagctccgagactttcgaggaaatacccccctacaccttgcctgtgagcagggctgcctggccagcgtgggagtcctgactcagtcctgcaccaccccgcacctccactccatcctgaaggctaccaactacaatggccacacgtgtctacacttagcctctatccatggctacctgggcatcgtggagcttttggtgtccttgggtgctgatgtcaatgctcaggagccctgtaatggccggactgcccttcacctcgcagtggacctgcaaaatcctgacctggtgtcactcctgttgaagtgtggggctgatgtcaacagagttacctaccagggctattctccctaccagctcacctggggccgcccaagcacccggatacagcagcagctgggccagctgacactagaaaaccttcagatgctgccagagagtgaggatgaggagagctatgacacagagtcagagttcacggagttcacagaggacgagctgccctatgatgactgtgtgtttggaggccagcgtctgacgttatgagcgcaaaggggctgaaagaacatggacttgtatatttgtacaaaaaaaaagttttatttttctaaaaaaagaaaaaagaagaaaaaatttaaagggtgtacttatatccacactgcacactgcctggcccaaaacgtcttattgtggtaggatcagccctcattttgttgcttttgtgaactttttgtaggggacgagaaagatcattgaaattctgagaaaacttcttttaaacctcacctttgtggggtttttggagaaggttatcaaaaatttcatggaaggaccacattttatatttattgtgcttcgagtgactgaccccagtggtatcctgtgacatgtaacagccaggagtgttaagcgttcagtgatgtggggtgaaaagttactacctgtcaaggtttgtgttaccataatgtattgttggtaattattttggtacttttatgatgtatatttattaaacagatttttacaaatga

SEQ ID NO: 437449 - DNA, 1321 bp, Homo sapiens
cggccttgcgcaatcccccgcagcccgcgcctccctgggccccacgcggtgcactcaccacccctggggtttttccctctcttccccacaggttcctgcacttggccatcatccatgaagaaaaggcactgaccatggaagtgatccgccaggtgaagggagacctggccttcctcaacttccagaacaacctgcagcagactccactccacttggctgtgatcaccaaccagccagaaattgctgaggcacttctgggagctggctgtgatcctgagctccgagactttcgaggaaatacccccctacaccttgcctgtgagcagggctgcctggccagcgtgggagtcctgactcagtcctgcaccaccccgcacctccactccatcctgaaggctaccaactacaatggccacacgtgtctacacttagcctctatccatggctacctgggcatcgtggagcttttggtgtccttgggtgctgatgtcaatgctcaggagccctgtaatggccggactgcccttcacctcgcagtggacctgcaaaatcctgacctggtgtcactcctgttgaagtgtggggctgatgtcaacagagttacctaccagggctattctccctaccagctcacctggggccgcccaagcacccggatacagcagcagctgggccagctgacactagaaaaccttcagatgctgccagagagtgaggatgaggagagctatgacacagagtcagagttcacggagttcacagaggacgagctgccctatgatgactgtgtgtttggaggccagcgtctgacgttatgagcgcaaaggggctgaaagaacatggacttgtatatttgtacaaaaaaaaagttttatttttctaaaaaaagaaaaaagaagaaaaaatttaaagggtgtacttatatccacactgcacactgcctggcccaaaacgtcttattgtggtaggatcagccctcattttgttgcttttgtgaactttttgtaggggacgagaaagatcattgaaattctgagaaaacttcttttaaacctcacctttgtggggtttttggagaaggttatcaaaaatttcatggaaggaccacattttatatttattgtgcttcgagtgactgaccccagtggtatcctgtgacatgtaacagccaggagtgttaagcgttcagtgatgtggggtgaaaagttactacctgtcaaggtttgtgttaccctcctgtaaatggtgtacataatgtattgttggtaattattttggtacttttatgatgtatatttattaaacagatttttacaaatga

SEQ ID NO: 437450 - DNA, 1961 bp, Homo sapiens
aaaagatcaaaaaacggaaaggaccggcaggttggcaaaccccaaagagggaccgcccatcaggtcggcgtccttgggatctcagcagccgacgaccccaattcaaatcgatcgtgggaaaccccagggaaagaaggctcacttgcagagggacaggattacagggtgcaggctgcagggaagtaccggggggagggggcctggtcggaaggactttccagccactcggcgctcatcaaaaagttccctgtccgtgaccctagtggctcatcgcagggagtttctccgatgaaccccagctcagggtttaggcttctttttccccctagcagaggacgaagccagttctctttttctggtctgactggcttggaaattccccgagcctgaccccgccccagagaaatccccagccagcgtttatagggcgccgcggcggcgctgcagagcccacagcagtccgtgccgccgtcccgcccgccagcgccccagcgaggaagcagcgcgcagcccgcggcccagcgcacccgcagcagcgcccgcagctcgtccgcgccatgttccaggcggccgagcgcccccaggagtgggccatggagggcccccgcgacgggctgaagaaggagcggctactggacgaccgccacgacagcggcctggactccatgaaagacgaggagtacgagcagatggtcaaggagctgcaggagatccgcctcgagccgcaggaggtgccgcgcggctcggagccctggaagcagcagctcaccgaggacggggactcgttcctgcacttggccatcatccatgaagaaaaggcactgaccatggaagtgatccgccaggtgaagggagacctggccttcctcaacttccagaacaacctgcagcagactccactccacttggctgtgatcaccaaccagccagaaattgctgaggcacttctgggagctggctgtgatcctgagctccgagactttcgaggaaatacccccctacaccttgcctgtgagcagggctgcctggccagcgtgggagtcctgactcagtcctgcaccaccccgcacctccactccatcctgaaggctaccaactacaatggccacacgtgtctacacttagcctctatccatggctacctgggcatcgtggagcttttggtgtccttgggtgctgatgtcaatgctcaggagccctgtaatggccggactgcccttcacctcgcagtggacctgcaaaatcctgacctggtgtcactcctgttgaagtgtggggctgatgtcaacagagttacctaccagggctattctccctaccagctcacctggggccgcccaagcacccggatacagcagcagctgggccagctgacactagtcagagttcacggagttcacagaggacgagctgccctatgatgactgtgtgtttggaggccagcgtctgacgttatgagcgcaaaggggctgaaagaacatggacttgtatatttgtacaaaaaaaaagttttatttttctaaaaaaagaaaaaagaagaaaaaatttaaagggtgtacttatatccacactgcacactgcctggcccaaaacgtcttattgtggtaggatcagccctcattttgttgcttttgtgaactttttgtaggggacgagaaagatcattgaaattctgagaaaacttcttttaaacctcacctttgtggggtttttggagaaggttatcaaaaatttcatggaaggaccacattttatatttattgtgcttcgagtgactgaccccagtggtatcctgtgacatgtaacagccaggagtgttaagcgttcagtgatgtggggtgaaaagttactacctgtcaaggtttgtgttaccctcctgtaaatggtgtacataatgtattgttggtaattattttggtacttttatgatgtatatttattaaacagatttttacaaatga

SEQ ID NO: 437451 - DNA, 2121 bp, Homo sapiens
aaaagatcaaaaaacggaaaggaccggcaggttggcaaaccccaaagagggaccgcccatcaggtcggcgtccttgggatctcagcagccgacgaccccaattcaaatcgatcgtgggaaaccccagggaaagaaggctcacttgcagagggacaggattacagggtgcaggctgcagggaagtaccggggggagggggcctggtcggaaggactttccagccactcggcgctcatcaaaaagttccctgtccgtgaccctagtggctcatcgcagggagtttctccgatgaaccccagctcagggtttaggcttctttttccccctagcagaggacgaagccagttctctttttctggtctgactggcttggaaattccccgagcctgaccccgccccagagaaatccccagccagcgtttatagggcgccgcggcggcgctgcagagcccacagcagtccgtgccgccgtcccgcccgccagcgccccagcgaggaagcagcgcgcagcccgcggcccagcgcacccgcagcagcgcccgcagctcgtccgcgccatgttccaggcggccgagcgcccccaggagtgggccatggagggcccccgcgacgggctgaagaaggagcggctactggacgaccgccacgacagcggcctggactccatgaaagacgaggagtacgagcagatggtcaaggagctgcaggagatccgcctcgagccgcaggaggtgccgcgcggctcggagccctggaagcagcagctcaccgaggacggggactcgttcctgcacttggccatcatccatgaagaaaaggcactgaccatggaagtgatccgccaggtgaagggagacctggccttcctcaacttccagaacaacctgcagcagactccactccacttggctgtgatcaccaaccagccagaaattgctgaggcacttctgggagctggctgtgatcctgagctccgagactttcgaggaaatacccccctacaccttgcctgtgagcagggctgcctggccagcgtgggagtcctgactcagtcctgcaccaccccgcacctccactccatcctgaaggctaccaactacaatggccacacgtgtctacacttagcctctatccatggctacctgggcatcgtggagcttttggtgtccttgggtgctgatgtcaatgctcaggttggtgcttcctgcccccgacgcactgagtcaggctcctcgtgcttatgttgtgagcagaaattccaaatgcagccataagcatctcaaattccttttggtttcaggagccctgtaatggccggactgcccttcacctcgcagtggacctgcaaaatcctgacctggtgtcactcctgttgaagtgtggggctgatgtcaacagagttacctaccagggctattctccctaccagctcacctggggccgcccaagcacccggatacagcagcagctgggccagctgacactagaaaaccttcagatgctgccagagagtgaggatgaggagagctatgacacagagtcagagttcacggagttcacagaggacgagctgccctatgatgactgtgtgtttggaggccagcgtctgacgttatgagcgcaaaggggctgaaagaacatggacttgtatatttgtacaaaaaaaaagttttatttttctaaaaaaagaaaaaagaagaaaaaatttaaagggtgtacttatatccacactgcacactgcctggcccaaaacgtcttattgtggtaggatcagccctcattttgttgcttttgtgaactttttgtaggggacgagaaagatcattgaaattctgagaaaacttcttttaaacctcacctttgtggggtttttggagaaggttatcaaaaatttcatggaaggaccacattttatatttattgtgcttcgagtgactgaccccagtggtatcctgtgacatgtaacagccaggagtgttaagcgttcagtgatgtggggtgaaaagttactacctgtcaaggtttgtgttaccctcctgtaaatggtgtacataatgtattgttggtaattattttggtacttttatgatgtatatttattaaacagatttttacaaatga

SEQ ID NO: 437452 - DNA, 2409 bp, Homo sapiens
aaaagatcaaaaaacggaaaggaccggcaggttggcaaaccccaaagagggaccgcccatcaggtcggcgtccttgggatctcagcagccgacgaccccaattcaaatcgatcgtgggaaaccccagggaaagaaggctcacttgcagagggacaggattacagggtgcaggctgcagggaagtaccggggggagggggcctggtcggaaggactttccagccactcggcgctcatcaaaaagttccctgtccgtgaccctagtggctcatcgcagggagtttctccgatgaaccccagctcagggtttaggcttctttttccccctagcagaggacgaagccagttctctttttctggtctgactggcttggaaattccccgagcctgaccccgccccagagaaatccccagccagcgtttatagggcgccgcggcggcgctgcagagcccacagcagtccgtgccgccgtcccgcccgccagcgccccagcgaggaagcagcgcgcagcccgcggcccagcgcacccgcagcagcgcccgcagctcgtccgcgccatgttccaggcggccgagcgcccccaggagtgggccatggagggcccccgcgacgggctgaagaaggagcggctactggacgaccgccacgacagcggcctggactccatgaaagacgaggagtacgagcagatggtcaaggagctgcaggagatccgcctcgagccgcaggaggtgccgcgcggctcggagccctggaagcagcagctcaccgaggacggggactcgttcctgcacttggccatcatccatgaagaaaaggcactgaccatggaagtgatccgccaggtgaagggagacctggccttcctcaacttccagaacaacctgcagcagactccactccacttggctgtgatcaccaaccagccagaaattgctgaggcacttctgggagctggctgtgatcctgagctccgagactttcgaggaaatacccccctacaccttgcctgtgagcagggctgcctggccagcgtgggagtcctgactcagtcctgcaccaccccgcacctccactccatcctgaaggctaccaactacaatggtatgtctgcctccctgccctgccccaccccctcggagggcaggtgacgtggagaaggggcaggtgggccaacttaaggagtccaggcaagagcttaaactcctaacatttggaaggttgagaaaatatgtgtgcaaagtgcctattggatgcctttataaagttctttcagaacccagactgtgggttcttaaaattcagaagataagactacttgttccataaaagaataggtgaaaggagtgagggttgaaacaggtggttatacttttttccttttgttcttccgccacacgtgtctacacttagcctctatccatggctacctgggcatcgtggagcttttggtgtccttgggtgctgatgtcaatgctcaggttggtgcttcctgcccccgacgcactgagtcaggctcctcgtgcttatgttgtgagcagaaattccaaatgcagccataagcatctcaaattccttttggtttcaggagccctgtaatggccggactgcccttcacctcgcagtggacctgcaaaatcctgacctggtgtcactcctgttgaagtgtggggctgatgtcaacagagttacctaccagggctattctccctaccagctcacctggggccgcccaagcacccggatacagcagcagctgggccagctgacactagaaaaccttcagatgctgccagagagtgaggatgaggagagctatgacacagagtcagagttcacggagttcacagaggacgagctgccctatgatgactgtgtgtttggaggccagcgtctgacgttatgagcgcaaaggggctgaaagaacatggacttgtatatttgtacaaaaaaaaagttttatttttctaaaaaaagaaaaaagaagaaaaaatttaaagggtgtacttatatccacactgcacactgcctggcccaaaacgtcttattgtggtaggatcagccctcattttgttgcttttgtgaactttttgtaggggacgagaaagatcattgaaattctgagaaaacttcttttaaacctcacctttgtggggtttttggagaaggttatcaaaaatttcatggaaggaccacattttatatttattgtgcttcgagtgactgaccccagtggtatcctgtgacatgtaacagccaggagtgttaagcgttcagtgatgtggggtgaaaagttactacctgtcaaggtttgtgttaccctcctgtaaatggtgtacataatgtattgttggtaattattttggtacttttatgatgtatatttattaaacagatttttacaaatga

SEQ ID NO: 437453 - DNA, 1343 bp, Homo sapiens
aaaagatcaaaaaacggaaaggaccggcaggttggcaaaccccaaagagggaccgcccatcaggtcggcgtccttgggatctcagcagccgacgaccccaattcaaatcgatcgtgggaaaccccagggaaagaaggctcacttgcagagggacaggattacagggtgcaggctgcagggaagtaccggggggagggggcctggtcggaaggactttccagccactcggcgctcatcaaaaagttccctgtccgtgaccctagtggctcatcgcagggagtttctccgatgaaccccagctcagggtttaggcttctttttccccctagcagaggacgaagccagttctctttttctggtctgactggcttggaaattccccgagcctgaccccgccccagagaaatccccagccagcgtttatagggcgccgcggcggcgctgcagagcccacagcagtccgtgccgccgtcccgcccgccagcgccccagcgaggaagcagcgcgcagcccgcggcccagcgcacccgcagcagcgcccgcagctcgtccgcgccatgttccaggcggccgagcgcccccaggagtgggccatggagggcccccgcgacgggctgaagaaggagcggctactggacgaccgccacgacagcggcctggactccatgaaagacgaggagtacgagcagatggtcaaggagctgcaggagatccgcctcgagccgcaggaggtgccgcgcggctcggagccctggaagcagcagctcaccgaggacggggactcgttcctgcacttggccatcatccatgaagaaaaggcactgaccatggaagtgatccgccaggtgaagggagacctggccttcctcaacttccagaacaacctgcagcagactccactccacttggctgtgatcaccaaccagccagaaattgctgaggcacttctgggagctggctgtgatcctgagctccgagactttcgaggaaatacccccctacaccttgcctgtgagcagggctgcctggccagcgtgggagtcctgactcagtcctgcaccaccccgcacctccactccatcctgaaggctaccaactacaatggccacacgtgtctacacttagcctctatccatggctacctgggcatcgtggagcttttggtgtccttgggtgctgatgtcaatgctcaggagccctgtaatggccggactgcccttcacctcgcagtggacctgcaaaatcctgacctggtgtcactcctgttgaagtgtggggctgatgtcaacagagttacctaccaggtcgacgcggccgcgaatttagtagtagtaatagtagta

SEQ ID NO: 437454 - DNA, 4366 bp, Homo sapiens
  misc_feature (29)..(29): n is a, c, g, or t
  misc_feature (33)..(33): n is a, c, g, or t
cggcccgaggtcctgtgggaagtgagganctcnggacgggggcggggctccgacagaggcggcgattgtggcggcccatttgtaaatgctgcggagattgaggtgtcggttcgtgctgctgagctgcccaggcttcacggagcggtgttggaaatcaatagctcttctagcctttgcattgtttaaatataatagtgtcattggactaagatgttcctgatgccaacctcttcagagttaaacagtgggcagaacttcctaacccagtggatgaccaatccttctcgggctggggtcatattaaatcgtggatttcctattttggaagcagacaaagagaagcgagcagctgtggacatttctaccagctttcctattaaaggcacacatttttctgatagcttcagctttataaatgaagaagattcacttcttgaagaacagaagttggagtcaaacaacccttacaaaccacagtcagataaatctgaaacccatacagcctttccttgcattaaaaagggaccacaggtagcggcatgtcacagtgctcctggacaccaggaagaaaacaaaaatgacttcatcccagatcttgcgagtgaattcaaagaaggggcttataaagacccactttttaaaaaacttgaacagctgaaagaagtacaacagaagaagcaggaacaattgaagaggcaacagttggagcaactacagagactcatggaagaacaagagaagctgctcaccatggtgtctgggcagtgcacacttccaggtttgagtttactgcctgatgatcagagccagaagcacaggtctccaggaaataccaccactggagagagagccacatgctgcttcccatcatatgtctacccggacccaacccaggaagaaacatacccgtccaacattttatcccatgagcaaagcaacttctgtagaactgctcatggagattttgtcttaacttcaaaacgtgcgtctcctaatttattttctgaggcacagtatcaagaagcacctgtggaaaaaaataatttaaaagaagaaaaccgtaaccatcctacaggagaaagtatcttatgttgggagaaagtgacagaacagattcaggaagcaaatgataagaacttacaaaaacatgatgattcctcagaagtggctaatattgaagaaaggcccattaaagctgctattggagaaaggaaacagacctttgaagattacttagaagaacaaattcagttggaagagcaagaactgaagcaaaaacagctgaaggaagcagaaggaccattgccaatcaaagcaaaaccaaaacaaccatttttaaaacgaggagaaggtttagctagatttactaatgccaaatctaagtttcaaaaaggcaaagaaagtaaactagtgactaaccagagcacttccgaggaccagccgctgtttaaaatggatagacagcaactccagcggaaaaccgctcttaaaaataaagagctgtgtgcagacaaccctatccttaaaaaggacagtaaagctagaaccaagagtggttctgtcaccctcagtcagaagccgaaaatgctgaagtgtagtaacaggaaaagtctttctccgtcaggattgaaaatacagacggggaagaaatgtgatgggcagtttagagaccagatcaaatttgaaaacaaagtcacatctaataataaagaaaatgtaactgagtgtccaaaaccttgcgatactggctgcacagggtggaataagacacaaggtaaagacagacttcctctttcaacagggccggccagccggctggctgctaagagccccataagggagaccatgaaagagtctgaatcttctcttgacgtttctcttcagaaaaagttagagacttgggaacgagaaaaggaaaaggaaaatttggaattagatgaatttttgtttttagaacaagctgctgatgaaatatcattttctagtaattcctcatttgtactgaaaatcttagaaagggatcaacagatctgcaaaggtcaccggatgtcttccacccctgtcaaagctgtgccacagaagacaaatccggcagatcccattagtcattgtaaccgcagtgaggatttggaccacactgcacgtgagaaggagagtgagtgtgaagtcgcacccaaacaacttcattcattgtcctcagctgatgaattgagggaacagccttgtaaaatcaggaaagccgtccaaaagagcacttctgaaaatcagactgaatggaatgcacgtgacgatgaaggtgttccaaatagtgacagtagcactgactctgaggaacagcttgatgttaccataaaaccatcgactgaggatagagagaggggcatcagcagcagagaggatagcccacaagtctgtgatgataaggggccttttaaggacaccaggacccaagaagataaaaggagagatgttgatctggatttgtctgataaagattacagtagcgatgagtctatcatggaaagcataaaacataaagtgtctgagccctcgagatcctcatccctaagtctgagtaaaatggactttgatgatgaaagaacttggactgaccttgaagagaatttgtgtaaccatgatgttgttcttgggaatgaatccacttatgggacgccgcagacatgctaccctaataatgaaataggtatcctggacaaaacaataaaaaggaagattgcaccagtcaagaggggagaagacttgagcaagtccaggaggagcagaagtcctcctacatcggagctgatgatgaaattctttccttctttgaaaccaaaaccaaagtcagattcacacttgggaaatgaactcaagttaaacataagtcaagaccaaccacctggtgacaatgctcgatcccaggttttgagagagaaaattattgaattggaaacagaaatagaaaagtttaaagctgagaacgcatctttagctaaacttcgcattgaacgagaaagtgccttggaaaaactcaggaaagaaattgcagacttcgaacaacagaaagcaaaagaattagctcgaatagaagagtttaaaaaggaggagatgaggaagctacaaaaggaacgtaaagtttttgaaaagtatactacagctgcaagaacttttccagataaaaaggaacgtgaagaaatacaggactttaaaacagcaaatagcagatttacgggaagatttgaaaagaaaggagaccaaatggtcaagtacacacagccgtctcagaagccagatacaaatgttagtcagagagaacacagacctccgggaagaaataaaagtgatggaaagattccgactggatgcctggaagagagcagaagccatagagagcagcctcgaggtggagaagaaggacaagcttgcgaacacatctgttcgatttcaaaacagtcagatttcttcaggaacccaggtagaaaaatacaagaaaaattatcttccaatgcaaggcaatccacctcgaagatccaagtctgcacctcctcgtgatttaggcaatttggataagggacaagctgcctctcccagggagccacttgaaccactgaacttcccagatcctgaatataaagaggaggaggaagaccaagacatacagggagaaatcagtcatcctgatggaaaggtggaaaaggtttataagaatgggtgccgtgttatactgtttcccaatggaactcgaaaggaagtgagtgcagatgggaagaccatcactgtcactttctttaatggtgacgtgaagcaggtcatgccagaccaaagagtgatctactactatgcagctgcccagaccactcacacgacatacccggagggactggaagtcttacatttctcaagtggacaaatagaaaaacattacccagatggaagaaaagaaatcacgtttcctgaccagactgttaaaaacttatttcctgatggacaagaagaaagcattttcccagatggtacaattgtcagagtacaacgtgatggcaacaaactcatagagtttaataatggccaaagagaactacatactgcccagttcaagagacgggaatacccagatggcactgttaaaaccgtatatgcaaacggtcatcaagaaacgaagtacagatccggtcggataagagttaaggacaaggagggtaatgtgctaatggacacggagctgtgacgatcctcatgtgatcatgaagtaacagtaactgactttttatgttaaaaaatgtacatttactgtggattctgtttaatttattgtgtatgtgtggggaaaagattggattctaaaataaaagtttaccctgtggca

SEQ ID NO: 437455 - DNA, 422 bp, Homo sapiens
agactcaaaaggctacttttcagtagtttttctgttgtttattttctattattttttttttaagaaatcatattttttttaaattttacagtgatggcaacaaactcatagagtttaataatggccaaagagaactacatactgcccagttcaagagacgggaatacccagatggcactgttaaaaccgtatatgcaaacggtcatcaagaaacgaagtacagatccggtcggataagagttaaggacaaggagggtaatgtgctaatggacacggagctgtgacgatcctcatgtgatcatgaagtaacagtaactgactttttatgttaaaaaatgtacatttactgtggattctgtttaatttattgtgtatgtgtggggaaaagattggattctaaaataaaagtttaccctgtggca

SEQ ID NO: 437456 - DNA, 5081 bp, Homo sapiens
  misc_feature (29)..(29): n is a, c, g, or t
  misc_feature (33)..(33): n is a, c, g, or t
cggcccgaggtcctgtgggaagtgagganctcnggacgggggcggggctccgacagaggcggcgattgtggcggcccatttgtaaatgctgcggagattgaggtgtcggttcgtgctgctgagctgcccaggcttcacggagcggtgttggaaatcaatagctcttctagcctttgcattgtttaaatataatagtgtcattggactaagatgttcctgatgccaacctcttcagagttaaacagtgggcagaacttcctaacccagtggatgaccaatccttctcgggctggggtcatattaaatcgtggatttcctattttggaagcagacaaagagaagcgagcagctgtggacatttctaccagctttcctattaaaggcacacatttttctgatagcttcagctttataaatgaagaagattcacttcttgaagaacagaagttggagtcaaacaacccttacaaaccacagtcagataaatctgaaacccatacagcctttccttgcattaaaaagggaccacaggtagcggcatgtcacagtgctcctggacaccaggaagaaaacaaaaatgacttcatcccagatcttgcgagtgaattcaaagaaggggcttataaagacccactttttaaaaaacttgaacagctgaaagaagtacaacagaagaagcaggaacaattgaagaggcaacagttggagcaactacagagactcatggaagaacaagagaagctgctcaccatggtgtctgggcagtgcacacttccaggtttgagtttactgcctgatgatcagagccagaagcacaggtctccaggaaataccaccactggagagagagccacatgctgcttcccatcatatgtctacccggacccaacccaggaagaaacatacccgtccaacattttatcccatgagcaaagcaacttctgtagaactgctcatggagattttgtcttaacttcaaaacgtgcgtctcctaatttattttctgaggcacagtatcaagaagcacctgtggaaaaaaataatttaaaagaagaaaaccgtaaccatcctacaggagaaagtatcttatgttgggagaaagtgacagaacagattcaggaagcaaatgataagaacttacaaaaacatgatgattcctcagaagtggctaatattgaagaaaggcccattaaagctgctattggagaaaggaaacagacctttgaagattacttagaagaacaaattcagttggaagagcaagaactgaagcaaaaacagctgaaggaagcagaaggaccattgccaatcaaagcaaaaccaaaacaaccatttttaaaacgaggagaaggtttagctagatttactaatgccaaatctaagtttcaaaaaggcaaagaaagtaaactagtgactaaccagagcacttccgaggaccagccgctgtttaaaatggatagacagcaactccagcggaaaaccgctcttaaaaataaagagctgtgtgcagacaaccctatccttaaaaaggacagtaaagctagaaccaagagtggttctgtcaccctcagtcagaagccgaaaatgctgaagtgtagtaacaggaaaagtctttctccgtcaggattgaaaatacagacggggaagaaatgtgatgggcagtttagagaccagatcaaatttgaaaacaaagtcacatctaataataaagaaaatgtaactgagtgtccaaaaccttgcgatactggctgcacagggtggaataagacacaaggtaaagacagacttcctctttcaacagggccggccagccggctggctgctaagagccccataagggagaccatgaaagagtctgaatcttctcttgacgtttctcttcagaaaaagttagagacttgggaacgagaaaaggaaaaggaaaatttggaattagatgaatttttgtttttagaacaagctgctgatgaaatatcattttctagtaattcctcatttgtactgaaaatcttagaaagggatcaacagatctgcaaaggtcaccggatgtcttccacccctgtcaaagctgtgccacagaagacaaatccggcagatcccattagtcattgtaaccgcagtgaggatttggaccacactgcacgtgagaaggagagtgagtgtgaagtcgcacccaaacaacttcattcattgtcctcagctgatgaattgagggaacagccttgtaaaatcaggaaagccgtccaaaagagcacttctgaaaatcagactgaatggaatgcacgtgacgatgaaggtgttccaaatagtgacagtagcactgactctgaggaacagcttgatgttaccataaaaccatcgactgaggatagagagaggggcatcagcagcagagaggatagcccacaagtctgtgatgataaggggccttttaaggacaccaggacccaagaagataaaaggagagatgttgatctggatttgtctgataaagattacagtagcgatgagtctatcatggaaagcataaaacataaagtgtctgagccctcgagatcctcatccctaagtctgagtaaaatggactttgatgatgaaagaacttggactgaccttgaagagaatttgtgtaaccatgatgttgttcttgggaatgaatccacttatgggacgccgcagacatgctaccctaataatgaaataggtatcctggacaaaacaataaaaaggaagattgcaccagtcaagaggggagaagacttgagcaagtccaggaggagcagaagtcctcctacatcggagctgatgatgaaattctttccttctttgaaaccaaaaccaaagtcagattcacacttgggaaatgaactcaagttaaacataagtcaagaccaaccacctggtgacaatgctcgatcccaggttttgagagagaaaattattgaattggaaacagaaatagaaaagtttaaagctgagaacgcatctttagctaaacttcgcattgaacgagaaagtgccttggaaaaactcaggaaagaaattgcagacttcgaacaacagaaagcaaaagaattagctcgaatagaagagtttaaaaaggaggagatgaggaagctacaaaaggaacgtaaagtttttgaaaagtatactacagctgcaagaacttttccagataaaaaggaacgtgaagaaatacaggactttaaaacagcaaatagcagatttacgggaagatttgaaaagaaaggagaccaaatggtcaagtacacacagccgtctcagaagccagatacaaatgttagtcagagagaacacagacctccgggaagaaataaaagtgatggaaagattccgactggatgcctggaagagagcagaagccatagagagcagcctcgaggtggagaagaaggacaagcttgcgaacacatctgttcgatttcaaaacagtcagatttcttcaggaacccaggtagaaaaatacaagaaaaattatcttccaatgcaaggcacagcacagccgcctcacacgcccagcagcttgttggctgaccacctgcctccgctctcctccttcaggccattctcccgtaacatccagctccgttacactttttaacatggaggtcagattctggcacttgctcgagacccttccaagttgagtgtttacaatatgatccattggcacataggatgaaaatactggcacttcagtgtatttttagagagagattcacctcactttgttgttggtgggggcgtgtttattttgtaatgtatatgttgctggtacagtatgtgattggtgtgctggacatattacaaaaagtttataccatagccacaagggcatttatgttttaactaaatacccagttatttggtgaagccaaattccacaggtcttagatgcctcttttatctgcaccttacaccttgtgattgtctctgaaatacatttgggtctgtcaggctgtttcatcacctgtctcttccccaggattgtaaactctgagacaagatactgtctttcttggacatctaggacttaagtacctgtgtcggagaactacaaattagtaaagaaaaatattaagacatccttaactaatggataaaggacagcagttcacaggatatgaactaaggaaatgtgtgatcatactaataaaattttcaattaaatattaaatctaactcttgacaattttattctaataggcaatccacctcgaagatccaagtctgcacctcctcgtgatttaggcaatttggataagggacaagctgcctctcccagggagccacttgaaccactgaacttcccagatcctgaatataaagaggaggaggaagaccaagacatacagggagaaatcagtcatcctgatggaaaggtggaaaaggtttataagaatgggtgccgtgttatactgtttcccaatggaactcgaaaggaagtgagtgcagatgggaagaccatcactgtcactttctttaatggtgacgtgaagcaggtcatgccagaccaaagagtgatctactactatgcagctgcccagaccactcacacgacatacccggagggactggaagtcttacatttctcaagtggacaaatagaaaaacattacccagatggaagaaaagaaatcacgtttcctgaccagactgttaaaaacttatttcctgatggacaagaagaaagcattttcccagatggtacaattgtcagagtacaacgtgatggcaacaaactcatagagtttaataatggccaaagagaactacatactgcccagttcaagagacgggaatacccagatggcactgttaaaaccgtatatgcaaacggtcatcaagaaacgaagtacagatccggtcggataagagttaaggacaaggagggtaatgtgctaatggacacggagctgtgacgatcctcatgtgatcatgaagtaacagtaactgactttttatgttaaaaaatgtacatttactgtggattctgtttaatttattgtgtatgtgtggggaaaagattggattctaaaataaaagtttaccctgtggca

SEQ ID NO: 437457 - DNA, 4190 bp, Homo sapiens
  misc_feature (29)..(29): n is a, c, g, or t
  misc_feature (33)..(33): n is a, c, g, or t
cggcccgaggtcctgtgggaagtgagganctcnggacgggggcggggctccgacagaggcggcgattgtggcggcccatttgtaaatgctgcggagattgaggtgtcggttcgtgctgctgagctgcccaggcttcacggagcgtttggaagcagacaaagagaagcgagcagctgtggacatttctaccagctttcctattaaaggcacacatttttctgatagcttcagctttataaatgaagaagattcacttcttgaagaacagaagttggagtcaaacaacccttacaaaccacagtcagataaatctgaaacccatacagcctttccttgcattaaaaagggaccacaggtagcggcatgtcacagtgctcctggacaccaggaagaaaacaaaaatgacttcatcccagatcttgcgagtgaattcaaagaaggggcttataaagacccactttttaaaaaacttgaacagctgaaagaagtacaacagaagaagcaggaacaattgaagaggcaacagttggagcaactacagagactcatggaagaacaagagaagctgctcaccatggtgtctgggcagtgcacacttccaggtttgagtttactgcctgatgatcagagccagaagcacaggtctccaggaaataccaccactggagagagagccacatgctgcttcccatcatatgtctacccggacccaacccaggaagaaacatacccgtccaacattttatcccatgagcaaagcaacttctgtagaactgctcatggagattttgtcttaacttcaaaacgtgcgtctcctaatttattttctgaggcacagtatcaagaagcacctgtggaaaaaaataatttaaaagaagaaaaccgtaaccatcctacaggagaaagtatcttatgttgggagaaagtgacagaacagattcaggaagcaaatgataagaacttacaaaaacatgatgattcctcagaagtggctaatattgaagaaaggcccattaaagctgctattggagaaaggaaacagacctttgaagattacttagaagaacaaattcagttggaagagcaagaactgaagcaaaaacagctgaaggaagcagaaggaccattgccaatcaaagcaaaaccaaaacaaccatttttaaaacgaggagaaggtttagctagatttactaatgccaaatctaagtttcaaaaaggcaaagaaagtaaactagtgactaaccagagcacttccgaggaccagccgctgtttaaaatggatagacagcaactccagcggaaaaccgctcttaaaaataaagagctgtgtgcagacaaccctatccttaaaaaggacagtaaagctagaaccaagagtggttctgtcaccctcagtcagaagccgaaaatgctgaagtgtagtaacaggaaaagtctttctccgtcaggattgaaaatacagacggggaagaaatgtgatgggcagtttagagaccagatcaaatttgaaaacaaagtcacatctaataataaagaaaatgtaactgagtgtccaaaaccttgcgatactggctgcacagggtggaataagacacaaggtaaagacagacttcctctttcaacagggccggccagccggctggctgctaagagccccataagggagaccatgaaagagtctgaatcttctcttgacgtttctcttcagaaaaagttagagacttgggaacgagaaaaggaaaaggaaaatttggaattagatgaatttttgtttttagaacaagctgctgatgaaatatcattttctagtaattcctcatttgtactgaaaatcttagaaagggatcaacagatctgcaaaggtcaccggatgtcttccacccctgtcaaagctgtgccacagaagacaaatccggcagatcccattagtcattgtaaccgcagtgaggatttggaccacactgcacgtgagaaggagagtgagtgtgaagtcgcacccaaacaacttcattcattgtcctcagctgatgaattgagggaacagccttgtaaaatcaggaaagccgtccaaaagagcacttctgaaaatcagactgaatggaatgcacgtgacgatgaaggtgttccaaatagtgacagtagcactgactctgaggaacagcttgatgttaccataaaaccatcgactgaggatagagagaggggcatcagcagcagagaggatagcccacaagtctgtgatgataaggggccttttaaggacaccaggacccaagaagataaaaggagagatgttgatctggatttgtctgataaagattacagtagcgatgagtctatcatggaaagcataaaacataaagtgtctgagccctcgagatcctcatccctaagtctgagtaaaatggactttgatgatgaaagaacttggactgaccttgaagagaatttgtgtaaccatgatgttgttcttgggaatgaatccacttatgggacgccgcagacatgctaccctaataatgaaataggtatcctggacaaaacaataaaaaggaagattgcaccagtcaagaggggagaagacttgagcaagtccaggaggagcagaagtcctcctacatcggagctgatgatgaaattctttccttctttgaaaccaaaaccaaagtcagattcacacttgggaaatgaactcaagttaaacataagtcaagaccaaccacctggtgacaatgctcgatcccaggttttgagagagaaaattattgaattggaaacagaaatagaaaagtttaaagctgagaacgcatctttagctaaacttcgcattgaacgagaaagtgccttggaaaaactcaggaaagaaattgcagacttcgaacaacagaaagcaaaagaattagctcgaatagaagagtttaaaaaggaggagatgaggaagctacaaaaggaacgtaaagtttttgaaaagtatactacagctgcaagaacttttccagataaaaaggaacgtgaagaaatacaggactttaaaacagcaaatagcagatttacgggaagatttgaaaagaaaggagaccaaatggtcaagtacacacagccgtctcagaagccagatacaaatgttagtcagagagaacacagacctccgggaagaaataaaagtgatggaaagattccgactggatgcctggaagagagcagaagccatagagagcagcctcgaggtggagaagaaggacaagcttgcgaacacatctgttcgatttcaaaacagtcagatttcttcaggaacccaggtagaaaaatacaagaaaaattatcttccaatgcaaggcaatccacctcgaagatccaagtctgcacctcctcgtgatttaggcaatttggataagggacaagctgcctctcccagggagccacttgaaccactgaacttcccagatcctgaatataaagaggaggaggaagaccaagacatacagggagaaatcagtcatcctgatggaaaggtggaaaaggtttataagaatgggtgccgtgttatactgtttcccaatggaactcgaaaggaagtgagtgcagatgggaagaccatcactgtcactttctttaatggtgacgtgaagcaggtcatgccagaccaaagagtgatctactactatgcagctgcccagaccactcacacgacatacccggagggactggaagtcttacatttctcaagtggacaaatagaaaaacattacccagatggaagaaaagaaatcacgtttcctgaccagactgttaaaaacttatttcctgatggacaagaagaaagcattttcccagatggtacaattgtcagagtacaacgtgatggcaacaaactcatagagtttaataatggccaaagagaactacatactgcccagttcaagagacgggaatacccagatggcactgttaaaaccgtatatgcaaacggtcatcaagaaacgaagtacagatccggtcggataagagttaaggacaaggagggtaatgtgctaatggacacggagctgtgacgatcctcatgtgatcatgaagtaacagtaactgactttttatgttaaaaaatgtacatttactgtggattctgtttaatttattgtgtatgtgtggggaaaagattggattctaaaataaaagtttaccctgtggca

SEQ ID NO: 437458 - DNA, 1336 bp, Homo sapiens
  misc_feature (29)..(29): n is a, c, g, or t
  misc_feature (33)..(33): n is a, c, g, or t
cggcccgaggtcctgtgggaagtgagganctcnggacgggggcggggctccgacagaggcggcgattgtggcggcccatttgtaaatgctgcggagattgaggtgtcggttcgtgctgctgagctgcccaggcttcacggagcggtgttggaaatcaatagctcttctagcgactttaaaacagcaaatagcagatttacgggaagatttgaaaagaaaggagaccaaatggtcaagtacacacagccgtctcagaagccagatacaaatgttagtcagagagaacacagacctccgggaagaaataaaagtgatggaaagattccgactggatgcctggaagagagcagaagccatagagagcagcctcgaggtggagaagaaggacaagcttgcgaacacatctgttcgatttcaaaacagtcagatttcttcaggaacccaggtagaaaaatacaagaaaaattatcttccaatgcaaggcaatccacctcgaagatccaagtctgcacctcctcgtgatttaggcaatttggataagggacaagctgcctctcccagggagccacttgaaccactgaacttcccagatcctgaatataaagaggaggaggaagaccaagacatacagggagaaatcagtcatcctgatggaaaggtggaaaaggtttataagaatgggtgccgtgttatactgtttcccaatggaactcgaaaggaagtgagtgcagatgggaagaccatcactgtcactttctttaatggtgacgtgaagcaggtcatgccagaccaaagagtgatctactactatgcagctgcccagaccactcacacgacatacccggagggactggaagtcttacatttctcaagtggacaaatagaaaaacattacccagatggaagaaaagaaatcacgtttcctgaccagactgttaaaaacttatttcctgatggacaagaagaaagcattttcccagatggtacaattgtcagagtacaacgtgatggcaacaaactcatagagtttaataatggccaaagagaactacatactgcccagttcaagagacgggaatacccagatggcactgttaaaaccgtatatgcaaacggtcatcaagaaacgaagtacagatccggtcggataagagttaaggacaaggagggtaatgtgctaatggacacggagctgtgacgatcctcatgtgatcatgaagtaacagtaactgactttttatgttaaaaaatgtacatttactgtggattctgtttaatttattgtgtatgtgtggggaaaagattggattctaaaataaaagtttaccctgtggca

SEQ ID NO: 437459 - DNA, 2062 bp, Homo sapiens
cacctctcgttatcctgcccagttggtagatacttcgggggttcgtgctgctgagctgcccaggcttcacggagcggtgttggaaatcaatagctcttctagcctttgcattgtttaaatataatagtgtcattggactaagatgttcctgatgccaacctcttcagagttaaacagtgggcagaacttcctaacccagtggatgaccaatccttctcgggctggggtcatattaaatcgtggatttcctattatccccagagccttgtctgccatctgcccctttgctcaagcctaaacccctgtgtactcccagtactttttctgttatccttcaccatccactcccagtagtccctagactgatccctctgatgttattttctggatctattagttacattgaatcatatgaaattgctgatgtgtggcagtttgggacctataaatcagtgatttcccatggtgtaatggaaccattcctgtctcacaggcacagcacagccgcctcacacgcccagcagcttgttggctgaccacctgcctccgctctcctccttcaggccattctcccgtaacatccagctccgttacactttttaacatggaggtcagattctggcacttgctcgagacccttccaagttgagtgtttacaatatgatccattggcacataggatgaaaatactggcacttcagtgtatttttagagagagattcacctcactttgttgttggtgggggcgtgtttattttgtaatgtatatgttgctggtacagtatgtgattggtgtgctggacatattacaaaaagtttataccatagccacaagggcatttatgttttaactaaatacccagttatttggtgaagccaaattccacaggtcttagatgcctcttttatctgcaccttacaccttgtgattgtctctgaaatacatttgggtctgtcaggctgtttcatcacctgtctcttccccaggattgtaaactctgagacaagatactgtctttcttggacatctaggacttaagtacctgtgtcggagaactacaaattagtaaagaaaaatattaagacatccttaactaatggataaaggacagcagttcacaggatatgaactaaggaaatgtgtgatcatactaataaaattttcaattaaatattaaatctaactcttgacaattttattctaataggcaatccacctcgaagatccaagtctgcacctcctcgtgatttaggcaatttggataagggacaagctgcctctcccagggagccacttgaaccactgaacttcccagatcctgaatataaagaggaggaggaagaccaagacatacagggagaaatcagtcatcctgatggaaaggtggaaaaggtttataagaatgggtgccgtgttatactgtttcccaatggaactcgaaaggaagtgagtgcagatgggaagaccatcactgtcactttctttaatggtgacgtgaagcaggtcatgccagaccaaagagtgatctactactatgcagctgcccagaccactcacacgacatacccggagggactggaagtcttacatttctcaagtggacaaatagaaaaacattacccagatggaagaaaagaaatcacgtttcctgaccagactgttaaaaacttatttcctgatggacaagaagaaagcattttcccagatggtacaattgtcagagtacaacgtgatggcaacaaactcatagagtttaataatggccaaagagaactacatactgcccagttcaagagacgggaatacccagatggcactgttaaaaccgtatatgcaaacggtcatcaagaaacgaagtacagatccggtcggataagagttaaggacaaggagggtaatgtgctaatggacacggagctgtgacgatcctcatgtgatcatgaagtaacagtaactgactttttatgttaaaaaatgtacatttactgtggattctgtttaatttattgtgtatgtgtggggaaaagattggattctaaaataaaagtttaccctgtggca

SEQ ID NO: 437460 - DNA, 3122 bp, Homo sapiens
  misc_feature (29)..(29): n is a, c, g, or t
  misc_feature (33)..(33): n is a, c, g, or t
cggcccgaggtcctgtgggaagtgagganctcnggacgggggcggggctccgacagaggcggcgattgtggcggcccatttgtaaatgctgcggagattgaggtgtcggttcgtgctgctgagctgcccaggcttcacggagcggtgttggaaatcaatagctcttctagcctttgcattgtttaaatataatagtgtcattggactaagatgttcctgatgccaacctcttcagagttaaacagtgggcagaacttcctaacccagtggatgaccaatccttctcgggctggggtcatattaaatcgtggatttcctattttggaagcagacaaagagaagcgagcagctgtggacatttctaccagctttcctattaaaggcacacatttttctgatagcttcagctttataaatgaagaagattcacttcttgaagaacagaagttggagtcaaacaacccttacaaaccacagtcagataaatctgaaacccatacagcctttccttgcattaaaaagggaccacaggtagcggcatgtcacagtgctcctggacaccaggaagaaaacaaaaatgacttcatcccagatcttgcgagtgaattcaaagaaggggcttataaagacccactttttaaaaaacttgaacagctgaaagaagtacaacagaagaagcaggaacaattgaagaggcaacagttggagcaactacagagactcatggaagaacaagagaagctgctcaccatggtgtctgggcagtgcacacttccaggtttgagtttactgcctgatgatcagagccagaagcacaggtctccaggaaataccaccactggagagagagccacatgctgcttcccatcatatgtctacccggacccaacccaggaagaaacatacccgtccaacattttatcccatgagcaaagcaacttctgtagaactgctcatggagattttgtcttaacttcaaaacgtgcgtctcctaatttattttctgaggcacagtatcaagaagcacctgtggaaaaaaataatttaaaagaagaaaaccgtaaccatcctacaggagaaagtatcttatgttgggagaaagtgacagaacagattcaggaagcaaatgataagaacttacaaaaacatgatgattcctcagaagtggctaatattgaagaaaggcccattaaagctgctattggagaaaggaaacagacctttgaagattacttagaagaacaaattcagttggaagagcaagaactgaagcaaaaacagctgaaggaagcagaaggaccattgccaatcaaagcaaaaccaaaacaaccatttttaaaacgaggagaaggtttagctagatttactaatgccaaatctaagtttcaaaaaggcaaagaaagtaaactagtgactaaccagagcacttccgaggaccagccgctgtttaaaatggatagacagcaactccagcggaaaaccgctcttaaaaataaagagctgtgtgcagacaaccctatccttaaaaaggacagtaaagctagaaccaagagtggttctgtcaccctcagtcagaagccgaaaatgctgaagtgtagtaacaggaaaagtctttctccgtcaggattgaaaatacagacggggaagaaatgtgatgggcagtttagagaccagatcaaatttgaaaacaaagtcacatctaataataaagaaaatgtaactgagtgtccaaaaccttgcgatactggctgcacagggtggaataagacacaaggtaaagacagacttcctctttcaacagggccggccagccggctggctgctaagagccccataagggagaccatgaaagagtctgaatcttctcttgacgtttctcttcagaaaaagttagagacttgggaacgagaaaaggaaaaggaaaatttggaattagatgaatttttgtttttagaacaagctgctgatgaaatatcattttctagtaattcctcatttgtactgaaaatcttagaaagggatcaacagatctgcaaaggtcaccggatgtcttccacccctgtcaaagctgtgccacagaagacaaatccggcagatcccattagtcattgtaaccgcagtgaggatttggaccacactgcacgtgagaaggagagtgagtgtgaagtcgcacccaaacaacttcattcattgtcctcagctgatgaattgagggaacagccttgtaaaatcaggaaagccgtccaaaagagcacttctgaaaatcagactgaatggaatgcacgtgacgatgaaggtgttccaaatagtgacagtagcactgactctgaggaacagcttgatgttaccataaaaccatcgactgaggatagagagaggggcatcagcagcagagaggatagcccacaagtctgtgatgataaggggccttttaaggacaccaggacccaagaagataaaaggagagatgttgatctggatttgtctgataaagattacagtagcgatgagtctatcatggaaagcataaaacataaagtgtctgagccctcgagatcctcatccctaagtctgagtaaaatggactttgatgatgaaagaacttggactgaccttgaagagaatttgtgtaaccatgatgttgttcttgggaatgaatccacttatgggacgccgcagacatgctaccctaataatgaaataggtatcctggacaaaacaataaaaaggaagattgcaccagtcaagaggggagaagacttgagcaagtccaggaggagcagaagtcctcctacatcggagctgatgatgaaattctttccttctttgaaaccaaaaccaaagtcagattcacacttgggaaatgaactcaagttaaacataagtcaagaccaaccacctggtgagtcagagcattataaaatatgtatcagaatggtagaaatttaacattaatcagtatgctggcagaatgcttaaaatcctaactttccttaatgctcaatagaattaagtcaaattaattgggtggattttgaaaaatttgatttattttatgggtctttatgaggctttaaaaattaattaggttttaataaagtggagttaccatcaaagcttct

SEQ ID NO: 437461 - DNA, 468 bp, Homo sapiens
tcttcatttttatattctttgaaatgcaatgatagctctcatttataattcactaccctgtctttcaatagactaaggaaagcattttgactgtttagaaattgtgtacaggtttttacagtaagtgggtgtgtttattggttagaaatggctataaaaaaaaaccaagaagtacaggaagtacatcacctagatgtcccacagacacatcagccgtagagcactggacttgtacagaaggtgtactcaaggagtaaacacgtgtctctgtagccaaaatattactatgttcagttagtaccaaaattagaccatttgatcttctacagaggatcattaattattataacagaatgggaagttacaacagtggatgaatataaataggtcacacacaacaggtagtaatcatggtgaagagaaagcagttataacaaggctgactttgtaatgtaatgtctcaaaatg

SEQ ID NO: 437462 - DNA, 456 bp, Homo sapiens
gaatgggtgccgtgttatactgtttcccaatggaactcgaaaggaagtgagtgcagatgggaagaccatcactgtcactttctttaatggtgacgtgaagcaggtcatgccagaccaaagagtggtatgtttccagaggtgttctcctccatagtttaaccatctctggagaaaaggcagactgactgtgtgtctttacagatctactactatgcagctgcccagaccactcacacgacatacccggagggactggaagtcttacatttctcaagtggacaaataggtacaaacttgctccaccctctcattaaattcttcccttccttcaaaaaatatttactgtaacaactttttaaacagaaaaacattacccagatggaagaaaagaaatcacgtttcctgaccagactgttaaaaacttatttcctgatggacaagaagaaagcattttcc

SEQ ID NO: 437463 - DNA, 378 bp, Homo sapiens
aacgaggtgtccatgaagaattgtaaagttgatttaataaagttaattttgtatttaaaaagctgaaagaagtacaacagaagaagcaggaacaattgaagaggcaacagttggagcaactacagagactcatggaagaacaagagaagctgctcaccatggtgtctgggcagtgcacacttccaggtatgctttgcctacacagggcctcagtataatgcacatttcttacctgtagttgtttgacacgttatttctatcgttcctgtatcatgtgttgtgaactccagtttctttaaaggctagcccgataaatgtgaaatggtagagttgtaatacaactggaacaagaaggagctgccgcattctggtgtgcgc

SEQ ID NO: 437464 - DNA, 710 bp, Homo sapiens
tggacccccctttgaggtgggaaggacaccaggacccaagaagataaaaggagagatgttgatctggatttgtctgataaagattacagtagcgatgagtctatcatggaaagcataaaacataaagtgtctgagccctcgagatcctcatccctaagtctgagtaaaatggactttgatgatgaaagaacttggactgaccttgaagagaatttgtgtaaccatgatgttgttcttgggaatgaatccacttatgggacgccgcagacatgctaccctaataatgaaataggtatcctggacaaaacaataaaaaggaagattgcaccagtcaagaggggagaagacttgagcaagtccaggaggagcagaagtcctcctacatcggagctgatgatgaaattctttccttctttgaaaccaaaaccaaagtcagattcacacttgggaaatgaactcaagttaaacataagtcaagaccaaccacctggtgagtcagagcattataaaatatgtatcagaatggtagaaatttaacattaatcagtatgctggcagaatgcttaaaatcctaactttccttaatgctcaatagaattaagtcaaattaattgggtggattttgaaaaatttgatttattttatgggtctttatgaggctttaaaaattaattaggttttaataaagtggagttaccatcaaagcttct

SEQ ID NO: 437465 - DNA, 4517 bp, Homo sapiens
  misc_feature (29)..(29): n is a, c, g, or t
  misc_feature (33)..(33): n is a, c, g, or t
cggcccgaggtcctgtgggaagtgagganctcnggacgggggcggggctccgacagaggcggcgattgtggcggcccatttgtaaatgctgcggagattgaggtgtcggttcgtgctgctgagctgcccaggcttcacggagcggtgttggaaatcaatagctcttctagcctttgcattgtttaaatataatagtgtcattggactaagatgttcctgatgccaacctcttcagagttaaacagtgggcagaacttcctaacccagtggatgaccaatccttctcgggctggggtcatattaaatcgtggatttcctattttggaagcagacaaagagaagcgagcagctgtggacatttctaccagctttcctattaaaggcacacatttttctgatagcttcagctttataaatgaagaagattcacttcttgaagaacagaagttggagtcaaacaacccttacaaaccacagtcagataaatctgaaacccatacagcctttccttgcattaaaaagggaccacaggtagcggcatgtcacagtgctcctggacaccaggaagaaaacaaaaatgacttcatcccagatcttgcgagtgaattcaaagaaggggcttataaagacccactttttaaaaaacttgaacagctgaaagaagtacaacagaagaagcaggaacaattgaagaggcaacagttggagcaactacagagactcatggaagaacaagagaagctgctcaccatggtgtctgggcagtgcacacttccaggtttgagtttactgcctgatgatcagagccagaagcacaggtctccaggaaataccaccactggagagagagccacatgctgcttcccatcatatgtctacccggacccaacccaggaagaaacatacccgtccaacattttatcccatgagcaaagcaacttctgtagaactgctcatggagattttgtcttaacttcaaaacgtgcgtctcctaatttattttctgaggcacagtatcaagaagcacctgtggaaaaaaataatttaaaagaagaaaaccgtaaccatcctacaggagaaagtatcttatgttgggagaaagtgacagaacagattcaggaagcaaatgataagaacttacaaaaacatgatgattcctcagaagtggctaatattgaagaaaggcccattaaagctgctattggagaaaggaaacagacctttgaagattacttagaagaacaaattcagttggaagagcaagaactgaagcaaaaacagctgaaggaagcagaaggaccattgccaatcaaagcaaaaccaaaacaaccatttttaaaacgaggagaaggtttagctagatttactaatgccaaatctaagtttcaaaaaggcaaagaaagtaaactagtgactaaccagagcacttccgaggaccagccgctgtttaaaatggatagacagcaactccagcggaaaaccgctcttaaaaataaagagctgtgtgcagacaaccctatccttaaaaaggacagtaaagctagaaccaagagtggttctgtcaccctcagtcagaagccgaaaatgctgaagtgtagtaacaggaaaagtctttctccgtcaggattgaaaatacagacggggaagaaatgtgatgggcagtttagagaccagatcaaatttgaaaacaaagtcacatctaataataaagaaaatgtaactgagtgtccaaaaccttgcgatactggctgcacagggtggaataagacacaaggtaaagacagacttcctctttcaacagggccggccagccggctggctgctaagagccccataagggagaccatgaaagagtctgaatcttctcttgacgtttctcttcagaaaaagttagagacttgggaacgagaaaaggaaaaggaaaatttggaattagatgaatttttgtttttagaacaagctgctgatgaaatatcattttctagtaattcctcatttgtactgaaaatcttagaaagggatcaacagatctgcaaaggtcaccggatgtcttccacccctgtcaaagctgtgccacagaagacaaatccggcagatcccattagtcattgtaaccgcagtgaggatttggaccacactgcacgtgagaaggagagtgagtgtgaagtcgcacccaaacaacttcattcattgtcctcagctgatgaattgagggaacagccttgtaaaatcaggaaagccgtccaaaagagcacttctgaaaatcagactgaatggaatgcacgtgacgatgaaggtgttccaaatagtgacagtagcactgactctgaggaacagcttgatgttaccataaaaccatcgactgaggatagagagaggggcatcagcagcagagaggatagcccacaagtctgtgatgataaggggccttttaaggacaccaggacccaagaagataaaaggagagatgttgatctggatttgtctgataaagattacagtagcgatgagtctatcatggaaagcataaaacataaagtgtctgagccctcgagatcctcatccctaagtctgagtaaaatggactttgatgatgaaagaacttggactgaccttgaagagaatttgtgtaaccatgatgttgttcttgggaatgaatccacttatgggacgccgcagacatgctaccctaataatgaaataggtatcctggacaaaacaataaaaaggaagattgcaccagtcaagaggggagaagacttgagcaagtccaggaggagcagaagtcctcctacatcggagctgatgatgaaattctttccttctttgaaaccaaaaccaaagtcagattcacacttgggaaatgaactcaagttaaacataagtcaagaccaaccacctggtgacaatgctcgatcccaggttttgagagagaaaattattgaattggaaacagaaatagaaaagtttaaagctgagaacgcatctttagctaaacttcgcattgaacgagaaagtgccttggaaaaactcaggaaagaaattgcagacttcgaacaacagaaagcaaaagaattagctcgaatagaagagtttaaaaaggaggagatgaggaagctacaaaaggaacgtaaagtttttgaaaagtatactacagctgcaagaacttttccagataaaaaggaacgtgaagaaatacaggactttaaaacagcaaatagcagatttacgggaagatttgaaaagaaaggagaccaaatggtcaagtacacacagccgtctcagaagccagatacaaatgttagtcagagagaacacagacctccgggaagaaataaaagtgatggaaagattccgactggatgcctggaagagagcagaagccatagagagcagcctcgaggtggagaagaaggacaagcttgcgaacacatctgttcgatttcaaaacagtcagatttcttcaggaacccaggtagaaaaatacaagaaaaattatcttccaatgcaaggcacagcacagccgcctcacacgcccagcagcttgttggctgaccacctgcctccgctctcctccttcaggccattctcccgtaacatccagctccgttacactttttaacatggaggtcagattctggcacttgctcgagacccttccaagcaatccacctcgaagatccaagtctgcacctcctcgtgatttaggcaatttggataagggacaagctgcctctcccagggagccacttgaaccactgaacttcccagatcctgaatataaagaggaggaggaagaccaagacatacagggagaaatcagtcatcctgatggaaaggtggaaaaggtttataagaatgggtgccgtgttatactgtttcccaatggaactcgaaaggaagtgagtgcagatgggaagaccatcactgtcactttctttaatggtgacgtgaagcaggtcatgccagaccaaagagtgatctactactatgcagctgcccagaccactcacacgacatacccggagggactggaagtcttacatttctcaagtggacaaatagaaaaacattacccagatggaagaaaagaaatcacgtttcctgaccagactgttaaaaacttatttcctgatggacaagaagaaagcattttcccagatggtacaattgtcagagtacaacgtgatggcaacaaactcatagagtttaataatggccaaagagaactacatactgcccagttcaagagacgggaatacccagatggcactgttaaaaccgtatatgcaaacggtcatcaagaaacgaagtacagatccggtcggataagagttaaggacaaggagggtaatgtgctaatggacacggagctgtgacgatcctcatgtgatcatgaagtaacagtaactgactttttatgttaaaaaatgtacatttactgtggattctgtttaatttattgtgtatgtgtggggaaaagattggattctaaaataaaagtttaccctgtggca

SEQ ID NO: 437466 - DNA, 3620 bp, Homo sapiens
  misc_feature (29)..(29): n is a, c, g, or t
  misc_feature (33)..(33): n is a, c, g, or t
cggcccgaggtcctgtgggaagtgagganctcnggacgggggcggggctccgacagaggcggcgattgtggcggcccatttgtaaatgctgcggagattgaggtgtcggttcgtgctgctgagctgcccaggcttcacggagcggtgttggaaatcaatagctcttctagcctttgcattgtttaaatataatagtgtcattggactaagatgttcctgatgccaacctcttcagagttaaacagtgggcagaacttcctaacccagtggatgaccaatccttctcgggctggggtcatattaaatcgtggatttcctattttggaagcagacaaagagaagcgagcagctgtggacatttctaccagctttcctattaaaggcacacatttttctgatagcttcagctttataaatgaagaagattcacttcttgaagaacagaagttggagtcaaacaacccttacaaaccacagtcagataaatctgaaacccatacagcctttccttgcattaaaaagggaccacaggtagcggcatgtcacagtgctcctggacaccaggaagaaaacaaaaatgacttcatcccagatcttgcgagtgaattcaaagaaggggcttataaagacccactttttaaaaaacttgaacagctgaaagaagtacaacagaagaagcaggaacaattgaagaggcaacagttggagcaactacagagactcatggaagaacaagagaagctgctcaccatggtgtctgggcagtgcacacttccaggtttgagtttactgcctgatgatcagagccagaagcacaggtctccaggaaataccaccactggagagagagccacatgctgcttcccatcatatgtctacccggacccaacccaggaagaaacatacccgtccaacattttatcccatgagcaaagcaacttctgtagaactgctcatggagattttgtcttaacttcaaaacgtgcgtctcctaatttattttctgaggcacagtatcaagaagcacctgtggaaaaaaataatttaaaagaagaaaaccgtaaccatcctacaggagaaagtatcttatgttgggagaaagtgacagaacagattcaggaagcaaatgataagaacttacaaaaacatgatgattcctcagaagtggctaatattgaagaaaggcccattaaagctgctattggagaaaggaaacagacctttgaagattacttagaagaacaaattcagttggaagagcaagaactgaagcaaaaacagctgaaggaagcagaaggaccattgccaatcaaagcaaaaccaaaacaaccatttttaaaacgaggagaaggtttagctagatttactaatgccaaatctaagtttcaaaaaggcaaagaaagtaaactagtgactaaccagagcacttccgaggaccagccgctgtttaaaatggatagacagcaactccagcggaaaaccgctcttaaaaataaagagctgtgtgcagacaaccctatccttaaaaaggacagtaaagctagaaccaagagtggttctgtcaccctcagtcagaagccgaaaatgctgaagtgtagtaacaggaaaagtctttctccgtcaggattgaaaatacagacggggaagaaatgtgatgggcagtttagagaccagatcaaatttgaaaacaaagtcacatctaataataaagaaaatgtaactgagtgtccaaaaccttgcgatactggctgcacagggtggaataagacacaaggtaaagacagacttcctctttcaacagggccggccagccggctggctgctaagagccccataagggagaccatgaaagagtctgaatcttctcttgacgtttctcttcagaaaaagttagagacttgggaacgagaaaaggaaaaggaaaatttggaattagatgaatttttgtttttagaacaagctgctgatgaaatatcattttctagtaattcctcatttgtactgaaaatcttagaaagggatcaacagatctgcaaaggtcaccggatgtcttccacccctgtcaaagctgtgccacagaagacaaatccggcagatcccattagtcattgtaaccgcagtgaggatttggaccacactgcacgtgagaaggagagtgagtgtgaagtcgcacccaaacaacttcattcattgtcctcagctgatgaattgagggaacagccttgtaaaatcaggaaagccgtccaaaagagcacttctgaaaatcagactgaatggaatgcacgtgacgatgaaggtgttccaaatagtgacagtagcactgactctgaggaacagcttgatgttaccataaaaccatcgactgaggatagagagaggggcatcagcagcagagaggatagcccacaagtctgtgatgataaggggccttttaaggacaccaggacccaagaagataaaaggagagatgttgatctggatttgtctgataaagattacagtagcgatgagtctatcatggaaagcataaaacataaagtgtctgagccctcgagatcctcatccctaagtctgagtaaaatggactttgatgatgaaagaacttggactgaccttgaagagaatttgtgtaaccatgatgttgttcttgggaatgaatccacttatgggacgccgcagacatgctaccctaataatgaaataggtatcctggacaaaacaataaaaaggaagattgcaccagtcaagaggggagaagacttgagcaagtccaggaggagcagaagtcctcctacatcggagctgatgatgaaattctttccttctttgaaaccaaaaccaaagtcagattcacacttgggaaatgaactcaagttaaacataagtcaagaccaaccacctggtgacaatgctcgatcccaggttttgagagagaaaattattgaattggaaacagaaatagaaaagtttaaagctgagaacgcatctttagctaaacttcgcattgaacgagaaagtgccttggaaaaactcaggaaagaaattgcagacttcgaacaacagaaagcaaaagaattagctcgaatagaagagtttaaaaaggaggagatgaggaagctacaaaaggaacgtaaagtttttgaaaagtatactacagctgcaagaacttttccagataaaaaggaacgtgaagaaatacaggactttaaaacagcaaatagcagatttacgggaagatttgaaaagaaaggagaccaaatggtcaagtacacacagccgtctcagaagccagatacaaatgttagtcagagagaacacagacctccgggaagaaataaaagtgatggaaagattccgactggatgcctggaagagagcagaagccatagagagcagcctcgaggtggagaagaaggacaagcttgcgaacacatctgttcgatttcaaaacagtcagatttcttcaggaacccaggtagaaaaatacaagaaaaattatcttccaatgcaaggtaagaggctgcatgatctttttataaaacatttcagaatgtaaggaataaacaatttatacccaacttaataaaacatttcttaataaatgtttttgaacatttgaa

SEQ ID NO: 437467 - DNA, 955 bp, Homo sapiens
gcaaattcttacaccttctctccaagcggagggcacactgtggtcaaaatcacttattttattaggaaaaagaggtaactgttccaaagtgtagtgtcctttgttgaaggaggagggatgtaagcatagatttgttcttgtttctggctattctcagctcaagccatgtttaattcattctttgtaaaagccttcaattgtgccacagaaaacctggtaagagaattgtcagtttcattggccataagtatgtaatgtgggtgatgtcttgccattgaggtttggaagctcttaagtgccgattatggattacagagggctgataaaattacttatattgggaattgagagaagccccaaaaaatcaaatgtgcttttgatggatagagtgtatcttattagcattatgggagctccttagagggctgtcttcactgaaagatttaatgcccaaaacatttggacagattatgcagccttctactaccaggttatcttgaatgaagaagaaatagtaaaaaataataataatagagcattaccaataagctaaaagttcagagttgctgatagatgttaaatgttaagttatcctgtgagcctactcctgtccaaccttttttctcagtatttctttagagaatgctgcaatctgtataagttactctgaaggattttttaagaagagaagccaccaacaggtgataatttttatggagatgtttcttaattggctttccctcagttcaagtaggtaaataactttgtttgctgggaggaggtacatggctgaagagaggcaaatagattaagatagcaatgtcttgcacttcctgtttccctcaaaacaacaccacattgtggggccgcaggatagatcagggttgagtggaatttggaattccaggtgaagtgcttgtaaagtgcatgtctagctgacaacagacttgaccat

SEQ ID NO: 437468 - DNA, 2061 bp, Homo sapiens
aaattttttaaataaatagactggtagagaacactgatcagtatcccctaataaatccactttatcctcggatggtttctatcatgtaaacataggattaaactcttagcacaaataaaatggaatgttttcgtctctacattcagctcttctcacagacagttttatcatcttatcatttttggcacaaaacaaactatgttttattcagtttaccaagaagatggagtcttctgatgtaaacaaaagactggaaaaactctcagccttggattataagattttctattatgaaatacccggcccaataaacaagacaacagagcgacatctagctatcaactgtgttcatgatagagttgtttgctggtggccactggtcaacgatgatgcttggccttgggcccccatttcttctgagaaggacagagccaatctactcctcctgggttatgctcaaggaagactagaggttctgagttctgtccgcacagaatgggacccactggatgttcgctttggcaccaaacagccttatcaggtgttcacagtggagcactccgtaagtgtagacaaagagcccatggctgacagctgcatctatgaatgcattcggaataaaatccagtgtgtgtcagtcaccagaataccactaaagtcaaaggccatcagctgctgcaggaatgttactgaagacaaactgattctgggctgtgaagattcttcgctaattctttatgaaactcaccgtagagtgactctcttagcacagactgaacttttgccttcattaataagctgccacccaagtggtgccattctgctagttggcagcaaccaaggggagttgcaaatttttgatatggctctatcccctattaacatccaactgttggctgaagaccgcttacccagggagactctgcaattcagtaaattatttgatgcctccagcagtcttgttcaaatgcaatggatagctcctcaggttgtttctcagaagggtgaaggtagtgatatctatgatctcctcttcctcaggtttgaaagaggacctttgggtgtgctgttgtttaaactaggcgtcttcactcgaggacagctgggcctgatagacatcatcttccagtacattcactgtgatgagatctatgaggcaataaacatcctgagcagcatgaactgggacactctgggccaccagtgctttatcagcatgagcgccattgtaaaccatcttcttagacagaagctcactccagagagagaagcacagcttgagacaagccttggaaccttctatgctccaacaagaccacttctggattccactatattggaatatagagatcaaatcagcaaatatgcaaggagattcttccatcacttgctcaggtaccagaggtttgaaaaggcatttctcctagctgttgacgttggtgctcgtgacctctttatggatattcattaccttgcactagataaaggtgaattggcactagctgaagtggcaagaaaaagagctagtgacattgatgcagaatcaataacctctggggttgaactcctgggacccttggacagaggggatatgctaaatgaagcatttattggcctgtctttagcacctcaaggagaagactcatttccagataacctccctccctcttgcccaacccacagacatattttacaacaaagaatactgaatggctcttctaacagacaaataattgacagaaggaatgaacttgaaaaagacatctgttctggatttttgatgactaatacctgtaatgcagaagacggagaactgagagaagacggcagagaacaggaaatcagagatggtggttctctcaaaatgattcactttggtctggtgtaaacattaagaaaaaaagaaaactgccttcttcatatctaaacttttcatggcctgatacagacttaaaatcccccgtgtggatttttaacaagagacagtatgaatcatataaattagttaagagttttgagttgagtgtttgttttcaaaataaagttttattatttcaaaaa

SEQ ID NO: 437469 - DNA, 286 bp, Homo sapiens
atgccaacactaccgcgatacataaccatcaccgactacagatctccactcacacctttagggaaatcagagatggtggttctctcaaaatgattcactttggtctggtgtaaacattaagaaaaaaagaaaactgccttcttcatatctaaacttttcatggcctgatacagacttaaaatcccccgtgtggatttttaacaagagacagtatgaatcatataaattagttaagagttttgagttgagtgtttgttttcaaaataaagttttattatttcaaaaa

SEQ ID NO: 437470 - DNA, 755 bp, Homo sapiens
acactctggaggggcgggggaattgataagttgggacgaccggacagcttctcaggttgctaagcgacgaggcgggagcgcacgcacaccctggctgctttgtagcacctgaggaaactgtggcggcggcggcggcgtcctggagacccaagagaccaagcgagcgtgtcgctccctctcgggtccgaggacctagcctaggaaccttctgcccggggtagtgtctggtgatgaggcgagagttttgctgggacgcctactccaaagcggccgggagtcgcgcttcttccccactcccgagacagttgattgaagatcagcaaacattgaaaaaaagttaattgtgctatctggttagccgaactcaaactcacgatgacagaaacaagaaaactcacttcctgtcgtaagaaggaggttccccacagacattgaattaacaactggatgaaaacttcaaggaaactgggtccatagttcacaacaagcctagatctgggagatgccagcaagcagaaaaactgtggctgaaattgaggcagtgttagcagagtcccaaaagcatgcactgcacatttgctgaattgaatattccaaaaccacaggttacagaattctaacagtgaaattccgaagcatacctaaatgtataaatgctacaagttaaccaggctgaacttggcttctgtcatctaatgaaatgagaaaatgaaatttccaaaaatattcttgacaagttgacccttataatgaag

SEQ ID NO: 437471 - DNA, 2975 bp, Homo sapiens
acactctggaggggcgggggaattgataagttgggacgaccggacagcttctcaggttgctaagcgacgaggcgggagcgcacgcacaccctggctgctttgtagcacctgaggaaactgtggcggcggcggcggcgtcctggagacccaagagaccaagcgagcgtgtcgctccctctcgggtccgaggacctagcctaggaaccttctgcccggggtagtgtctggtgatgaggcgagagttttgctgggacgcctactccaaagcggccgggagtcgcgcttcttccccactcccgagacaggatagagattccttctgccatcagatgtctttctgcttgactgaactgcacctgtggtctttgaagaataccttacacattgcggatagagacattgggatctaccagtattatgacaagaaagatccaccagcgacagagcatggtaacttagaaaagaagcagaagctggcagagtcacgagattatccttggacgctcaaaaacagacgcccagaaaaactccgagactcgctcaaagagttggaggagctgatgcaaaacagtcggtgtgtgctgagcaaatggaagaacaaatatgtctgtcagctcctttggttcaggtgtgctggtgtctctaagcctttctgggccgcagctggagaaagtggtgattgacagaagcctggtggggaagctcatctcagacaccatcagtgatgctcttctcacagacagttttatcatcttatcatttttggcacaaaacaaactatgttttattcagtttaccaagaagatggagtcttctgatgtaaacaaaagactggaaaaactctcagccttggattataagattttctattatgaaatacccggcccaataaacaagacaacagagcgacatctagctatcaactgtgttcatgatagagttgtttgctggtggccactggtcaacgatgatgcttggccttgggcccccatttcttctgagaaggacagagccaatctactcctcctgggttatgctcaaggaagactagaggttctgagttctgtccgcacagaatgggacccactggatgttcgctttggcaccaaacagccttatcaggtgttcacagtggagcactccgtaagtgtagacaaagagcccatggctgacagctgcatctatgaatgcattcggaataaaatccagtgtgtgtcagtcaccagaataccactaaagtcaaaggccatcagctgctgcaggaatgttactgaagacaaactgattctgggctgtgaagattcttcgctaattctttatgaaactcaccgtagagtgactctcttagcacagactgaacttttgccttcattaataagctgccacccaagtggtgccattctgctagttggcagcaaccaaggggagttgcaaatttttgatatggctctatcccctattaacatccaactgttggctgaagaccgcttacccagggagactctgcaattcagtaaattatttgatgcctccagcagtcttgttcaaatgcaatggatagctcctcaggttgtttctcagaagggtgaaggtagtgatatctatgatctcctcttcctcaggtttgaaagaggacctttgggtgtgctgttgtttaaactaggcgtcttcactcgaggacagctgggcctgatagacatcatcttccagtacattcactgtgatgagatctatgaggcaataaacatcctgagcagcatgaactgggacactctgggccaccagtgctttatcagcatgagcgccattgtaaaccatcttcttagacagaagctcactccagagagagaagcacagcttgagacaagccttggaaccttctatgctccaacaagaccacttctggattccactatattggaatatagagatcaaatcagcaaatatgcaaggagattcttccatcacttgctcaggtaccagaggtttgaaaaggcatttctcctagctgttgacgttggtgctcgtgacctctttatgaactcctgggacccttggacagaggggatatgctaaatgaagcatttattggcctgtctttagcacctcaaggagaagactcatttccagataacctccctccctcttgcccaacccacagacatattttacaacaaagaatactgaatggctcttctaacagacaaataattgacagaaggaatgaacttgaaaaagacatctgttctggatttttgatgactaatacctgtaatgcagaagacggagaactgagagaagacggcagagaacaggaaatcagagatggtggttctctcaaaatgattcactttggtctggtgtaaacattaagaaaaaaagaaaactgccttcttcatatctaaacttttcatggcctgatacagacttaaaatcccccgtgtggatttttaacaagagacagtatgaatcatataaattagttaagagttttgagttgagtgtttgttttcaaaataaagttttattatttcaaaaacatgcagcataacagcaaagtgatcgtaagtaaaagtcttcaacctacttattttcaataatgtaaaattttgaaagtgtcttaaattgtatgttaattaggtgctacaaaaatagaatatttaaactttgttctcccaggtactttaaaaaaggggcagtagggggcaggcatagtgctcatgcctgtagtcccagtgctttaggaggccaaggctgaaggatcacttgagcccaggagttcaagactagcctgtgcaacatagtgaaacgctgtctctagaaaaaattttaaaaattagccaggcatggtggtacatgcttgtgaagctgaggcagaagaattgcttgagcccaggagttcaaggctacagtgagctgtgatcgcgccactgcactctaacctgggcaacagagagtgaccctgtctccaaaaa

SEQ ID NO: 437472 - DNA, 2835 bp, Homo sapiens
acactctggaggggcgggggaattgataagttgggacgaccggacagcttctcaggttgctaagcgacgaggcgggagcgcacgcacaccctggctgctttgtagcacctgaggaaactgtggcggcggcggcggcgtcctggagacccaagagaccaagcgagcgtgtcgctccctctcgggtccgaggacctagcctaggaaccttctgcccggggtagtgtctggtgatgaggcgagagttttgctgggacgcctactccaaagcggccgggagtcgcgcttcttccccactcccgagacaggatagagattccttctgccatcagatgtctttctgcttgactgaactgcacctgtggtctttgaagaataccttacacattgcggatagagacattgggatctaccagtattatgacaagaaagatccaccagcgacagagcatggtaacttagaaaagaagcagaagctggcagagtcacgagattatccttggacgctcaaaaacagacgcccagaaaaactccgagactcgctcaaagagttggaggagctgatgcaaaacagtcggtgtgtgctgagcaaatggaagaacaaatatgtctgtcagctcctttggttcaggtgtgctggtgtctctaagcctttctgggccgcagctggagaaagtggtgattgacagaagcctggtggggaagctcatctcagacaccatcagtgatgctcttctcacagacagttttatcatcttatcatttttggcacaaaacaaactatgttttattcagtttaccaagaagatggagtcttctgatgtaaacaaaagactggaaaaactctcagccttggattataagattttctattatgaaatacccggcccaataaacaagacaacagagcgacatctagctatcaactgtgttcatgatagagttgtttgctggtggccactggtcaacgatgatgcttggccttgggcccccatttcttctgagaaggacagagccaatctactcctcctgggttatgctcaaggaagactagaggttctgagttctgtccgcacagaatgggacccactggatgttcgctttggcaccaaacagccttatcaggtgttcacagtggagcactccgtaagtgtagacaaagagcccatggctgacagctgcatctatgaatgcattcggaataaaatccagtgtgtgtcagtcaccagaataccactaaagtcaaaggccatcagctgctgcaggaatgttactgaagacaaactgattctgggctgtgaagattcttcgctaattctttatgaaactcaccgtagagtgactctcttagcacagactgaacttttgccttcattaataagctgccacccaagtggtgccattctgctagttggcagcaaccaaggggagttgcaaatttttgatatggctctatcccctattaacatccaactgttggctgaagaccgcttacccagggagactctgcaattcagtaaattatttgatgcctccagcagtcttgttcaaatgcaatggatagctcctcaggttgtttctcagaagggtgaaggtagtgatatctatgatctcctcttcctcaggtttgaaagaggacctttgggtgtgctgttgtttaaactaggcgtcttcactcgaggacagctgggcctgatagacatcatcttccagtacattcactgtgatgagatctatgaggcaataaacatcctgagcagcatgaactgggacactctgggccaccagtgctttatcagcatgagcgccattgtaaaccatcttcttagacagaagctcactccagagagagaagcacagcttgagacaagccttggaaccttctatgctccaacaagaccacttctggattccactatattggaatatagagatcaaatcagcaaatatgcaaggagattcttccatcacttgctcagaaactcctgttaaagtagtagtatcatttgacaaattggacaaagaatataatagagaagtcaagcatgacttcaagtgttttgacctgagcaattggaaaaacaaaattgttactgacaagattgataagactccagaaagaacaggtaccagaggtttgaaaaggcatttctcctagctgttgacgttggtgctcgtgacctctttatggatattcattaccttgcactagataaaggtgaattggcactagctgaagtggcaagaaaaagagctagtgacattgatgcagaatcaataacctctggggttgagtttgttgaaatggaagagcactggctttgtgccagacatttcagaactcctgggacccttggacagaggggatatgctaaatgaagcatttattggcctgtctttagcacctcaaggagaagactcatttccagataacctccctccctcttgcccaacccacagacatattttacaacaaagaatactgaatggctcttctaacagacaaataattgacagaaggaatgaacttgaaaaagacatctgttctggatttttgatgactaatacctgtaatgcagaagacggagaactgagagaagacggcagagaacaggaaatcagagatggtggttctctcaaaatgattcactttggtctggtgtaaacattaagaaaaaaagaaaactgccttcttcatatctaaacttttcatggcctgatacagacttaaaatcccccgtgtggatttttaacaagagacagtatgaatcatataaattagttaagagttttgagttgagtgtttgttttcaaaataaagttttattatttcaaaaa

SEQ ID NO: 437473 - DNA, 2213 bp, Homo sapiens
acactctggaggggcgggggaattgataagttgggacgaccggacagcttctcaggttgctaagcgacgaggcgggagcgcacgcacaccctggctgctttgtagcacctgaggaaactgtggcggcggcggcggcgtcctggagacccaagagaccaagcgagcgtgtcgctccctctcgggtccgaggacctagcctaggaaccttctgcccggggtagtgtctggtgatgaggcgagagttttgctgggacgcctactccaaagcggccgggagtcgcgcttcttccccactcccgagacaggatagagattccttctgccatcagatgtctttctgcttgactgaactgcacctgtggtctttgaagaataccttacacattgcggatagagacattgggatctaccagtattatgacaagaaagatccaccagcgacagagcatggtaacttagaaaagaagcagaagctggcagagtcacgagattatccttggacgctcaaaaacagacgcccagaaaaactccgagactcgctcaaagagttggaggagctgatgcaaaacagtcggtgtgtgctgagcaaatggaagaacaaatatgtctgtcagctcctttggttcaggtgtgctggtgtctctaagcctttctgggccgcagctggagaaagtggtgattgacagaagcctggtggggaagctcatctcagacaccatcagtgatgctcttctcacagacagttttatcatcttatcatttttggcacaaaacaaactatgttttattcagtttaccaagaagatggagtcttctgatgtaaacaaaagactggaaaaactctcagccttggattataagattttctattatgaaatacccggcccaataaacaagacaacagagcgacatctagctatcaactgtgttcatgatagagttgtttgctggtggccactggtcaacgatgatgcttggccttgggcccccatttcttctgagaaggacagagccaatctactcctcctgggttatgctcaaggaagactagaggttctgagttctgtccgcacagaatgggacccactggatgttcgctttggcaccaaacagccttatcaggtgttcacagtggagcactccgtaagtgtagacaaagagcccatggctgacagctgcatctatgaatgcattcggaataaaatccagtgtgtgtcagtcaccagaataccactaaagtcaaaggccatcagctgctgcaggaatgttactgaagacaaactgattctgggctgtgaagattcttcgctaattctttatgaaactcaccgtagagtgactctcttagcacagactgaacttttgccttcattaataagctgccacccaagtggtgccattctgctagttggcagcaaccaaggggagttgcaaatttttgatatggctctatcccctattaacatccaactgttggctgaagaccgcttacccagggagactctgcaattcagtaaattatttgatgcctccagcagtcttgttcaaatgcaatggatagctcctcaggttgtttctcagaagggtgaaggtagtgatatctatgatctcctcttcctcaggtttgaaagaggacctttgggtgtgctgttgtttaaactaggcgtcttcactcgaggacagctgggcctgatagacatcatcttccagtacattcactgtgatgagatctatgaggcaataaacatcctgagcagcatgaactgggacactctgggccaccagtgctttatcagcatgagcgccattgtaaaccatcttcttagacagaagctcactccagagagagaagcacagcttgagacaagccttggaaccttctatgctccaacaagaccacttctggattccactatattggaatatagagatcaaatcagcaaatatgcaaggagattcttccatcacttgctcaggtaccagaggtttgaaaaggcatttctcctagctgttgacgttggtgctcgtgacctctttatggttcttggacacatgtgcggaacatgcaggtttgtcacataggtacctcagttggaaatgcagaaatcacccaccttctgtgttgatctcactgggagctgcagactggagctgttccaattcagccatcttgccagccacccatatgtcacattttctttatacaatcaacc

SEQ ID NO: 437474 - DNA, 428 bp, Homo sapiens
cagttggatctttgtgtggcatgttgatctttttttgcttgcaaatcagaggcactttaactgataatgacaatgtgtacagccaactacgctctctctttttctgttgtgcttcaggagctgatgcaaaacagtcggtgtgtgctgagcaaatggaagaacaaatatgtctgtcaggtaaaatgatttgacaagcctttgcagtgtttaaccaatggagctgaaaactatgtagtaattggtattcttgtgttatgttaggtaatggacaaaaacttttttagcagtggttatttcatagtttgaattctagttgttctagagctaacattagacagattgacacaggccaccaggctcattaatcagtattaaccagtatagttgtactgacatacaaacactaataaaaatcttttcatattgta

SEQ ID NO: 437475 - DNA, 437 bp, Homo sapiens
tgtgaagttgaagaaaaaccaaagtttatctgaatgtacttgatatatttcttaacaggttctgagttctgtccgcacagaatgggacccactggatgttcgctttggcaccaaacagccttatcaggtgttcacagtggagcactccgtaagtgtagacaaagagcccatggctgacagctgcatctatgaatgcattcggaataaaatccagtgtgtgtcagtcaccagaataccactaaagtcaaaggccatcagctgctgcaggaatgttactgaagacaaactgattctgggctgtgaagattcttcgctaattctttatgaaactcaccgtagagtgactctcttagcacagactgaacttttgccttcattaataagctgccacccaagtggtgccattctgctagttggcagcaaccaaggggagttgc

SEQ ID NO: 437476 - DNA, 2471 bp, Homo sapiens
atctctgcaagacaaaagtcagaaatggcttccctggggactgagagcccatagttctcttcccactgctgcttctacccttttgttttgcttggctctctaaaattgtctcagctccagctcttctcacagacagttttatcatcttatcatttttggcacaaaacaaactatgttttattcagtttaccaagaagatggagtcttctgatgtaaacaaaagactggaaaaactctcagccttggattataagattttctattatgaaatacccggcccaataaacaagacaacagagcgacatctagctatcaactgtgttcatgatagagttgtttgctggtggccactggtcaacgatgatgcttggccttgggcccccatttcttctgagaaggacagagccaatctactcctcctgggttatgctcaaggaagactagaggttctgagttctgtccgcacagaatgggacccactggatgttcgctttggcaccaaacagccttatcaggtgttcacagtggagcactccgtaagtgtagacaaagagcccatggctgacagctgcatctatgaatgcattcggaataaaatccagtgtgtgtcagtcaccagaataccactaaagtcaaaggccatcagctgctgcaggaatgttactgaagacaaactgattctgggctgtgaagattcttcgctaattctttatgaaactcaccgtagagtgactctcttagcacagactgaacttttgccttcattaataagctgccacccaagtggtgccattctgctagttggcagcaaccaaggggagttgcaaatttttgatatggctctatcccctattaacatccaactgttggctgaagaccgcttacccagggagactctgcaattcagtaaattatttgatgcctccagcagtcttgttcaaatgcaatggatagctcctcaggttgtttctcagaagggtgaaggtagtgatatctatgatctcctcttcctcaggtttgaaagaggacctttgggtgtgctgttgtttaaactaggcgtcttcactcgaggacagctgggcctgatagacatcatcttccagtacattcactgtgatgagatctatgaggcaataaacatcctgagcagcatgaactgggacactctgggccaccagtgctttatcagcatgagcgccattgtaaaccatcttcttagacagaagctcactccagagagagaagcacagcttgagacaagccttggaaccttctatgctccaacaagaccacttctggattccactatattggaatatagagatcaaatcagcaaatatgcaaggagattcttccatcacttgctcaggtaccagaggtttgaaaaggcatttctcctagctgttgacgttggtgctcgtgacctctttatggatattcattaccttgcactagataaaggtgaattggcactagctgaagtggcaagaaaaagagctagtgacattgatgcagaatcaataacctctggggttgaactcctgggacccttggacagaggggatatgctaaatgaagcatttattggcctgtctttagcacctcaaggagaagactcatttccagataacctccctccctcttgcccaacccacagacatattttacaacaaagaatactgaatggctcttctaacagacaaataattgacagaaggaatgaacttgaaaaagacatctgttctggatttttgatgactaatacctgtaatgcagaagacggagaactgagagaagacggcagagaacaggaaatcagagatggtggttctctcaaaatgattcactttggtctggtgtaaacattaagaaaaaaagaaaactgccttcttcatatctaaacttttcatggcctgatacagacttaaaatcccccgtgtggatttttaacaagagacagtatgaatcatataaattagttaagagttttgagttgagtgtttgttttcaaaataaagttttattatttcaaaaacatgcagcataacagcaaagtgatcgtaagtaaaagtcttcaacctacttattttcaataatgtaaaattttgaaagtgtcttaaattgtatgttaattaggtgctacaaaaatagaatatttaaactttgttctcccaggtactttaaaaaaggggcagtagggggcaggcatagtgctcatgcctgtagtcccagtgctttaggaggccaaggctgaaggatcacttgagcccaggagttcaagactagcctgtgcaacatagtgaaacgctgtctctagaaaaaattttaaaaattagccaggcatggtggtacatgcttgtgaagctgaggcagaagaattgcttgagcccaggagttcaaggctacagtgagctgtgatcgcgccactgcactctaacctgggcaacagagagtgaccctgtctccaaaaa

SEQ ID NO: 437477 - DNA, 2445 bp, Homo sapiens
  misc_feature (2065)..(2065): n is a, c, g, or t
aaattttttaaataaatagactggtagagaacactgatcagtatcccctaataaatccactttatcctcggatggtttctatcatgtaaacataggattaaactcttagcacaaataaaatggaatgttttcgtctctacattcagctcttctcacagacagttttatcatcttatcatttttggcacaaaacaaactatgttttattcagtttaccaagaagatggagtcttctgatgtaaacaaaagactggaaaaactctcagccttggattataagattttctattatgaaatacccggcccaataaacaagacaacagagcgacatctagctatcaactgtgttcatgatagagttgtttgctggtggccactggtcaacgatgatgcttggccttgggcccccatttcttctgagaaggacagagccaatctactcctcctgggttatgctcaaggaagactagaggttctgagttctgtccgcacagaatgggacccactggatgttcgctttggcaccaaacagccttatcaggtgttcacagtggagcactccgtaagtgtagacaaagagcccatggctgacagctgcatctatgaatgcattcggaataaaatccagtgtgtgtcagtcaccagaataccactaaagtcaaaggccatcagctgctgcaggaatgttactgaagacaaactgattctgggctgtgaagattcttcgctaattctttatgaaactcaccgtagagtgactctcttagcacagactgaacttttgccttcattaataagctgccacccaagtggtgccattctgctagttggcagcaaccaaggggagttgcaaatttttgatatggctctatcccctattaacatccaactgttggctgaagaccgcttacccagggagactctgcaattcagtaaattatttgatgcctccagcagtcttgttcaaatgcaatggatagctcctcaggttgtttctcagaagggtgaaggtagtgatatctatgatctcctcttcctcaggtttgaaagaggacctttgggtgtgctgttgtttaaactaggcgtcttcactcgaggacagctgggcctgatagacatcatcttccagtacattcactgtgatgagatctatgaggcaataaacatcctgagcagcatgaactgggacactctgggccaccagtgctttatcagcatgagcgccattgtaaaccatcttcttagacagaagctcactccagagagagaagcacagcttgagacaagccttggaaccttctatgctccaacaagaccacttctggattccactatattggaatatagagatcaaatcagcaaatatgcaaggagattcttccatcacttgctcaggtaccagaggtttgaaaaggcatttctcctagctgttgacgttggtgctcgtgacctctttatggatattcattaccttgcactagataaaggtgaattggcactagctgaagtggcaagaaaaagagctagtgacattgatgcagaatcaataacctctggggttgaactcctgggacccttggacagaggggatatgctaaatgaagcatttattggcctgtctttagcacctcaaggagaagactcatttccagataacctccctccctcttgcccaacccacagacatattttacaacaaagaatactgaatggctcttctaacagacaaataattgacagaaggaatgaacttgaaaaagacatctgttctggatttttgatgactaatacctgtaatgcagaagacggagaactgagagaagacggcagagaacaggaaatcagagatggtggttctctcaaaatgattcactttggtctggtgtaaacattaagaaaaaaagaaaactgccttcttcatatctaaacttttcatggcctgatacagacttaaaatcccccgtgtggatttttaacaagagacagtatgaatcatataaattagttaagagttttgagttgagtgtttgttttcaaaataaagttttattatttcaaaaaaaanaaaatggcctatggggtctctggcctgaacctctgagctctgttgcctttaccgttgattgatggatgatccttgatcattgattacttactctctgccctccggctgtcgggtgcggcaagcggtatctcataagtggaaggccggatttccgctatccacagggttaggggatgacgcaacatgtaacctgtgggccagcggccggccaggagccgtgaaccggccaaggggctcgtggctgtccatatgctataggctcctgacgagtgtcaagcatatcaacactcaactctcaggtgggaggaggcgacacgactctggactatccagatgcctcgcgctggaagctgcatggtgcgttgtgctgtttccagcct

SEQ ID NO: 437478 - DNA, 3226 bp, Homo sapiens
  misc_feature (2846)..(2846): n is a, c, g, or t
acactctggaggggcgggggaattgataagttgggacgaccggacagcttctcaggttgctaagcgacgaggcgggagcgcacgcacaccctggctgctttgtagcacctgaggaaactgtggcggcggcggcggcgtcctggagacccaagagaccaagcgagcgtgtcgctccctctcgggtccgaggacctagcctaggaaccttctgcccggggtagtgtctggtgatgaggcgagagttttgctgggacgcctactccaaagcggccgggagtcgcgcttcttccccactcccgagacaggatagagattccttctgccatcagatgtctttctgcttgactgaactgcacctgtggtctttgaagaataccttacacattgcggatagagacattgggatctaccagtattatgacaagaaagatccaccagcgacagagcatggtaacttagaaaagaagcagaagctggcagagtcacgagattatccttggacgctcaaaaacagacgcccagaaaaactccgagactcgctcaaagagttggaggagctgatgcaaaacagtcggtgtgtgctgagcaaatggaagaacaaatatgtctgtcagctcctttggttcaggtgtgctggtgtctctaagcctttctgggccgcagctggagaaagtggtgattgacagaagcctggtggggaagctcatctcagacaccatcagtgatgctcttctcacagacagttttatcatcttatcatttttggcacaaaacaaactatgttttattcagtttaccaagaagatggagtcttctgatgtaaacaaaagactggaaaaactctcagccttggattataagattttctattatgaaatacccggcccaataaacaagacaacagagcgacatctagctatcaactgtgttcatgatagagttgtttgctggtggccactggtcaacgatgatgcttggccttgggcccccatttcttctgagaaggacagagccaatctactcctcctgggttatgctcaaggaagactagaggttctgagttctgtccgcacagaatgggacccactggatgttcgctttggcaccaaacagccttatcaggtgttcacagtggagcactccgtaagtgtagacaaagagcccatggctgacagctgcatctatgaatgcattcggaataaaatccagtgtgtgtcagtcaccagaataccactaaagtcaaaggccatcagctgctgcaggaatgttactgaagacaaactgattctgggctgtgaagattcttcgctaattctttatgaaactcaccgtagagtgactctcttagcacagactgaacttttgccttcattaataagctgccacccaagtggtgccattctgctagttggcagcaaccaaggggagttgcaaatttttgatatggctctatcccctattaacatccaactgttggctgaagaccgcttacccagggagactctgcaattcagtaaattatttgatgcctccagcagtcttgttcaaatgcaatggatagctcctcaggttgtttctcagaagggtgaaggtagtgatatctatgatctcctcttcctcaggtttgaaagaggacctttgggtgtgctgttgtttaaactaggcgtcttcactcgaggacagctgggcctgatagacatcatcttccagtacattcactgtgatgagatctatgaggcaataaacatcctgagcagcatgaactgggacactctgggccaccagtgctttatcagcatgagcgccattgtaaaccatcttcttagacagaagctcactccagagagagaagcacagcttgagacaagccttggaaccttctatgctccaacaagaccacttctggattccactatattggaatatagagatcaaatcagcaaatatgcaaggagattcttccatcacttgctcaggtaccagaggtttgaaaaggcatttctcctagctgttgacgttggtgctcgtgacctctttatggatattcattaccttgcactagataaaggtgaattggcactagctgaagtggcaagaaaaagagctagtgacattgatgcagaatcaataacctctggggttgaaagagcaactacaataatgaacaccaatatccatggacagcatctacaacaagctttagtgacaacatattcttataaaccccaaaacataagtggacagggataaatcaccaacagctacaggacccactaaaaacttcatgaggtctagagggtccacagtgggtgttgaagcaatgtgatttctgtgcagtcctctgaatgccaacatgaaaaaattcaatgaggctcagagtttgttgaaatggaagagcactggctttgtgccagacatttcagaactcctgggacccttggacagaggggatatgctaaatgaagcatttattggcctgtctttagcacctcaaggagaagactcatttccagataacctccctccctcttgcccaacccacagacatattttacaacaaagaatactgaatggctcttctaacagacggagaactgagagaagacggcagagaacaggaaatcagagatggtggttctctcaaaatgattcactttggtctggtgtaaacattaagaaaaaaagaaaactgccttcttcatatctaaacttttcatggcctgatacagacttaaaatcccccgtgtggatttttaacaagagacagtatgaatcatataaattagttaagagttttgagttgagtgtttgttttcaaaataaagttttattatttcaaaaaaaanaaaatggcctatggggtctctggcctgaacctctgagctctgttgcctttaccgttgattgatggatgatccttgatcattgattacttactctctgccctccggctgtcgggtgcggcaagcggtatctcataagtggaaggccggatttccgctatccacagggttaggggatgacgcaacatgtaacctgtgggccagcggccggccaggagccgtgaaccggccaaggggctcgtggctgtccatatgctataggctcctgacgagtgtcaagcatatcaacactcaactctcaggtgggaggaggcgacacgactctggactatccagatgcctcgcgctggaagctgcatggtgcgttgtgctgtttccagcct

SEQ ID NO: 437479 - DNA, 1133 bp, Homo sapiens
agccttcgttgcagtcgtcactcgcatctggctaccagctccccgctgccctgcgctcggcgggctggcatcgggcccggggaaagcggagcagtagttcggtgtagcactgtttgcggcgaggagaaaggaaggagaggagaaaactgcactggatcaaggaggtcttcccataggcctgcagtagggctgtttaccattggaagcaagggaaagaggaggagatcaatctagaagcatggagatctgcctgcatgtctgctgcagggcttaagatcactggaagcaaagaaacaaagaggagattgctcctgatcagtatagactgggtgtattgccaagagaagcaagaggagaggagggaactgcctcggatcattacaggtgttgatcccaagagcattccctagtaaaaacgcttcatgctgaactctatctctgggcctgcttcctgggaagccaacctgcaacagttggtacaagaagtggttcgagaaagcaaacactgtgatgaaattttggagatgaatcacctgctacccagctgtcaatgaagactccatcattggtggtaggtggagtagataggcctctggaataaggtagcagaggaattgttaaaattttcaatggtggttaactgggttggcatactggtaaaatgggacacattaactggtgccatgtatcagacctttgagaaatatgggatatattaaatataaggaaggccagaaaattgggcggctgttgctaagcagattgagctctggaaaagaataacaaaaagctgaattaaattaatcaacaattgaaagctatgtttgaaagtcagatggctttattcataacatataaagaggctctcatcttttccaggtagaaggtggagaaatctgaggagtagactcaggatttgttaaaagcaagcttcaaagaaagttaaaattctaaccaagacaagtcttctatgccgagttatgtgccatggttaagaaggaatgggactctgacacttggaatgggggacatctggattgatgtccctaaaaatcttatatccccagattcccctgagccccttgagaagtgtcctactcctccctattaagggctggcactccatcttgctt

SEQ ID NO: 437480 - DNA, 1449 bp, Homo sapiens
tttgagtctggagctggggataacaccagcatcaaggataagtttgaggctgctggtggagttgatatagggtcttggttctgtgctggtaatgaaaacacaagtgaggacaaatctgcacctaaggctaaagccaaaaagtcatctgagtcaagaggcatatatccgtacatggtccctggggcaggaatggggtcatgggatggagccatgatctggtcggaaactaagtttgcacatcaaagtgaggccagcttcccagttgaagatgagtccagaaaacaaaccaggactggggaaaaaactcggccctggtcttgccgctgtaaacacgaagctaatatggatccacgagatcttgaaaaactcatttgcatgattgagatgactgaagatccttctgttcatgaaatagccaataatgctttatataacagtgctgattattcttattctcatgaagttgttcgtaatgtaggtggaatttcagttattgaaagcttgctcaataatccctaccccagtgttaggcagaaggctttaaatgcactgaataatatctcagtggctgctgaaaaccataggaaggttaaaacttacttaaaccaagtatgtgaagacactgtcacctatcccttgaattcaaatgtgcagttggctggactaaggttgataaggcatctgactattaccagtgaatatcagcatatggttacaaattatatttcagaatttcttcgtttgttaacggtgggaagtggagaaactaaagaccatgttttgggaatgcttttgaatttctctaaaaatccatctatgacaaaagacttgctcattgccaatgcaccaacatcactgattaacatttttagcaagaaagagacaaaggagaatattcttaatgctctttcactatttgaaaatataaattaccattttaaaagaagagcaaaagcatttacccaggacaaattcagtaaaaattccctttatttcctattccaacgacctaaagcatgtgccaagaaacttcgagccttagcagcagaatgcaatgaccctgaggtgaaagagagagttgagctattaataagtaaactctgattggctgtatgttcccaaacaaatttgagtaatattttggttttgcactctggaagtaatgcacattgtaaattgcattataactttgaaactgatgttacctatgatggtctatagctggaccattttatgaacaccaaatgaattcaagcttgtactaaaaatacatgtgttgatttttatcttgtctggattgagatatttttagtatgcttcatgagcagaaactgaatggattcttcataagtaaggtaatctttggtcctttgtgtggacttatgtttatacatttaagactatttttatgtcatcaataaagttgtgtgttttaagcagcagaaaaaa

SEQ ID NO: 437481 - DNA, 1178 bp, Homo sapiens
agccttcgttgcagtcgtcactcgcatctggctaccagctccccgctgccctgcgctcggcgggctggcatcgggcccggggaaagcggagcagtagttcggtgtagcactgtttgcggcgaggagaaaggaaggagaggagaaaactgcactggatcaaggaggtcttcccataggcctgcagtagggctgtttaccattggaagcaagggaaagaggaggagatcaatctagaagcatggagatctgcctgcatgtctgctgcagggcttaagatcactggaagcaaagaaacaaagaggagattgctcctgatcagtatagactgggtgtattgccaagagaagcaagaggagaggagggaactgcctcggatcattacaggtccacctccagaggcagctgtagtggcctttgagtggctgaagaccagcaccctcacaggcctacacccacaactaccactctctttaccccagcccgagtgcgctctaccataccttgttcgtgcttttagcaggggtgattacatgggccgcattcaggaagtgggctgggtgactgcaggactggtgatctgggctggcacctgctactacatttacaaatttaccaagggaagagcccagagtgtgaggactcttgccagaaatggatccacagttaagatggagactgtggttggggtacagagccagaccttggccataaatgaagcagagattaagactaaaccccaagtcgagattggagcagaaactggagcaagaagtgggcctggggctgaagtagagaccaaggccactgctatactattaataagtaaactctgattggctgtatgttcccaaacaaatttgagtaatattttggttttgcactctggaagtaatgcacattgtaaattgcattataactttgaaactgatgttacctatgatggtctatagctggaccattttatgaacaccaaatgaattcaagcttgtactaaaaatacatgtgttgatttttatcttgtctggattgagatatttttagtatgcttcatgagcagaaactgaatggattcttcataagtaaggtaatctttggtcctttgtgtggacttatgtttatacatttaagactatttttatgtcatcaataaagttgtgtgttttaagcagcagaaaaaa

SEQ ID NO: 437482 - DNA, 1110 bp, Homo sapiens
cgataggcgacgcggggagcggaagccctttacactacggtgtttccggcttcaagatggtcgcctaagctgtttagtgaaacttcttccacctttctccattcctctaggtgctttttctgaacctggatgtgaggcattaaaggatccgacggaaatagaattgaaggcattctaaaatggctaaccgtacagtgaaggatgcgcacagcatccatggcaccaaccctcaatatctggtggagaagatcattcgaacgcgaatctatgagtccaagtactggaaagaggagtgctttggacttacagctgaacttgtagtcgataaagccatggagttaagaaacgctatgtattagaggaagctgagcaactggagcctcgagttagtgctctggaagaggacatggatgatgtggagtccagtgaagaggaagaagaggaggatgagaagttggaaagagtgccatcacctgatcaccgccggagaagctaccgagacttggacaagccccgtcgctctcccacactgcgctacaggaggagtaggagccggtctcccagaaggcggagtcgatctcccaaaaggagaagcccctcccctcgccgagaaaggcatcggagcaagagtccaagacgtcaccgcagcaggtcccgagatcggcggcacagatcccgttccaagtccccaggtcatcaccgtagtcacagacacaggagccactcaaagtctcccgaaaggtctaagaagagccacaagaagagccggagagggaatgagtaatggactcagtttggttttagtccacatggcctcctgtggatataaggatatctgtatgtggaaggattaagatctcccccaggcagctataagaatattttagtttttttcttatcaagtttctcaacctttatttttaatgaaggaggtgctgagttttgtatctttttaatcataatcaacatcagtttttgacccaactaaccttgactgtattcaaacttatgagagtataaaggatctggaggttggggatatgactgacaaggaaaggctgtggccacctgatgaccctttccctttttattaaaccggacacacctgtt

SEQ ID NO: 437483 - DNA, 807 bp, Homo sapiens
cgggccccaggaacaccaggccgagcaaaaccaagcggattaccggccctcgtgccatttcggcacgagctggtccgaaattcgcctcatggttttgacctaaattgctagacagtcgtgccattcacaaagtcagaaaatacagcaggaagagacagcttttagaggggcagagaattagaggatggtggtagtaatgaaaatgatgcattcagtttaacaagtttaatttgagacagctatggtatagctaaaaacaaaagcccataaagttggagatagggaccagagtttaacatagcgatctaggccagaattgacaatgtttaagtaatggtggaatctgtcaataagacttcccagagtgttaatatatatcagaaatgcacacaacagaaccataggcaacaccaacacaggaagaaatagaagtcacctattgaaaactggaatggcccattcagaaagacaggagaattaggagagagtgagtgaaagaagccaagggtcaagaatgcagaagcaaaggaaggactaaaaagcctccacggacatcgataatcaagagattattaagatctttgctagaagagttcctttacctgtacttaactcccttaaaaagagaaaagtgatggaatgacttctgcaactgtagtcccagcaggaactgtgaagaccagctgccctgcaggatccagtttttcttgggaggttgtatctggtcataaggtaaacattctatatattctatgcctgctctagaattgaaagacttcagcagtattaaagcattttttaatctta

SEQ ID NO: 437484 - DNA, 813 bp, Homo sapiens
agccccaaccccgggcccagaccaaccgggcgagagagcaacgggcaaaccgcccttggtccgattcggcccgagctcgggccgattcggcgccaaggtttttgattaatatgtaagacagtcgtgccattcacaaagtcagaaaatacagcaggaagagacagcttttagaggggcagagaattagaggatggtggtagtaatgaaaatgatgcattcagtttaacaagtttaatttgagacagctatggtatagctaaaaacaaaagcccataaagttggagatagggaccagagtttaacatagcgatctaggccagaattgacaatgtttaagtaatggtggaatctgtcaataagacttcccagagtgttaatatatatcagaaatgcacacaacagaaccataggcaacaccaacacaggaagaaatagaagtcacctattgaaaactggaatggcccattcagaaagacaggagaattaggagagagtgagtgaaagaagccaagggtcaagaatgcagaagcaaaggaaggactaaaaagcctccacggacatcgataatcaagagattattaagatctttgctagaagagttcctttacctgtacttaactcccttaaaaagagaaaagtgatggaatgacttctgcaactgtagtcccagcaggaactgtgaagaccagctgccctgcaggatccagtttttcttgggaggttgtatctggtcataaggtaaacattctatatattctatgcctgctctagaattgaaagacttcagcagtattaaagcattttttaatctta

SEQ ID NO: 437485 - DNA, 389 bp, Homo sapiens
tttcgccatgttggccaggcctgtcttgaactcctaacctcaagtgatctgcctgccttggcctcccaaagtgctgggattacaggcgtgagccaccactcctagccagttctcaaaagctatcactccatgtgccatataagatacatgttctaaattcagaaacattgaaggttcagatgagaaattatatttgagttatatgatctcttcaagatcatccctacataattcaggactgtttgtgcttgtttttgtgtttgtctcctgctaattgggacatcttcattcatcccttaatctcttctaaagaggcctagcacatagatgtcctgatatgaagtcttaacacttcttttactttttggcatctaaatcttttatttcca

SEQ ID NO: 437486 - DNA, 2607 bp, Homo sapiens
cgataggcgacgcggggagcggaagccctttacactacggtgtttccggcttcaagatggtcgcctaagctgtttagtgaaacttcttccacctttctccattcctctaggtgctttttctgaacctggatgtgaggcattaaaggatccgacggaaatagaattgaaggcattctaaaatggctaaccgtacagtgaaggatgcgcacagcatccatggcaccaaccctcaatatctggtggagaagatcattcgaacgcgaatctatgagtccaagtactggaaagaggagtgctttggacttacagctgaacttgtagtcgataaagccatggagttaaggtttgtgggtggcgtctatggtggcaacataaaaccaacaccctttctgtgtttaaccttgaagatgcttcaaattcaacccgagaaggatatcattgtagagtttatcaaaaatgaagatttcaagtatgtccgcatgctgggggcactttacatgaggctgacaggcactgcaattgattgctacaagtacttggaacctttgtacaatgactatcgaaaaatcaagagccagaaccgaaatggggagtttgaattgatgcatgttgatgagtttattgatgaactattgcacagtgagagagtctgtgatatcattctgccccgactacagaaacgctatgtattagaggaagctgagcaactggagcctcgagttagtgctctggaagaggacatggatgatgtggagtccagtgaagaggaagaagaggaggatgagaagttggaaagagtgccatcacctgatcaccgccggagaagctaccgagacttggacaagccccgtcgctctcccacactgcgctacaggaggagtaggagccggtctcccagaaggcggagtcgatctcccaaaaggagaagcccctcccctcgccgagaaaggcatcggagcaagagtccaagacgtcaccgcagcaggtcccgagatcggcggcacagatcccgttccaagtccccaggtcatcaccgtagtcacagacacaggagccactcaaagtctcccgaaaggtctaagaagagccacaagaagagccggagagggaatgagtaatggactcagtttggttttagtccacatggcctcctgtggatataaggatatctgtatgtggaaggattaagatctcccccaggcagctataagaatattttagtttttttcttatcaagtttctcaacctttatttttaatgaaggaggtgctgagttttgtatctttttaatcataatcaacatcagtttttgacccaactaaccttgactgtattcaaacttatgagagtataaaggatctggaggttggggatatgactgacaaggaaaggctgtggccacctgatgaccctttccctttttattaaaccggacacacctgtttcccatttcgctgtagtttagtttttggtttgttgtggttggaactgctttgagaatcctgggatttgtgctgctgctgttattcaaagatcaaaggagtaaaacatagttgctcctaacttttttccagcagcagcaagtggtaataaacatgaaaactggtttgtagcagttttgaaagaatagaatgcattcaaatgtaaggctgcttctggatcattaaagccagtttcatcaaacagttcaacagagagcagcacttaataccctttatacagcccattttttcatagtttcatttgttcttgcccacaagcttgaaatccaggttaaggtatccagcctttatcatataagcattgacattatccaggcctagtcagtagcagtagggtaacgggattgaaaaagatttgatggagaggaaagtatctaatattagtcatggttttgacctaaattgctagacagtcgtgccattcacaaagtcagaaaatacagcaggaagagacagcttttagaggggcagagaattagaggatggtggtagtaatgaaaatgatgcattcagtttaacaagtttaatttgagacagctatggtatagctaaaaacaaaagcccataaagttggagatagggaccagagtttaacatagcgatctaggccagaattgacaatgtttaagtaatggtggaatctgtcaataagacttcccagagtgttaatatatatcagaaatgcacacaacagaaccataggcaacaccaacacaggaagaaatagaagtcacctattgaaaactggaatggcccattcagaaagacaggagaattaggagagagtgagtgaaagaagccaagggtcaagaatgcagaagcaaaggaaggactaaaaagcctccacggacatcgataatcaagagattattaagatctttgctagaagagttcctttacctgtacttaactcccttaaaaagagaaaagtgatggaatgacttctgcaactgtagtcccagcaggaactgtgaagaccagctgccctgcaggatccagtttttcttgggaggttgtatctggtcataaggtaaacattctatatattctatgcctgctctagaattgaaagacttcagcagtattaaagcattttttaatctta

SEQ ID NO: 437487 - DNA, 2422 bp, Homo sapiens
cgataggcgacgcggggagcggaagccctttacactacggtgtttccggcttcaagatggtcgcctaagctgtttagtgaaacttcttccacctttctccattcctctaggtgctttttctgaacctggatgtgaggcattaaaggatccgacggaaatagaattgaaggcattctaaaatggctaaccgtacagtgaaggatgcgcacagcatccatggcaccaaccctcaatatctggtggagaagatcattcgaacgcgaatctatgagtccaagtactggaaagaggagtgctttggacttacagctgaacttgtagtcgataaagccatggagttaagaaacgctatgtattagaggaagctgagcaactggagcctcgagttagtgctctggaagaggacatggatgatgtggagtccagtgaagaggaagaagaggaggatgagaagttggaaagagtgccatcacctgatcaccgccggagaagctaccgagacttggacaagccccgtcgctctcccacactgcgctacaggaggagtaggagccggtctcccagaaggcggagtcgatctcccaaaaggagaagcccctcccctcgccgagaaaggcatcggagcaagagtccaagacgtcaccgcagcaggtcccgagatcggcggcacagatcccgttccaagtccccaggtcatcaccgtagtcacagacacaggagccactcaaagtctcccgaaaggtctaagaagagccacaagaagagccggagagggaatgagtaatggactcagtttggttttagtccacatggcctcctgtggatataaggatatctgtatgtggaaggattaagatctcccccaggcagctataagaatattttagtttttttcttatcaagtttctcaacctttatttttaatgaaggaggtgctgagttttgtatctttttaatcataatcaacatcagtttttgacccaactaaccttgactgtattcaaacttatgagagtataaaggatctggaggttggggatatgactgacaaggaaaggctgtggccacctgatgaccctttccctttttattaaaccggacacacctgtttcccatttcgctgtagtttagtttttggtttgttgtggttggaactgctttgagaatcctgggatttgtgctgctgctgttattcaaagatcaaaggagtaaaacatagttgctcctaacttttttccagcagcagcaagtggtaataaacatgaaaactggtttgtagcagttttgaaagaatagaatgcattcaaatgtaaggctgcttctggatcattaaagccagtttcatcaaacagttcaacagagagcagcacttaataccctttatacagcccattttttcatagtttcatttgttcttgcccacaagcttgaaatccaggttaaggtatccagcctttatcatataagcattgacattatccaggcctagtcagtagcagtagggtaacgggattgaaaaagatttgatggagaggaaagtatctaatattagtcatggttttgacctaaattgctagacagtcgtgccattcacaaagtcagaaaatacagcaggaagagacagcttttagaggggcagagaattagaggatggtggtagtaatgaaaatgatgcattcagtttaacaagtttaatttgagacagctatggtatagctaaaaacaaaagcccataaagttggagatagggaccagagtttaacatagcgatctaggccagaattgacaatgtttaagtaatggtggaatctgtcaataagacttcccagagtgttaatatatatcagaaatgcacacaacagaaccataggcaacaccaacacaggaagaaatagaagtcacctattgaaaactggaatggcccattcagaaagacaggagaattaggagagagtgagtgaaagaagccaagggtcaagaatgcagaagcaaaggaaggactaaaaagcctccacggacatcgataatcaagagattattaagatctttgctagaagagttcctttacctgtacttaactcccttaaaaagagaaaagtgatggaatgacttctgcaactgtagtcccagcaggaactgtgaagaccagctgccctgcaggatccagtttttcttgggaggttgtatctggtcataaggtaaacattctatatattctatgcctgctctagaattgaaagacttcagcagtattaaagcattttttaatcttatttgagctttcatattcttcaatggttcctttcgtaatacctgagttaataaaagtggtctgaaagagctcttacggtttctgatagaactatataggactaccttttaagattaaatataagcatctgtacgtaaatgtaaaaaagtg

SEQ ID NO: 437488 - DNA, 2340 bp, Homo sapiens
cgataggcgacgcggggagcggaagccctttacactacggtgtttccggcttcaagatggtcgcctaagctgtttagtgaaacttcttccacctttctccattcctctaggtgctttttctgaacctggatgtgaggcattaaaggatccgacggaaatagaattgaaggcattctaaaatggctaaccgtacagtgaaggatgcgcacagcatccatggcaccaaccctcaatatctggtggagaagatcattcgaacgcgaatctatgagtccaagtactggaaagaggagtgctttggacttacagctgaacttgtagtcgataaagccatggagttaagaaacgctatgtattagaggaagctgagcaactggagcctcgagttagtgctctggaagaggacatggatgatgtggagtccagtgaagaggaagaagaggaggatgagaagttggaaagagtgccatcacctgatcaccgccggagaagctaccgagacttggacaagccccgtcgctctcccacactgcgctacaggaggagtaggagccggtctcccagaaggcggagtcgatctcccaaaaggagaagcccctcccctcgccgagaaaggcatcggagcaagagtccaagacgtcaccgcagcaggtcccgagatcggcggcacagatcccgttccaagtccccaggtcatcaccgtagtcacagacacaggagccactcaaagtctcccgaaaggtctaagaagagccacaagaagagccggagagggaatgagtaatggactcagtttggttttagtccacatggcctcctgtggatataaggatatctgtatgtggaaggattaagatctcccccaggcagctataagaatattttagtttttttcttatcaagtttctcaacctttatttttaatgaaggaggtgctgagttttgtatctttttaatcataatcaacatcagtttttgacccaactaaccttgactgtattcaaacttatgagagtataaaggatctggaggttggggatatgactgacaaggaaaggctgtggccacctgatgaccctttccctttttattaaaccggacacacctgtttcccatttcgctgtagtttagtttttggtttgttgtggttggaactgctttgagaatcctgggatttgtgctgctgctgttattcaaagatcaaaggagtaaaacatagttgctcctaacttttttccagcagcagcaagtggtaataaacatgaaaactggtttgtagcagttttgaaagaatagaatgcattcaaatgtaaggctgcttctggatcattaaagccagtttcatcaaacagttcaacagagagcagcacttaataccctttatacagcccattttttcatagtttcatttgttcttgcccacaagcttgaaatccaggttaaggtatccagcctttatcatataagcattgacattatccaggcctagtcagtagcagtagggtaacgggattgaaaaagatttgatggagaggaaagtatctaatattagtcatggttttgacctaaattgctagacagtcgtgccattcacaaagtcagaaaatacagcaggaagagacagcttttagaggggcagagaattagaggatggtggtagtaatgaaaatgatgcattcagtttaacaagtttaatttgagacagctatggtatagctaaaaacaaaagcccataaagttggagatagggaccagagtttaacatagcgatctaggccagaattgacaatgtttaagtaatggtggaatctgtcaataagacttcccagagtgttaatatatatcagaaatgcacacaacagaaccataggcaacaccaacacaggaagaaatagaagtcacctattgaaaactggaatggcccattcagaaagacaggagaattaggagagagtgagtgaaagaagccaagggtcaagaatgcagaagcaaaggaaggactaaaaagcctccacggacatcgataatcaagagattattaagatctttgctagaagagttcctttacctgtacttaactcccttaaaaagagaaaagtgatggaatgacttctgcaactgtagtcccagcaggaactgtgaagaccagctgccctgcaggatccagtttttcttgggaggttgtatctggtcataaggtaaacattctatatattctatgcctgctctagaattgaaagacttcagcagtattaaagcattttttaatcttatttgagctttcatattcttcaatggttcctttcgtaatacctgagttaataaaagtggtctgaaaga

SEQ ID NO: 437489 - DNA, 1799 bp, Homo sapiens
cgataggcgacgcggggagcggaagccctttacactacggtgtttccggcttcaagatggtcgcctaagctgtttagtgaaacttcttccacctttctccattcctctaggtgctttttctgaacctggatgtgaggcattaaaggatccgacggaaatagaattgaaggcattctaaaatggctaaccgtacagtgaaggatgcgcacagcatccatggcaccaaccctcaatatctggtggagaagatcattcgaacgcgaatctatgagtccaagtactggaaagaggagtgctttggacttacagctgaacttgtagtcgataaagccatggagttaagaaacgctatgtattagaggaagctgagcaactggagcctcgagttagtgctctggaagaggacatggatgatgtggagtccagtgaagaggaagaagaggaggatgagaagttggaaagagtgccatcacctgatcaccgccggagaagctaccgagacttggacaagccccgtcgctctcccacactgcgctacaggaggagtaggagccggtctcccagaaggcggagtcgatctcccaaaaggagaagcccctcccctcgccgagaaaggcatcggagcaagagtccaagacgtcaccgcagcaggtcccgagatcggcggcacagatcccgttccaagtccccaggtcatcaccgtagtcacagacacaggagccactcaaagtctcccgaaaggtctaagaagagccacaagaagagccggagagggaatgagtaatggactcagtttggttttagtccacatggcctcctgtggatataaggatatctgtatgtggaaggattaagatctcccccaggcagctataagaatattttagtttttttcttatcaagtttctcaacctttatttttaatgaaggaggtgctgagttttgtatctttttaatcataatcaacatcagtttttgacccaactaaccttgactgtattcaaacttatgagagtataaaggatctggaggttggggatatgactgacaaggaaaggctgtggccacctgatgaccctttccctttttattaaaccggacacacctgtttcccatttcgctgtagtttagtttttggtttgttgtggttggaactgctttgagaatcctgggatttgtgctgctgctgttattcaaagatcaaaggagtaaaacatagttgctcctaacttttttccagcagcagcaagtggtaataaacatgaaaactggtttgtagcagttttgaaagaatagaatgcattcaaatgtaaggctgcttctggatcattaaagccagtttcatcaaacagttcaacagagagcagcacttaataccctttatacagcccattttttcatagtttcatttgttcttgcccacaagcttgaaatccaggttaaggtatccagcctttatcatataagcattgacattatccaggcctagtcagtagcagtagggtaacgggattgaaaaagatttgatggagaggaaagtatctaatattagtcatggttttgacctaaattgctagacagtcgtgccattcacaaagtcagaaaatacagcaggaagagacagcttttagaggggcagagaattagaggatggtggtagtaatgaaaatgatgcattcagtttaacaagtttaatttgagacagctatggtatagctaaaaacaaaagcccataaagttggagatagggaccagagtttaacatagcggtgagggcgtacctcaaggggccgagccta

SEQ ID NO: 437490 - DNA, 1426 bp, Homo sapiens
cgataggcgacgcggggagcggaagccctttacactacggtgtttccggcttcaagatggtcgcctaagctgtttagtgaaacttcttccacctttctccattcctctaggtgctttttctgaacctggatgtgaggcattaaaggatccgacggaaatagaattgaaggcattctaaaatggctaaccgtacagtgaaggatgcgcacagcatccatggcaccaaccctcaatatctggtggagaagatcattcgaacgcgaatctatgagtccaagtactggaaagaggagtgctttggacttacagctgaacttgtagtcgataaagccatggagttaagaaacgctatgtattagaggaagctgagcaactggagcctcgagttagtgctctggaagaggacatggatgatgtggagtccagtgaagaggaagaagaggaggatgagaagttggaaagagtgccatcacctgatcaccgccggagaagctaccgagacttggacaagccccgtcgctctcccacactgcgctacaggaggagtaggagccggtctcccagaaggcggagtcgatctcccaaaaggagaagcccctcccctcgccgagaaaggcatcggagcaagagtccaagacgtcaccgcagcaggtcccgagatcggcggcacagatcccgttccaagtccccaggtcatcaccgtagtcacagacacaggagccactcaaagtctcccgaaaggtctaagaagagccacaagaagagccggagagggaatgagtaatggactcagtttggttttagtccacatggcctcctgtggatataaggatatctgtatgtggaaggattaagatctcccccaggcagctataagaatattttagtttttttcttatcaagtttctcaacctttatttttaatgaaggaggtgctgagttttgtatctttttaatcataatcaacatcagtttttgacccaactaaccttgactgtattcaaacttatgagagtataaaggatctggaggttggggatatgactgacaaggaaaggctgtggccacctgatgaccctttccctttttattaaaccggacacacctgtttggcccgcacatccgtactggcccgcgggccagtacggatgtggcccaggagggggtcgagggggccaactcacagaaggggactgacagtgggcaacactcacatcccactggctgctgttctgaaaccatctgattggctttctgaggtttggctgggtggggactgctcatttggccactctgcagattggacttgcccgcgttcctgaagcgctctcgagctgttctgtaaatacctggtgctaacatcccatgccgctccctcctcacgatgcacccaccggcctgagggcccgtcctaggaatggatgtg

SEQ ID NO: 437491 - DNA, 555 bp, Homo sapiens
gggattacaggcgtgagccaccactcctagccagttctcaaaagctatcactccatgtgccatataagatacatgttctaaattcagaaacattgaaggttcagatgagaaattatatttgagttatatgatctcttcaagatcatccctacataattcaggactgtttgtgcttgtttttgtgtttgtctcctgctaattgggacatcttcattcatcccttaatctcttctaaagaggcctagcacatagatgtcctgatatgaagtcttaacacttcttttactttttggcatctaaatcttttatttccaggttgtttgctctaatgactttttcttgcagagtttgaattgatgcatgttgatgagtttattgatgaactattgcacagtgagagagtctgtgatatcattctgccccgactacaggtaagaaataaaagtctgttaccagagtcacccttctcttcctagacgggcagacagacaaacacatacacacagcttaaacactgaagcctgtggatcttatgggtcctcttaatgaatagtc

SEQ ID NO: 437492 - DNA, 287 bp, Homo sapiens
tttttccagtatctgcttttatcacatttgcaaatatctcattagccaaagcgagtcatgtcaccagtcctaaagttagaatgggagggtgctagagttacgtgacaaaagacatggatacagaggtgggtgatacagagaagcgtgaaggataagattggggccgtttttgcaatctaccacatccagtgcgccaacctaggctttcttcttcctctcctctttataggcggagtcgatctcccaaaaggagaaggtaggccttcagtcatttgtgatgaaggata

SEQ ID NO: 437493 - DNA, 774 bp, Homo sapiens
cgataggcgacgcggggagcggaagccctttacactacggtgtttccggcttcaagatggtcgcctaagctgtttagtgaaacttcttccacctttctccattcctctaggtgctttttctgaacctggatgtgaggcattaaaggatccgacggaaatagaattgaaggcattctaaaatggctaaccgtacagtgaaggatgcgcacagcatccatggcaccaaccctcaatatctggtggagaagatcattcgaacgcgaatctatgagtccaagtactggaaagaggagtgctttggacttacagctgaacttgtagtcgataaagccatggagttaaggtttgtgggtggcgtctatggtggcaacataaaaccaacaccctttctgtgtttaaccttgaagatgcttcaaattcaacccgagaaggatatcattgtagagtttatcaaaaatgaagatttcaagtatgtccgcatgctgggggcactttacatgaggctgacaggcactgcaattgattgctacaagtacttggaacctttgtacaatgactatcgaaaaatcaagagccagaaccgaaatgggggtaagtatggtgctaagtctcctgattgtcatttttaagccagtttttattttaccagtacttctacctttgcattgtcatagacagtgtgaatgctccttttcatctacattgttactgtctctatgcaggttttcccttgtccctcatgggagttttcagtctgactactagcttcgtgtt

SEQ ID NO: 437494 - DNA, 2273 bp, Homo sapiens
cgataggcgacgcggggagcggaagccctttacactacggtgtttccggcttcaagatggtcgcctaagctgtttagtgaaacttcttccacctttctccattcctctaggtgctttttctgaacctggatgtgaggcattaaaggatccgacggaaatagaattgaaggcattctaaaatggctaaccgtacagtgaaggatgcgcacagcatccatggcaccaaccctcaatatctggtggagaagatcattcgaacgcgaatctatgagtccaagtactggaaagaggagtgctttggacttacagctgaacttgtagtcgataaagccatggagttaagaaacgctatgtattagaggaagctgagcaactggagcctcgagttagtgctctggaagaggacatggatgatgtggagtccagtgaagaggaagaagaggaggatgagaagttggaaagagtgccatcacctgatcaccgccggagaagctaccgagacttggacaagccccgtcgctctcccacactgcgctacaggaggagtaggagccggtctcccagaaggcggagtcgatctcccaaaaggagaagcccctcccctcgccgagaaaggcatcggagcaagagtccaagacgtcaccgcagcaggtcccgagatcggcggcacagatcccgttccaagtccccaggtcatcaccgtagtcacagacacaggagccactcaaagtctcccgaaaggtctaagaagagccacaagaagagccggagagggaatgagtaatggactcagtttggttttagtccacatggcctcctgtggatataaggatatctgtatgtggaaggattaagatctcccccaggcagctataagaatattttagtttttttcttatcaagtttctcaacctttatttttaatgaaggaggtgctgagttttgtatctttttaatcataatcaacatcagtttttgacccaactaaccttgactgtattcaaacttatgagagtataaaggatctggaggttggggatatgactgacaaggaaaggctgtggccacctgatgaccctttccctttttattaaaccggacacacctgtttcccatttcgctgtagtttagtttttggtttgttgtggttggaactgctttgagaatcctgggatttgtgctgctgctgttattcaaagatcaaaggagtaaaacatagttgctcctaacttttttccagcagcagcaagtggtaataaacatgaaaactggtttgtagcagttttgaaagaatagaatgcattcaaatgtaaggctgcttctggatcattaaagccagtttcatcaaacagttcaacagagagcagcacttaataccctttatacagcccattttttcatagtttcatttgttcttgcccacaagcttgaaatccaggttaaggtatccagcctttatcatataagcattgacattatccaggcctagtcagtagcagtagggtaacgggattgaaaaagatttgatggagaggaaagtatctaatattagtcatggttttgacctaaattgctagacagtcgtgccattcacaaagtcagaaaatacagcaggaagagacagcttttagaggggcagagaattagaggatggtggtagtaatgaaaatgatgcattcagtttaacaagtttaatttgagacagctatggtatagctaaaaacaaaagcccataaagttggagatagggaccagagtttaacatagcgatctaggccagaattgacaatgtttaagtaatggtggaatctgtcaataagacttcccagagtgttaatatatatcagaaatgcacacaacagaaccataggcaacaccaacacaggaagaaatagaagtcacctattgaaaactggaatggcccattcagaaagacaggagaattaggagagagtgagtgaaagaagccaagggtcaagaatgcagaagcaaaggaaggactaaaaagcctccacggacatcgataatcaagagattattaagatctttgctagaagagttcctttacctgtacttaactcccttaaaaagagaaaagtgatggaatgacttctgcaactgtagtcccagcaggaactgtgaagaccagctgccctgcaggatccagtttttcttgggaggttgtatctggtcataaggtaaacattctatatattctatgcctgctctagaattgaaagacttcagcagtattaaagcattttttaatctta

SEQ ID NO: 437495 - DNA, 1865 bp, Homo sapiens
gaggatccccggcgtaggtagaagtagaggttaaggagggtgttagttggaaagagtgccatcacctgatcaccgccggagaagctaccgagacttggacaagccccgtcgctctcccacactgcgctacaggaggagtaggagccggtctcccagaaggcggagtcgatctcccaaaaggagaagcccctcccctcgccgagaaaggcatcggagcaagagtccaagacgtcaccgcagcaggtcccgagatcggcggcacagatcccgttccaagtccccaggtcatcaccgtagtcacagacacaggagccactcaaagtctcccgaaaggtctaagaagagccacaagaagagccggagagggaatgagtaatggactcagtttggttttagtccacatggcctcctgtggatataaggatatctgtatgtggaaggattaagatctcccccaggcagctataagaatattttagtttttttcttatcaagtttctcaacctttatttttaatgaaggaggtgctgagttttgtatctttttaatcataatcaacatcagtttttgacccaactaaccttgactgtattcaaacttatgagagtataaaggatctggaggttggggatatgactgacaaggaaaggctgtggccacctgatgaccctttccctttttattaaaccggacacacctgtttcccatttcgctgtagtttagtttttggtttgttgtggttggaactgctttgagaatcctgggatttgtgctgctgctgttattcaaagatcaaaggagtaaaacatagttgctcctaacttttttccagcagcagcaagtggtaataaacatgaaaactggtttgtagcagttttgaaagaatagaatgcattcaaatgtaaggctgcttctggatcattaaagccagtttcatcaaacagttcaacagagagcagcacttaataccctttatacagcccattttttcatagtttcatttgttcttgcccacaagcttgaaatccaggttaaggtatccagcctttatcatataagcattgacattatccaggcctagtcagtagcagtagggtaacgggattgaaaaagatttgatggagaggaaagtatctaatattagtcatggttttgacctaaattgctagacagtcgtgccattcacaaagtcagaaaatacagcaggaagagacagcttttagaggggcagagaattagaggatggtggtagtaatgaaaatgatgcattcagtttaacaagtttaatttgagacagctatggtatagctaaaaacaaaagcccataaagttggagatagggaccagagtttaacatagcgatctaggccagaattgacaatgtttaagtaatggtggaatctgtcaataagacttcccagagtgttaatatatatcagaaatgcacacaacagaaccataggcaacaccaacacaggaagaaatagaagtcacctattgaaaactggaatggcccattcagaaagacaggagaattaggagagagtgagtgaaagaagccaagggtcaagaatgcagaagcaaaggaaggactaaaaagcctccacggacatcgataatcaagagattattaagatctttgctagaagagttcctttacctgtacttaactcccttaaaaagagaaaagtgatggaatgacttctgcaactgtagtcccagcaggaactgtgaagaccagctgccctgcaggatccagtttttcttgggaggttgtatctggtcataaggtaaacattctatatattctatgcctgctctagaattgaaagacttcagcagtattaaagcattttttaatctta

SEQ ID NO: 437496 - DNA, 1444 bp, Homo sapiens
cgataggcgacgcggggagcggaagccctttacactacggtgtttccggcttcaagatggtcgcctaagctgtttagtgaaacttcttccacctttctccattcctctaggtgctttttctgaacctggatgtgaggcattaaaggatccgacggaaatagaattgaaggcattctaaaatggctaaccgtacagtgaaggatgcgcacagcatccatggcaccaaccctcaatatctggtggagaagatcattcgaacgcgaatctatgagtccaagtactggaaagaggagtgctttggacttacagctgaacttgtagtcgataaagccatggagttaaggtttgtgggtggcgtctatggtggcaacataaaaccaacaccctttctgtgtttaaccttgaagatgcttcaaattcaacccgagaaggatatcattgtagagtttatcaaaaatgaagatttcaagtatgtccgcatgctgggggcactttacatgaggctgacaggcactgcaattgattgctacaagtacttggaacctttgtacaatgactatcgaaaaatcaagagccagaaccgaaatggggagtttgaattgatgcatgttgatgagtttattgatgaactattgcacagtgagagagtctgtgatatcattctgccccgactacagaaacgctatgtattagaggaagctgagcaactggagcctcgagttagtgctctggaagaggacatggatgatgtggagtccagtgaagaggaagaagaggaggatgagaagttggaaagagtgccatcacctgatcaccgccggagaagctaccgagacttggacaagccccgtcgctctcccacactgcgctacaggaggagtaggagccggtctcccagaaggcggagtcgatctcccaaaaggagaagcccctcccctcgccgagaaaggcatcggagcaagagtccaagacgtcaccgcagcaggtcccgagatcggcggcacagatcccgttccaagtccccaggtcatcaccgtagtcacagacacaggagccactcaaagtctcccgaaaggtctaagaagagccacaagaagagccggagagggaatgagtaatggactcagtttggttttagtccacatggcctcctgtggatataaggatatctgtatgtggaaggattaagatctcccccaggcagctataagaatattttagtttttttcttatcaagtttctcaacctttatttttaatgaaggaggtgctgagttttgtatctttttaatcataatcaacatcagtttttgacccaactaaccttgactgtattcaaacttatgagagtataaaggatctggaggttggggatatgactgacaaggaaaggctgtggccacctgatgaccctttccctttttattaaaccggacacacctgtt

SEQ ID NO: 437497 - DNA, 1733 bp, Homo sapiens
agcggaggcgcagagtccgcgcggcggcgcccctctccctccgcagtactccggacggcgcccgcctcgattttcccaggcgagggcacgcccgcgtcagtcgcctccggggcaccttcctcgccacgacacgcagaattaattatctgaagaaatggatacttctccctccagaaaatatccagttaaaaaacgggtgaaaatacatcccaacacagtgatggtgaaatatacttctcattatccccagcctggcgatgatggatatgaagaaatcaatgaaggctatgggaattttatggaggaaaatccaaagaaaggtctgctgagtgaaatgaaaaaaaaagggagagctttctttggaaccatggataccctacctccaccaacagaagacccaatgatcaatgagattggacaattccagagctttgcagaaaaaaacatttttcaatcccgaaaaatgtggatagtgctgtttggatctgctttggctcatggatgtgtagctcttatcactaggcttgtttctgatcggtctaaagttccatctctagaactgatttttatccgttctgtttttcaggtcttatctgtgttagttgtgtgttactatcaggaggccccctttggacccagtggatacagattacgactcttcttttatggtgtatgcaatgtcatttctatcacttgtgcttatacatcattttcaatagttcctcccagcaatgggaccactatgtggagagccacaactacagtcttcagtgccattttggcttttttactcgtagatgagaaaatggcttatgttgacatggctacagttgtttgcagcatcttaggtgtttgtcttgtcatgatcccaaacattgttgatgaagacaattctttgttaaatgcctggaaagaagcctttgggtacaccatgactgtgatggctggactgaccactgctctctcaatgatagtatacagatccatcaaggagaagatcagcatgtggactgcactgtttacttttggttggactgggacaatttggggaatatctactatgtttattcttcaagaacccatcatcccattagatggagaaacctggagttatctcattgctatatgtgtctgttctactgcagcattcttaggagtttattatgccttggacaaattccatccagctttggttagcacagtacaacatttggagattgtggtagctatggtcttgcagcttctcgtgctgcacatatttcctagcatctatgatgtttttggaggggtaatcattatgattagtgtttttgtccttgctggctataaactttactggaggaatttaagaaggcaggactaccaggaaatactagactctcccattaaatgaatacctgattattattgtctcattaatgttcagttattaatatgtatactgccattttaatgtttacctatgaatgtcttttgtgttatataactgacagagtgctataaaatatataatatatacaaatgcagaaaatttattctagtctaatatattcaaatacaaatattaaatatatgaaatacgttatgaatctggtatctttattggtatttatgggtgtctttccaggtaaattgtagtagaaggagaatgttaactgctattactaaataatagaagactcaaagaaatgacccctttcagatggaactgaagttcaaaaattagaaatgtt

SEQ ID NO: 437498 - DNA, 1972 bp, Homo sapiens
ttagcgctctaggtacgaggccccggctgtttacggacggcgcccgcctcgattttcccaggcgagggcacgcccgcgtcagtcgcctccggggcaccttcctcgccacgacacgcaggtaaccgggccccgggagccggtcggcggcggcggactgggaccttgatcctgcctgcccggccgcccgacaagggaatgagagcggaccccgaactccacacacccgcgtttagccgccacacctaaggggcagaacagtctttttgggtaagggccgggctgggggcgacgcgccccgcccgctttgcagacttcggggtgctctgcacgacgcctgaaaggccgcggggcccgcatttctctgtgctgccctcctggagaaccgggacacggggacgggagggccagcatcggctacggcccggtttcccgtttctttcctctgtcgcgtctgggccctcctgcagcgtccatgatgaaggccaggggctgttgctttcctctcgcccagtagccaacccaagcaagggaattaattatctgaagaaatggatacttctccctccagaaaatatccagttaaaaaacgggtgaaaatacatcccaacacagtgatggtgaaatatacttctcattatccccagcctggcgatgatggatatgaagaaatcaatgaaggctatgggaattttatggaggaaaatccaaagaaaggtctgctgagtgaaatgaaaaaaaaagggagagctttctttggaaccatggataccctacctccaccaacagaagacccaatgatcaatgagattggacaattccagagctttgcagaaaaaaacatttttcaatcccgaaaaatgtggatagtgctgtttggatctgctttggctcatggatgtgtagctcttatcactaggcttgtttctgatcggtctaaagttccatctctagaactgatttttatccgttctgtttttcaggtcttatctgtgttagttgtgtgttactatcaggaggccccctttggacccagtggatacagattacgactcttcttttatggtgtatgcaatgtcatttctatcacttgtgcttatacatcattttcaatagttcctcccagcaatgggaccactatgtggagagccacaactacagtcttcagtgccattttggcttttttactcgtagatgagaaaatggcttatgttgacatggctacagttgtttgcagcatcttaggtgtttgtcttgtcatgatcccaaacattgttgatgaagacaattctttgttaaatgcctggaaagaagcctttgggtacaccatgactgtgatggctggactgaccactgctctctcaatgatagtatacagatccatcaaggagaagatcagcatgtggactgcactgtttacttttggttggactgggacaatttggggaatatctactatgtttattcttcaagaacccatcatcccattagatggagaaacctggagttatctcattgctatatgtgtctgttctactgcagcattcttaggagtttattatgccttggacaaattccatccagctttggttagcacagtacaacatttggagattgtggtagctatggtcttgcagcttctcgtgctgcacatatttcctagcatctatgatgtttttggaggggtaatcattatgattagtgtttttgtccttgctggctataaactttactggaggaatttaagaaggcaggactaccaggaaatactagactctcccattaaatgaatacctgattattattgtctcattaatgttcagttattaatatgtatactgccattttaatgtttacctatgaatgtcttttgtgttatataactgacagagtgctataaaatatataatatatacaaatgcagaaaatttattctagtctaatatattcaaatacaaatattaaatatatgaaa

SEQ ID NO: 437499 - DNA, 1560 bp, Homo sapiens
ttagcgctctaggtacgaggccccggctgtttacggacggcgcccgcctcgattttcccaggcgagggcacgcccgcgtcagtcgcctccggggcaccttcctcgccacgacacgcagaattaattatctgaagaaatggatacttctccctccagaaaatatccagttaaaaaacgggtgaaaatacatcccaacacagtgatggtgaaatatacttctcattatccccagcctggcgatgatggatatgaagaaatcaatgaaggctatgggaattttatggaggaaaatccaaagaaaggtctgctgagtgaaatgaaaaaaaaagggagagctttctttggaaccatggataccctacctccaccaacagaagacccaatgatcaatgagattggacaattccagagctttgcagaaaaaaacatttttcaatcccgaaaaatgtggatagtgctgtttggatctgctttggctcatggatgtgtagctcttatcactaggcttgtttctgatcggtctaaagttccatctctagaactgatttttatccgttctgtttttcaggtcttatctgtgttagttgtgtgttactatcaggaggccccctttggacccagtggatacagattacgactcttcttttatggtgtatgcaatgtcatttctatcacttgtgcttatacatcattttcaatagttcctcccagcaatgggaccactatgtggagagccacaactacagtcttcagtgccattttggcttttttactcgtagatgagaaaatggcttatgttgacatggctacagttgtttgcagcatcttaggtgtttgtcttgtcatgatcccaaacattgttgatgaagacaattctttgttaaatgcctggaaagaagcctttgggtacaccatgactgtgatggctggactgaccactgctctctcaatgatagtatacagatccatcaaggagaagatcagcatgtggactgcactgtttacttttggttggactgggacaatttggggaatatctactatgtttattcttcaagaacccatcatcccattagatggagaaacctggagttatctcattgctatatgtgtctgttctactgcagcattcttaggagtttattatgccttggacaaattccatccagctttggttagcacagtacaacatttggagattgtggtagctatggtcttgcagcttctcgtgctgcacatatttcctagcatctatgatgtttttggaggggtaatcattatgattagtgtttttgtccttgctggctataaactttactggaggaatttaagaaggcaggactaccaggaaatactagactctcccattaaatgaatacctgattattattgtctcattaatgttcagttattaatatgtatactgccattttaatgtttacctatgaatgtcttttgtgttatataactgacagagtgctataaaatatataatatatacaaatgcagaaaatttattctagtctaatatattcaaatacaaatattaaatatatgaaa

SEQ ID NO: 437500 - DNA, 1568 bp, Homo sapiens
agatggagttttgcttttgttgcccaggctggagtgcaatggcatgatctgggctcactgcaacctccgcctcctggggtgcaagcgattctcatgcctctgcctcctgagtagctgggattacagaattaattatctgaagaaatggatacttctccctccagaaaatatccagttaaaaaacgggtgaaaatacatcccaacacagtgatggtgaaatatacttctcattatccccagcctggcgatgatggatatgaagaaatcaatgaaggctatgggaattttatggaggaaaatccaaagaaaggtctgctgagtgaaatgaaaaaaaaagggagagctttctttggaaccatggataccctacctccaccaacagaagacccaatgatcaatgagattggacaattccagagctttgcagaaaaaaacatttttcaatcccgaaaaatgtggatagtgctgtttggatctgctttggctcatggatgtgtagctcttatcactaggcttgtttctgatcggtctaaagttccatctctagaactgatttttatccgttctgtttttcaggtcttatctgtgttagttgtgtgttactatcaggaggccccctttggacccagtggatacagattacgactcttcttttatggtgtatgcaatgtcatttctatcacttgtgcttatacatcattttcaatagttcctcccagcaatgggaccactatgtggagagccacaactacagtcttcagtgccattttggcttttttactcgtagatgagaaaatggcttatgttgacatggctacagttgtttgcagcatcttaggtgtttgtcttgtcatgatcccaaacattgttgatgaagacaattctttgttaaatgcctggaaagaagcctttgggtacaccatgactgtgatggctggactgaccactgctctctcaatgatagtatacagatccatcaaggagaagatcagcatgtggactgcactgtttacttttggttggactgggacaatttggggaatatctactatgtttattcttcaagaacccatcatcccattagatggagaaacctggagttatctcattgctatatgtgtctgttctactgcagcattcttaggagtttattatgccttggacaaattccatccagctttggttagcacagtacaacatttggagattgtggtagctatggtcttgcagcttctcgtgctgcacatatttcctagcatctatgatgtttttggaggggtaatcattatgattagtgtttttgtccttgctggctataaactttactggaggaatttaagaaggcaggactaccaggaaatactagactctcccattaaatgaatacctgattattattgtctcattaatgttcagttattaatatgtatactgccattttaatgtttacctatgaatgtcttttgtgttatataactgacagagtgctataaaatatataatatatacaaatgcagaaaatttattctagtctaatatattcaaatacaaatattaaatatatgaaa

SEQ ID NO: 437501 - DNA, 1709 bp, Homo sapiens
ttagcgctctaggtacgaggccccggctgtttacggacggcgcccgcctcgattttcccaggcgagggcacgcccgcgtcagtcgcctccggggcaccttcctcgccacgacacgcaggtaaccgggccccgggagccggtcggcggcggcggactgggaccttgatcctgcctgcccggccgcccgacaagggaatgagagcggaccccgaactccacacacccgcgtttagccgccacacctaaggggcagaacagtctttttggaattaattatctgaagaaatggatacttctccctccagaaaatatccagttaaaaaacgggtgaaaatacatcccaacacagtgatggtgaaatatacttctcattatccccagcctggcgatgatggatatgaagaaatcaatgaaggctatgggaattttatggaggaaaatccaaagaaaggtctgctgagtgaaatgaaaaaaaaagggagagctttctttggaaccatggataccctacctccaccaacagaagacccaatgatcaatgagattggacaattccagagctttgcagaaaaaaacatttttcaatcccgaaaaatgtggatagtgctgtttggatctgctttggctcatggatgtgtagctcttatcactaggcttgtttctgatcggtctaaagttccatctctagaactgatttttatccgttctgtttttcaggtcttatctgtgttagttgtgtgttactatcaggaggccccctttggacccagtggatacagattacgactcttcttttatggtgtatgcaatgtcatttctatcacttgtgcttatacatcattttcaatagttcctcccagcaatgggaccactatgtggagagccacaactacagtcttcagtgccattttggcttttttactcgtagatgagaaaatggcttatgttgacatggctacagttgtttgcagcatcttaggtgtttgtcttgtcatgatcccaaacattgttgatgaagacaattctttgttaaatgcctggaaagaagcctttgggtacaccatgactgtgatggctggactgaccactgctctctcaatgatagtatacagatccatcaaggagaagatcagcatgtggactgcactgtttacttttggttggactgggacaatttggggaatatctactatgtttattcttcaagaacccatcatcccattagatggagaaacctggagttatctcattgctatatgtgtctgttctactgcagcattcttaggagtttattatgccttggacaaattccatccagctttggttagcacagtacaacatttggagattgtggtagctatggtcttgcagcttctcgtgctgcacatatttcctagcatctatgatgtttttggaggggtaatcattatgattagtgtttttgtccttgctggctataaactttactggaggaatttaagaaggcaggactaccaggaaatactagactctcccattaaatgaatacctgattattattgtctcattaatgttcagttattaatatgtatactgccattttaatgtttacctatgaatgtcttttgtgttatataactgacagagtgctataaaatatataatatatacaaatgcagaaaatttattctagtctaatatattcaaatacaaatattaaatatatgaaa

SEQ ID NO: 437502 - DNA, 1918 bp, Homo sapiens
tcagtgtatttttatatctcaaaacttatggggagtccagaataaatgtttaaaaatcactataatttataaggtgaattctggtattatacagaattgattatacaaaatactttggacttaactaataatttataacaggcaaatggacccaatgagaaggaaaggtttgacctaagttattatttatctttctgtgttttgcttgttggataggtggagaaacaggtaggaatgaaaagatggaaaaatccgtttgtggtataaagatagaagatagagctgaattaaacaagtaagcaaagagaaatggagacagacttcagatgagagtgaaaaaagggtaaacaattccagtaggtaccatacatctgataaggcatattgccagatcatctctaatttcttttttttctggactactgttacagcctctactttctatcattgaattgatgcatatgattataatagaaattaaattttcaatgaaatgaatgtctttttgtcaatttttttctttaaatagaaaattaattatctgaagaaatggatacttctccctccagaaaatatccagttaaaaaacgggtgaaaatacatcccaacacagtgatggtgaaatatacttctcattatccccagcctggcgatgatggatatgaagaaatcaatgaaggctatgggaattttatggaggaaaatccaaagaaaggtctgctgagtgaaatgaaaacccaatgatcaatgagattggacaattccagagctttgcagaaaaaaacatttttcaatcccgaaaaatgtggatagtgctgtttggatctgctttggctcatggatgtgtagctcttatcactaggcttgtttctgatcggtctaaagttccatctctagaactgatttttatccgttctgtttttcaggtcttatctgtgttagttgtgtgttactatcaggaggccccctttggacccagtggatacagattacgactcttcttttatggtgtatgcaatgtcatttctatcacttgtgcttatacatcattttcaatagttcctcccagcaatgggaccactatgtggagagccacaactacagtcttcagtgccattttggcttttttactcgtagatgagaaaatggcttatgttgacatggctacagttgtttgcagcatcttaggtgtttgtcttgtcatgatcccaaacattgttgatgaagacaattctttgttaaatgcctggaaagaagcctttgggtacaccatgactgtgatggctggactgaccactgctctctcaatgatagtatacagatccatcaaggagaagatcagcatgtggactgcactgtttacttttggttggactgggacaatttggggaatatctactatgtttattcttcaagaacccatcatcccattagatggagaaacctggagttatctcattgctatatgtgtctgttctactgcagcattcttaggagtttattatgccttggacaaattccatccagctttggttagcacagtacaacatttggagattgtggtagctatggtcttgcagcttctcgtgctgcacatatttcctagcatctatgatgtttttggaggggtaatcattatgattagtgtttttgtccttgctggctataaactttactggaggaatttaagaaggcaggactaccaggaaatactagactctcccattaaatgaatacctgattattattgtctcattaatgttcagttattaatatgtatactgccattttaatgtttacctatgaatgtcttttgtgttatataactgacagagtgctataaaatatataatatatacaaatgcagaaaatttattctagtctaatatattcaaatacaaatattaaatatatgaaa

SEQ ID NO: 437503 - DNA, 1578 bp, Homo sapiens
agcggaggcgcagagtccgcgcggcggcgcccctctccctccgcagtactccggacggcgcccgcctcgattttcccaggcgagggcacgcccgcgtcagtcgcctccggggcaccttcctcgccacgacacgcagaattaattatctgaagaaatggatacttctccctccagaaaatatccagttaaaaaacgggtgaaaatacatcccaacacagtgatggtgaaatatacttctcattatccccagcctggcgatgatggatatgaagaaatcaatgaaggctatgggaattttatggaggaaaatccaaagaaaggtctgctgagtgaaatgaaaaaaaaagggagagctttctttggaaccatggataccctacctccaccaacagaagacccaatgatcaatgagattggacaattccagagctttgcagaaaaaaacatttttcaatcccgaaaaatgtggatagtgctgtttggatctgctttggctcatggatgtgtagctcttatcactaggcttgtttctgatcggtctaaagttccatctctagaactgatttttatccgttctgtttttcaggtcttatctgtgttagttgtgtgttactatcaggaggccccctttggacccagtggatacagattacgactcttcttttatggtgtatgcaatgtcatttctatcacttgtgcttatacatcattttcaatagttcctcccagcaatgggaccactatgtggagagccacaactacagtcttcagtgccattttggcttttttactcgtagatgagaaaatggcttatgttgacatggctacagttgtttgcagcatcttaggtgtttgtcttgtcatgatcccaaacattgttgatgaagacaattctttgttaaatgcctggaaagaagcctttgggtacaccatgactgtgatggctggactgaccactgctctctcaatgatagtatacagatccatcaaggagaagatcagcatgtggactgcactgtttacttttggttggactgggacaatttggggaatatctactatgtttattcttcaagaacccatcatcccattagatggagaaacctggagttatctcattgctatatgtgtctgttctactgcagcattcttaggagtttattatgccttggacaaattccatccagctttggttagcacagtacaacatttggagattgtggtagctatggtcttgcagcttctcgtgctgcacatatttcctagcatctatgatgtttttggaggggtaatcattatgattagtgtttttgtccttgctggctataaactttactggaggaatttaagaaggcaggactaccaggaaatactagactctcccattaaatgaatacctgattattattgtctcattaatgttcagttattaatatgtatactgccattttaatgtttacctatgaatgtcttttgtgttatataactgacagagtgctataaaatatataatatatacaaatgcagaaaatttattctagtctaatatattcaaatacaaatattaaatatatgaaa

SEQ ID NO: 437504 - DNA, 2127 bp, Homo sapiens
ttagcgctctaggtacgaggccccggctgtttacggacggcgcccgcctcgattttcccaggcgagggcacgcccgcgtcagtcgcctccggggcaccttcctcgccacgacacgcaggtaaccgggccccgggagccggtcggcggcggcggactgggaccttgatcctgcctgcccggccgcccgacaagggaatgagagcggaccccgaactccacacacccgcgtttagccgccacacctaaggggcagaacagtctttttgggtaagggccgggctgggggcgacgcgccccgcccgctttgcagacttcggggtgctctgcacgacgcctgaaaggccgcggggcccgcatttctctgtgctgccctcctggagaaccgggacacggggacgggagggccagcatcggctacggcccggtttcccgtttctttcctctgtcgcgtctgggccctcctgcagcgtccatgatgaaggccaggggctgttgctttcctctcgcccagtagccaacccaagcaagggaattaattatctgaagaaatggatacttctccctccagaaaatatccagttaaaaaacgggtgaaaatacatcccaacacagtgatggtgaaatatacttctcattatccccagcctggcgatgatggatatgaagaaatcaatgaaggctatgggaattttatggaggaaaatccaaagaaaggtctgctgagtgaaatgaaaaaaaaagggagagctttctttggaaccatggataccctacctccaccaacagaagacccaatgatcaatgagattggacaattccagagctttgcagaaaaaaacatttttcaatcccgaaaaatgtggatagtgctgtttggatctgctttggctcatggatgtgtagctcttatcactaggcttgtttctgatcggtctaaagttccatctctagaactgatttttatccgttctgtttttcaggtcttatctgtgttagttgtgtgttactatcaggaggccccctttggacccagtggatacagattacgactcttcttttatggtgtatgcaatgtcatttctatcacttgtgcttatacatcattttcaatagttcctcccagcaatgggaccactatgtggagagccacaactacagtcttcagtgccattttggcttttttactcgtagatgagaaaatggcttatgttgacatggctacagttgtttgcagcatcttaggtgtttgtcttgtcatgatcccaaacattgttgatgaagacaattctttgttaaatgcctggaaagaagcctttgggtacaccatgactgtgatggctggactgaccactgctctctcaatgatagtatacagatccatcaaggagaagatcagcatgtggactgcactgtttacttttggttggactgggacaatttggggaatatctactatgtttattcttcaagaacccatcatcccattagatggagaaacctggagttatctcattgctatatgtgtctgttctactgcagcattcttaggagtttattatgccttggacaaattccatccagctttggttagcacagtacaacatttggagattgtggtagctatggtcttgcagcttctcgtgctgcacatatttcctagcatctatgatgtttttggaggggtaatcattatgattagtgtttttgtccttgctggctataaactttactggaggaatttaagaaggcaggactaccaggaaatactagactctcccattaaatgaatacctgattattattgtctcattaatgttcagttattaatatgtatactgccattttaatgtttacctatgaatgtcttttgtgttatataactgacagagtgctataaaatatataatatatacaaatgcagaaaatttattctagtctaatatattcaaatacaaatattaaatatatgaaatacgttatgaatctggtatctttattggtatttatgggtgtctttccaggtaaattgtagtagaaggagaatgttaactgctattactaaataatagaagactcaaagaaatgacccctttcagatggaactgaagttcaaaaattagaaatgtt

SEQ ID NO: 437505 - DNA, 1973 bp, Homo sapiens
tcagtgtatttttatatctcaaaacttatggggagtccagaataaatgtttaaaaatcactataatttataaggtgaattctggtattatacagaattgattatacaaaatactttggacttaactaataatttataacaggcaaatggacccaatgagaaggaaaggtttgacctaagttattatttatctttctgtgttttgcttgttggataggtggagaaacaggtaggaatgaaaagatggaaaaatccgtttgtggtataaagatagaagatagagctgaattaaacaagtaagcaaagagaaatggagacagacttcagatgagagtgaaaaaagggtaaacaattccagtaggtaccatacatctgataaggcatattgccagatcatctctaatttcttttttttctggactactgttacagcctctactttctatcattgaattgatgcatatgattataatagaaattaaattttcaatgaaatgaatgtctttttgtcaatttttttctttaaatagaaaattaattatctgaagaaatggatacttctccctccagaaaatatccagttaaaaaacgggtgaaaatacatcccaacacagtgatggtgaaatatacttctcattatccccagcctggcgatgatggatatgaagaaatcaatgaaggctatgggaattttatggaggaaaatccaaagaaaggtctgctgagtgaaatgaaaaaaaaagggagagctttctttggaaccatggataccctacctccaccaacagaagacccaatgatcaatgagattggacaattccagagctttgcagaaaaaaacatttttcaatcccgaaaaatgtggatagtgctgtttggatctgctttggctcatggatgtgtagctcttatcactaggcttgtttctgatcggtctaaagttccatctctagaactgatttttatccgttctgtttttcaggtcttatctgtgttagttgtgtgttactatcaggaggccccctttggacccagtggatacagattacgactcttcttttatggtgtatgcaatgtcatttctatcacttgtgcttatacatcattttcaatagttcctcccagcaatgggaccactatgtggagagccacaactacagtcttcagtgccattttggcttttttactcgtagatgagaaaatggcttatgttgacatggctacagttgtttgcagcatcttaggtgtttgtcttgtcatgatcccaaacattgttgatgaagacaattctttgttaaatgcctggaaagaagcctttgggtacaccatgactgtgatggctggactgaccactgctctctcaatgatagtatacagatccatcaaggagaagatcagcatgtggactgcactgtttacttttggttggactgggacaatttggggaatatctactatgtttattcttcaagaacccatcatcccattagatggagaaacctggagttatctcattgctatatgtgtctgttctactgcagcattcttaggagtttattatgccttggacaaattccatccagctttggttagcacagtacaacatttggagattgtggtagctatggtcttgcagcttctcgtgctgcacatatttcctagcatctatgatgtttttggaggggtaatcattatgattagtgtttttgtccttgctggctataaactttactggaggaatttaagaaggcaggactaccaggaaatactagactctcccattaaatgaatacctgattattattgtctcattaatgttcagttattaatatgtatactgccattttaatgtttacctatgaatgtcttttgtgttatataactgacagagtgctataaaatatataatatatacaaatgcagaaaatttattctagtctaatatattcaaatacaaatattaaatatatgaaa

SEQ ID NO: 437506 - DNA, 1506 bp, Homo sapiens
agcgccgtccccgacgcccctcccccttcctcccctccccctacgttccacggtatcatacagaaattaattatctgaagaaatggatacttctccctccagaaaatatccagttaaaaaacgggtgaaaatacatcccaacacagtgatggtgaaatatacttctcattatccccagcctggcgatgatggatatgaagaaatcaatgaaggctatgggaattttatggaggaaaatccaaagaaaggtctgctgagtgaaatgaaaaaaaaagggagagctttctttggaaccatggataccctacctccaccaacagaagacccaatgatcaatgagattggacaattccagagctttgcagaaaaaaacatttttcaatcccgaaaaatgtggatagtgctgtttggatctgctttggctcatggatgtgtagctcttatcactaggcttgtttctgatcggtctaaagttccatctctagaactgatttttatccgttctgtttttcaggtcttatctgtgttagttgtgtgttactatcaggaggccccctttggacccagtggatacagattacgactcttcttttatggtgtatgcaatgtcatttctatcacttgtgcttatacatcattttcaatagttcctcccagcaatgggaccactatgtggagagccacaactacagtcttcagtgccattttggcttttttactcgtagatgagaaaatggcttatgttgacatggctacagttgtttgcagcatcttaggtgtttgtcttgtcatgatcccaaacattgttgatgaagacaattctttgttaaatgcctggaaagaagcctttgggtacaccatgactgtgatggctggactgaccactgctctctcaatgatagtatacagatccatcaaggagaagatcagcatgtggactgcactgtttacttttggttggactgggacaatttggggaatatctactatgtttattcttcaagaacccatcatcccattagatggagaaacctggagttatctcattgctatatgtgtctgttctactgcagcattcttaggagtttattatgccttggacaaattccatccagctttggttagcacagtacaacatttggagattgtggtagctatggtcttgcagcttctcgtgctgcacatatttcctagcatctatgatgtttttggaggggtaatcattatgattagtgtttttgtccttgctggctataaactttactggaggaatttaagaaggcaggactaccaggaaatactagactctcccattaaatgaatacctgattattattgtctcattaatgttcagttattaatatgtatactgccattttaatgtttacctatgaatgtcttttgtgttatataactgacagagtgctataaaatatataatatatacaaatgcagaaaatttattctagtctaatatattcaaatacaaatattaaatatatgaaa

SEQ ID NO: 437507 - DNA, 632 bp, Homo sapiens
aaaacagacaggccaagttcacaagcattgcatagccatgcaggtcagacatctagacggatccaccaacatgcgaactgaccgatcagggaccatttgcagtagtgaactcccaggtgcctttgaggcagcagggttccacctgaatgagcatctctataacatgatcatccgacgctactcagatgaaagtgggaacatggattttgacaacttcatcagctgcttggtcaggctggacgccatgttcctccgttcgcatgttaacatgcgaacggactgatccacaccctccacgttgagtccatcaccaagtcctgttgattctgcctctgaagtatcttcctcctctggctcttgcccacatgccagcccacagtgctggcataatggaccctcgtggcacttctgctcagtccccacagcgttgtcacagtgactatttaaaatcataaagcaggtcttgctttaatctccttgattctcgttgttcttagagtaagatctagaaattctcaacgtggcatctgtggatcagtccgttcgcatgtttatggctgaatcatccgctaccttcacgccaatggcgcctcaatattctttatctgcctcttcctacacatcgggcgagg

SEQ ID NO: 437508 - DNA, 2244 bp, Homo sapiens
tttaatgtaaagtaaaagctataaagcagtatttttttggccatttgtcaagaccggccccgccctccggagccggacgctgcgggaggcccgggagcggcagtggaaccgactcccagaactccggacgtgtgcggcgcagtgagtcgcagccatgttcctggttaactcgttcttgaagggcggcggcggcggcggcgggggaggcgggggcctgggtgggggcctgggaaatgtgcttggaggcctgatcagcggggccgggggcggcggcggcggcggcggcggcggcggcggtggtggaggcggcggtggcggtggaacggccatgcgcatcctaggcggagtcatcagcgccatcagcgaggcggctgcgcagtacaacccggagcccccgcccccacgcacacattactccaacattgaggccaacgagagtgaggaggtccggcagttccggagactctttgcccagctggctggagatgacatggaggtcagcgccacagaactcatgaacattctcaataaggttgtgacacgacaccctgatctgaagactgatggttttggcattgacacatgtcgcagcatggtggccgtgatggatagcgacaccacaggcaagctgggctttgaggaattcaagtacttgtggaacaacatcaaaaggtggcaggccatatacaaacagttcgacactgaccgatcagggaccatttgcagtagtgaactcccaggtgcctttgaggcagcagggttccacctgaatgagcatctctataacatgatcatccgacgctactcagatgaaagtgggaacatggattttgacaacttcatcagctgcttggtcaggctggacgccatgttccgtgccttcaaatctcttgacaaagatggcactggacaaatccaggtgaacatccaggagtggctgcagctgactatgtattcctgaactggagccccagacccgccccctcaccgccttgctataggagtcacctggagcctcggtctctcccagggccgatcctgtctgcagtcacatctttgtggggcctgctgacccacaagcttttgttctctcagtacttgttacccagcttctcaacatccagggcccaatttgccctgcctggagttccccctggctctaggacactctaacaagctctgtccacgggtctccccattcccaccaggccctgcacacacccactccgtaacctctcccctgtacctgtgccaagcctagcacttgtgatgcctccatgccccgagggccctctctcagttctgggaggatgactccagtccctgcacgccctggcacacccttcacggttgctacccaggcggccaagctccagaccgtgccagacccaggtgccccagtgcctttgtctatattctgctcccagcctgccaggcccaggaggaaataaacatgccccagttgctgatctctaaaaaaaaaaaaaaaaaaaaaaaaaaaaggggggggcggccaaaaattctccctctgggggggccccaatttttacgcggtcccccgggttttttggttccaagggggccccttattgggggcgggtttaaatagacccatgggcagcgggccccgcccgctgtataaccaccgcggtcggtggacctgtggggcaaacgcgtgcctatagcccttgggggcagccttgtgtggtgcaggcgacccctttactttcgtggcgcgtgccgccaccattacgtgcggccaaaacttacccttacccagagaatttaaacgcccctaagggggaaaacttttagaacatttaaccgtgcgtctctccgtggctgttcaccccataccgccgtgcaaatatgtggccctggggccggaccgtgggaagaaaattttggtgcggctcaacccggcagatatacgggattttaggtgaacaacctttttttttcccgcggggctcctctgttttataataatggggcagcgactgacatccatagacacatgcagcatcaacaacgaccacctgaacgccaaaacaatacctgccacagaaccatgctacgatcatcacaccggcgggactgaaccaccaccgaggccagccatcaatcatcaatcgacgcgagcacgaggcacgcacgatcatgcgcgactaccgcgacgagattcactacgcatgaccacagcagacgatagcacccaatcgagatccgacctccgacacgact

SEQ ID NO: 437509 - DNA, 2023 bp, Homo sapiens
tttaatgtaaagtaaaagctataaagcagtatttttttggccatttgtcaagaccggccccgccctccggagccggacgctgcgggaggcccgggagcggcagtggaaccgactcccagaactccggacgtgtgcggcgcagtgagtcgcagccatgttcctggttaactcgttcttgaagggcggcggcggcggcggcgggggaggcgggggcctgggtgggggcctgggaaatgtgcttggaggcctgatcagcggggccgggggcggcggcggcggcggcggcggcggcggcggtggtggaggcggcggtggcggtggaacggccatgcgcatcctaggcggagtcatcagcgccatcagcgaggcggctgcgcagtacaacccggagcccccgcccccacgcacacattactccaacattgaggccaacgagagtgaggaggtccggcagttccggagactctttgcccagctggctggagatgacatggaggtcagcgccacagaactcatgaacattctcaataaggttgtgacacgacaccctgatctgaagactgatggttttggcattgacacatgtcgcagcatggtggccgtgatggatagcgacaccacaggcaagctgggctttgaggaattcaagtacttgtggaacaacatcaaaaggtggcaggccatatacaaacagttcgacactgaccgatcagggaccatttgcagtagtgaactcccaggtgcctttgaggcagcagggttccacctgaatgagcatctctataacatgatcatccgacgctactcagatgaaagtgggaacatggattttgacaacttcatcagctgcttggtcaggctggacgccatgttccgtgccttcaaatctcttgacaaagatggcactggacaaatccaggtgaacatccaggagtggctgcagctgactatgtattcctgaactggagccccagacccgccccctcaccgccttgctataggagtcacctggagcctcggtctctcccagggccgatcctgtctgcagtcacatctttgtggggcctgctgacccacaagcttttgttctctcagtacttgttacccagcttctcaacatccagggcccaatttgccctgcctggagttccccctggctctaggacactctaacaagctctgtccacgggtctccccattcccaccaggccctgcacacacccactccgtaacctctcccctgtacctgtgccaagcctagcacttgtgatgcctccatgccccgagggccctctctcagttctgggaggatgactccagtccctgcacgccctggcacacccttcacggttgctacccaggcggccaagctccagaccgtgccagacccaggtgccccagtgcctttgtctatattctgctcccagcctgccaggcccaggaggaaataaacatgccccagttgctgatctctaaaaaacgagaaacaaaaacaaaagacaaacgacacaaaaatttttgggtgaggcgagacattacgaccccgagaaaaaggttatttaaaacacacactatcgttatggggcgcggcgggaccccacatgatagagtcataaggtcacacacaggagcgaccataagagacggagctaaccccaaagagagaacaccccacgggacaaaagacaacaggcgggttgtgggtattccatcacaccgaatataaaaaaagcgcgcgcggtgggacaacccgagagctgttggtgaacaacaactcccaagatggggaaccaacgagagggccgaaaggggagtcacaacacaggggagccacaagagagagctctagaatacaaatatccccggacgcgggtgacagacgagcaagaccaaacaacacaacatacgaaacagcaacgaaagctgtagacggacgcaagcgaaagagagaagacaaagaacagacacgaacaagccagaaaagcacacagagaacgaacagagcaacgaacacaaagacacg

SEQ ID NO: 437510 - DNA, 2164 bp, Homo sapiens
  misc_feature (23)..(23): n is a, c, g, or t
  misc_feature (29)..(29): n is a, c, g, or t
acttaggctagtacgaggccggntgttantcggccccagaactccggacgtgtgcggcgcagtgagtcgcagccatgttcctggttaactcgttcttgaagggcggcggcggcggcggcgggggaggcgggggcctgggtgggggcctgggaaatgtgcttggaggcctgatcagcggggccgggggcggcggcggcggcggcggcggcggcggcggtggtggaggcggcggtggcggtggaacggccatgcgcatcctaggcggagtcatcagcgccatcagcgaggcggctgcgcagtacaacccggagcccccgcccccacgcacacattactccaacattgaggccaacgagagtgaggaggtccggcagttccggagactctttgcccagctggctggagatgacatggaggtcagcgccacagaactcatgaacattctcaataaggttgtgacacgacaccctgatctgaagactgatggttttggcattgacacatgtcgcagcatggtggccgtgatggatagcgacaccacaggcaagctgggctttgaggaattcaagtacttgtggaacaacatcaaaaggtggcaggccatatacaaacagttcgacactgaccgatcagggaccatttgcagtagtgaactcccaggtgcctttgaggcagcagggttccacctgaatgagcatctctataacatgatcatccgacgctactcagatgaaagtgggaacatggattttgacaacttcatcagctgcttggtcaggctggacgccatgttccgtgccttcaaatctcttgacaaagatggcactggacaaatccaggtgaacatccaggagtggctgcagctgactatgtattcctgaactggagccccagacccgccccctcaccgccttgctataggagtcacctggagcctcggtctctcccagggccgatcctgtctgcagtcacatctttgtggggcctgctgacccacaagcttttgttctctcagtacttgttacccagcttctcaacatccagggcccaatttgccctgcctggagttccccctggctctaggacactctaacaagctctgtccacgggtctccccattcccaccaggccctgcacacacccactccgtaacctctcccctgtacctgtgccaagcctagcacttgtgatgcctccatgccccgagggccctctctcagttctgggaggatgactccagtccctgcacgccctggcacacccttcacggttgctacccaggcggccaagctccagaccgtgccagacccaggtgccccagtgcctttgtctatattctgctcccagcctgccaggcccaggaggaaataaacatgccccagttgctgatctctaaaaaaaaaaaaaaaaaaaaaaaaaaaaggggggggcggccaaaaattctccctctgggggggccccaatttttacgcggtcccccgggttttttggttccaagggggccccttattgggggcgggtttaaatagacccatgggcagcgggccccgcccgctgtataaccaccgcggtcggtggacctgtggggcaaacgcgtgcctatagcccttgggggcagccttgtgtggtgcaggcgacccctttactttcgtggcgcgtgccgccaccattacgtgcggccaaaacttacccttacccagagaatttaaacgcccctaagggggaaaacttttagaacatttaaccgtgcgtctctccgtggctgttcaccccataccgccgtgcaaatatgtggccctggggccggaccgtgggaagaaaattttggtgcggctcaacccggcagatatacgggattttaggtgaacaacctttttttttcccgcggggctcctctgttttataataatggggcagcgactgacatccatagacacatgcagcatcaacaacgaccacctgaacgccaaaacaatacctgccacagaaccatgctacgatcatcacaccggcgggactgaaccaccaccgaggccagccatcaatcatcaatcgacgcgagcacgaggcacgcacgatcatgcgcgactaccgcgacgagattcactacgcatgaccacagcagacgatagcacccaatcgagatccgacctccgacacgact

SEQ ID NO: 437511 - DNA, 2190 bp, Homo sapiens
  misc_feature (23)..(23): n is a, c, g, or t
  misc_feature (29)..(29): n is a, c, g, or t
acttaggctagtacgaggccggntgttantcggccggtgtgggctcaggggcgaagcacccactggtccccttttttccccccagcagtgagtcgcagccatgttcctggttaactcgttcttgaagggcggcggcggcggcggcgggggaggcgggggcctgggtgggggcctgggaaatgtgcttggaggcctgatcagcggggccgggggcggcggcggcggcggcggcggcggcggcggtggtggaggcggcggtggcggtggaacggccatgcgcatcctaggcggagtcatcagcgccatcagcgaggcggctgcgcagtacaacccggagcccccgcccccacgcacacattactccaacattgaggccaacgagagtgaggaggtccggcagttccggagactctttgcccagctggctggagatgacatggaggtcagcgccacagaactcatgaacattctcaataaggttgtgacacgacaccctgatctgaagactgatggttttggcattgacacatgtcgcagcatggtggccgtgatggatagcgacaccacaggcaagctgggctttgaggaattcaagtacttgtggaacaacatcaaaaggtggcaggccatatacaaacagttcgacactgaccgatcagggaccatttgcagtagtgaactcccaggtgcctttgaggcagcagggttccacctgaatgagcatctctataacatgatcatccgacgctactcagatgaaagtgggaacatggattttgacaacttcatcagctgcttggtcaggctggacgccatgttccgtgccttcaaatctcttgacaaagatggcactggacaaatccaggtgaacatccaggagtggctgcagctgactatgtattcctgaactggagccccagacccgccccctcaccgccttgctataggagtcacctggagcctcggtctctcccagggccgatcctgtctgcagtcacatctttgtggggcctgctgacccacaagcttttgttctctcagtacttgttacccagcttctcaacatccagggcccaatttgccctgcctggagttccccctggctctaggacactctaacaagctctgtccacgggtctccccattcccaccaggccctgcacacacccactccgtaacctctcccctgtacctgtgccaagcctagcacttgtgatgcctccatgccccgagggccctctctcagttctgggaggatgactccagtccctgcacgccctggcacacccttcacggttgctacccaggcggccaagctccagaccgtgccagacccaggtgccccagtgcctttgtctatattctgctcccagcctgccaggcccaggaggaaataaacatgccccagttgctgatctctaaaaaaaaaaaaaaaaaaaaaaaaaaaaggggggggcggccaaaaattctccctctgggggggccccaatttttacgcggtcccccgggttttttggttccaagggggccccttattgggggcgggtttaaatagacccatgggcagcgggccccgcccgctgtataaccaccgcggtcggtggacctgtggggcaaacgcgtgcctatagcccttgggggcagccttgtgtggtgcaggcgacccctttactttcgtggcgcgtgccgccaccattacgtgcggccaaaacttacccttacccagagaatttaaacgcccctaagggggaaaacttttagaacatttaaccgtgcgtctctccgtggctgttcaccccataccgccgtgcaaatatgtggccctggggccggaccgtgggaagaaaattttggtgcggctcaacccggcagatatacgggattttaggtgaacaacctttttttttcccgcggggctcctctgttttataataatggggcagcgactgacatccatagacacatgcagcatcaacaacgaccacctgaacgccaaaacaatacctgccacagaaccatgctacgatcatcacaccggcgggactgaaccaccaccgaggccagccatcaatcatcaatcgacgcgagcacgaggcacgcacgatcatgcgcgactaccgcgacgagattcactacgcatgaccacagcagacgatagcacccaatcgagatccgacctccgacacgact

SEQ ID NO: 437512 - DNA, 2588 bp, Homo sapiens
tttaatgtaaagtaaaagctataaagcagtatttttttggccatttgtcaagaccggccccgccctccggagccggacgctgcgggaggcccgggagcggcagtggaaccgactcccagaactccggacgtgtgcggcgcagtgagtcgcagccatgttcctggttaactcgttcttgaagggcggcggcggcggcggcgggggaggcgggggcctgggtgggggcctgggaaatgtgcttggaggcctgatcagcggggccgggggcggcggcggcggcggcggcggcggcggcggtggtggaggcggcggtggcggtggaacggccatgcgcatcctaggcggagtcatcagcgccatcaggtaaggcggagactatcagaggggcggggcctgggaatgggaggagcctcagtgaggcgtggtctgggaggggcgtggtctaaaaatagaataggattaacctggaggctaacctgggtacatgaattaggccggggaggcctggtttgagagttctgctgtaagggggtggaccccagtgaggcggatatcagtcattgggggcggtgcttgatatgggagtagtctgattgtgtgggaccaggacaatgtggtcctgaggggactgatgtggagttttggcgggtggggcttatgggtctgggctcagcctgcattggctaacctggagatgaacgttaaagcgaggcggctgcgcagtacaacccggagcccccgcccccacgcacacattactccaacattgaggccaacgagagtgaggaggtccggcagttccggagactctttgcccagctggctggagatgacatggaggtcagcgccacagaactcatgaacattctcaataaggttgtgacacgacaccctgatctgaagactgatggttttggcattgacacatgtcgcagcatggtggccgtgatggatagcgacaccacaggcaagctgggctttgaggaattcaagtacttgtggaacaacatcaaaaggtggcaggccatatacaaacagttcgacactgaccgatcagggaccatttgcagtagtgaactcccaggtgcctttgaggcagcagggttccacctgaatgagcatctctataacatgatcatccgacgctactcagatgaaagtgggaacatggattttgacaacttcatcagctgcttggtcaggctggacgccatgttccgtgccttcaaatctcttgacaaagatggcactggacaaatccaggtgaacatccaggagtggctgcagctgactatgtattcctgaactggagccccagacccgccccctcaccgccttgctataggagtcacctggagcctcggtctctcccagggccgatcctgtctgcagtcacatctttgtggggcctgctgacccacaagcttttgttctctcagtacttgttacccagcttctcaacatccagggcccaatttgccctgcctggagttccccctggctctaggacactctaacaagctctgtccacgggtctccccattcccaccaggccctgcacacacccactccgtaacctctcccctgtacctgtgccaagcctagcacttgtgatgcctccatgccccgagggccctctctcagttctgggaggatgactccagtccctgcacgccctggcacacccttcacggttgctacccaggcggccaagctccagaccgtgccagacccaggtgccccagtgcctttgtctatattctgctcccagcctgccaggcccaggaggaaataaacatgccccagttgctgatctctaaaaaaaaaaaaaaaaaaaaaaaaaaaaggggggggcggccaaaaattctccctctgggggggccccaatttttacgcggtcccccgggttttttggttccaagggggccccttattgggggcgggtttaaatagacccatgggcagcgggccccgcccgctgtataaccaccgcggtcggtggacctgtggggcaaacgcgtgcctatagcccttgggggcagccttgtgtggtgcaggcgacccctttactttcgtggcgcgtgccgccaccattacgtgcggccaaaacttacccttacccagagaatttaaacgcccctaagggggaaaacttttagaacatttaaccgtgcgtctctccgtggctgttcaccccataccgccgtgcaaatatgtggccctggggccggaccgtgggaagaaaattttggtgcggctcaacccggcagatatacgggattttaggtgaacaacctttttttttcccgcggggctcctctgttttataataatggggcagcgactgacatccatagacacatgcagcatcaacaacgaccacctgaacgccaaaacaatacctgccacagaaccatgctacgatcatcacaccggcgggactgaaccaccaccgaggccagccatcaatcatcaatcgacgcgagcacgaggcacgcacgatcatgcgcgactaccgcgacgagattcactacgcatgaccacagcagacgatagcacccaatcgagatccgacctccgacacgact

SEQ ID NO: 437513 - DNA, 2274 bp, Homo sapiens
tttaatgtaaagtaaaagctataaagcagtatttttttggccatttgtcaagaccggccccgccctccggagccggacgctgcgggaggcccgggagcggcagtggaaccgactcccagaactccggacgtgtgcggcgcagtgagtcgcagccatgttcctggttaactcgttcttgaagggcggcggcggcggcggcgggggaggcgggggcctgggtgggggcctgggaaatgtgcttggaggcctgatcagcggggccgggggcggcggcggcggcggcggcggcggcggcggtggtggaggcggcggtggcggtggaacggccatgcgcatcctaggcggagtcatcagcgccatcagcgaggcggctgcgcagtacaacccggagcccccgcccccacgcacacattactccaacattgaggccaacgagagtgaggaggtccggcagttccggagactctttgcccagctggctggagatgacatggaggtcagcgccacagaactcatgaacattctcaataaggttgtgacacgacaccctgatctgaagactgatggttttggcattgacacatgtcgcagcatggtggccgtgatggatctgtcactcttcttaacaccctcccaccagagcgacaccacaggcaagctgggctttgaggaattcaagtacttgtggaacaacatcaaaaggtggcaggccatatacaaacagttcgacactgaccgatcagggaccatttgcagtagtgaactcccaggtgcctttgaggcagcagggttccacctgaatgagcatctctataacatgatcatccgacgctactcagatgaaagtgggaacatggattttgacaacttcatcagctgcttggtcaggctggacgccatgttccgtgccttcaaatctcttgacaaagatggcactggacaaatccaggtgaacatccaggagtggctgcagctgactatgtattcctgaactggagccccagacccgccccctcaccgccttgctataggagtcacctggagcctcggtctctcccagggccgatcctgtctgcagtcacatctttgtggggcctgctgacccacaagcttttgttctctcagtacttgttacccagcttctcaacatccagggcccaatttgccctgcctggagttccccctggctctaggacactctaacaagctctgtccacgggtctccccattcccaccaggccctgcacacacccactccgtaacctctcccctgtacctgtgccaagcctagcacttgtgatgcctccatgccccgagggccctctctcagttctgggaggatgactccagtccctgcacgccctggcacacccttcacggttgctacccaggcggccaagctccagaccgtgccagacccaggtgccccagtgcctttgtctatattctgctcccagcctgccaggcccaggaggaaataaacatgccccagttgctgatctctaaaaaaaaaaaaaaaaaaaaaaaaaaaaggggggggcggccaaaaattctccctctgggggggccccaatttttacgcggtcccccgggttttttggttccaagggggccccttattgggggcgggtttaaatagacccatgggcagcgggccccgcccgctgtataaccaccgcggtcggtggacctgtggggcaaacgcgtgcctatagcccttgggggcagccttgtgtggtgcaggcgacccctttactttcgtggcgcgtgccgccaccattacgtgcggccaaaacttacccttacccagagaatttaaacgcccctaagggggaaaacttttagaacatttaaccgtgcgtctctccgtggctgttcaccccataccgccgtgcaaatatgtggccctggggccggaccgtgggaagaaaattttggtgcggctcaacccggcagatatacgggattttaggtgaacaacctttttttttcccgcggggctcctctgttttataataatggggcagcgactgacatccatagacacatgcagcatcaacaacgaccacctgaacgccaaaacaatacctgccacagaaccatgctacgatcatcacaccggcgggactgaaccaccaccgaggccagccatcaatcatcaatcgacgcgagcacgaggcacgcacgatcatgcgcgactaccgcgacgagattcactacgcatgaccacagcagacgatagcacccaatcgagatccgacctccgacacgact

SEQ ID NO: 437514 - DNA, 2220 bp, Homo sapiens
  misc_feature (23)..(23): n is a, c, g, or t
  misc_feature (29)..(29): n is a, c, g, or t
acttaggctagtacgaggccggntgttantcggccggtgtgggctcaggggcgaagcacccactggtccccttttttccccccagcagtgagtcgcagccatgttcctggttaactcgttcttgaagggcggcggcggcggcggcgggggaggcgggggcctgggtgggggcctgggaaatgtgcttggaggcctgatcagcggggccgggggcggcggcggcggcggcggcggcggcggcggtggtggaggcggcggtggcggtggaacggccatgcgcatcctaggcggagtcatcagcgccatcagcgaggcggctgcgcagtacaacccggagcccccgcccccacgcacacattactccaacattgaggccaacgagagtgaggaggtccggcagttccggagactctttgcccagctggctggagatgacatggaggtcagcgccacagaactcatgaacattctcaataaggttgtgacacgacaccctgatctgaagactgatggttttggcattgacacatgtcgcagcatggtggccgtgatggatctgtcactcttcttaacaccctcccaccagagcgacaccacaggcaagctgggctttgaggaattcaagtacttgtggaacaacatcaaaaggtggcaggccatatacaaacagttcgacactgaccgatcagggaccatttgcagtagtgaactcccaggtgcctttgaggcagcagggttccacctgaatgagcatctctataacatgatcatccgacgctactcagatgaaagtgggaacatggattttgacaacttcatcagctgcttggtcaggctggacgccatgttccgtgccttcaaatctcttgacaaagatggcactggacaaatccaggtgaacatccaggagtggctgcagctgactatgtattcctgaactggagccccagacccgccccctcaccgccttgctataggagtcacctggagcctcggtctctcccagggccgatcctgtctgcagtcacatctttgtggggcctgctgacccacaagcttttgttctctcagtacttgttacccagcttctcaacatccagggcccaatttgccctgcctggagttccccctggctctaggacactctaacaagctctgtccacgggtctccccattcccaccaggccctgcacacacccactccgtaacctctcccctgtacctgtgccaagcctagcacttgtgatgcctccatgccccgagggccctctctcagttctgggaggatgactccagtccctgcacgccctggcacacccttcacggttgctacccaggcggccaagctccagaccgtgccagacccaggtgccccagtgcctttgtctatattctgctcccagcctgccaggcccaggaggaaataaacatgccccagttgctgatctctaaaaaaaaaaaaaaaaaaaaaaaaaaaaggggggggcggccaaaaattctccctctgggggggccccaatttttacgcggtcccccgggttttttggttccaagggggccccttattgggggcgggtttaaatagacccatgggcagcgggccccgcccgctgtataaccaccgcggtcggtggacctgtggggcaaacgcgtgcctatagcccttgggggcagccttgtgtggtgcaggcgacccctttactttcgtggcgcgtgccgccaccattacgtgcggccaaaacttacccttacccagagaatttaaacgcccctaagggggaaaacttttagaacatttaaccgtgcgtctctccgtggctgttcaccccataccgccgtgcaaatatgtggccctggggccggaccgtgggaagaaaattttggtgcggctcaacccggcagatatacgggattttaggtgaacaacctttttttttcccgcggggctcctctgttttataataatggggcagcgactgacatccatagacacatgcagcatcaacaacgaccacctgaacgccaaaacaatacctgccacagaaccatgctacgatcatcacaccggcgggactgaaccaccaccgaggccagccatcaatcatcaatcgacgcgagcacgaggcacgcacgatcatgcgcgactaccgcgacgagattcactacgcatgaccacagcagacgatagcacccaatcgagatccgacctccgacacgact

SEQ ID NO: 437515 - DNA, 2420 bp, Homo sapiens
tttaatgtaaagtaaaagctataaagcagtatttttttggccatttgtcaagaccggccccgccctccggagccggacgctgcgggaggcccgggagcggcagtggaaccgactcccagaactccggacgtgtgcggcgcagtgagtcgcagccatgttcctggttaactcgttcttgaagggcggcggcggcggcggcgggggaggcgggggcctgggtgggggcctgggaaatgtgcttggaggcctgatcagcggggccgggggcggcggcggcggcggcggcggcggcggcggtggtggaggcggcggtggcggtggaacggccatgcgcatcctaggcggagtcatcagcgccatcagcgaggcggctgcgcagtacaacccggagcccccgcccccacgcacacattactccaacattgaggccaacgagagtgaggaggtccggcagttccggagactctttgcccagctggctggagatgacatggaggtcagcgccacagaactcatgaacattctcaataaggttgtgacacgacaccctgatctgaagactgatggttttggcattgacacatgtcgcagcatggtggccgtgatggatagcgacaccacaggcaagctgggctttgaggaattcaagtacttgtggaacaacatcaaaaggtggcaggccatatacaaacagttcgacactgaccgatcagggaccatttgcagtagtgaactcccaggtgcctttgaggcagcagggttccacctgaatgagcatctctataacatgatcatccgacgctactcagatgaaagtgggaacatggattttgacaacttcatcagctgcttggtcaggctggacgccatgttccgtgccttcaaatctcttgacaaagatggcactggacaaatccaggtgaacatccaggaggtaaggacccccatattggggtatgggtgcctgggaggaccccacccctcagcccttcataccagctctgagctgcagtccccttcctcctattttgccagccgtccctgggtgagggcaaaggggctggtgctcttggggttccctgtcctcactctccaccctcctctccccagtggctgcagctgactatgtattcctgaactggagccccagacccgccccctcaccgccttgctataggagtcacctggagcctcggtctctcccagggccgatcctgtctgcagtcacatctttgtggggcctgctgacccacaagcttttgttctctcagtacttgttacccagcttctcaacatccagggcccaatttgccctgcctggagttccccctggctctaggacactctaacaagctctgtccacgggtctccccattcccaccaggccctgcacacacccactccgtaacctctcccctgtacctgtgccaagcctagcacttgtgatgcctccatgccccgagggccctctctcagttctgggaggatgactccagtccctgcacgccctggcacacccttcacggttgctacccaggcggccaagctccagaccgtgccagacccaggtgccccagtgcctttgtctatattctgctcccagcctgccaggcccaggaggaaataaacatgccccagttgctgatctctaaaaaaaaaaaaaaaaaaaaaaaaaaaaggggggggcggccaaaaattctccctctgggggggccccaatttttacgcggtcccccgggttttttggttccaagggggccccttattgggggcgggtttaaatagacccatgggcagcgggccccgcccgctgtataaccaccgcggtcggtggacctgtggggcaaacgcgtgcctatagcccttgggggcagccttgtgtggtgcaggcgacccctttactttcgtggcgcgtgccgccaccattacgtgcggccaaaacttacccttacccagagaatttaaacgcccctaagggggaaaacttttagaacatttaaccgtgcgtctctccgtggctgttcaccccataccgccgtgcaaatatgtggccctggggccggaccgtgggaagaaaattttggtgcggctcaacccggcagatatacgggattttaggtgaacaacctttttttttcccgcggggctcctctgttttataataatggggcagcgactgacatccatagacacatgcagcatcaacaacgaccacctgaacgccaaaacaatacctgccacagaaccatgctacgatcatcacaccggcgggactgaaccaccaccgaggccagccatcaatcatcaatcgacgcgagcacgaggcacgcacgatcatgcgcgactaccgcgacgagattcactacgcatgaccacagcagacgatagcacccaatcgagatccgacctccgacacgact

SEQ ID NO: 437516 - DNA, 1620 bp, Homo sapiens
aaaacagacaggccaagttcacaagcattgcatagccatgcaggtcagacatctagacggatccaccaacatgcgaactgaccgatcagggaccatttgcagtagtgaactcccaggtgcctttgaggcagcagggttccacctgaatgagcatctctataacatgatcatccgacgctactcagatgaaagtgggaacatggattttgacaacttcatcagctgcttggtcaggctggacgccatgttccgtgccttcaaatctcttgacaaagatggcactggacaaatccaggtgaacatccaggagtggctgcagctgactatgtattcctgaactggagccccagacccgccccctcaccgccttgctataggagtcacctggagcctcggtctctcccagggccgatcctgtctgcagtcacatctttgtggggcctgctgacccacaagcttttgttctctcagtacttgttacccagcttctcaacatccagggcccaatttgccctgcctggagttccccctggctctaggacactctaacaagctctgtccacgggtctccccattcccaccaggccctgcacacacccactccgtaacctctcccctgtacctgtgccaagcctagcacttgtgatgcctccatgccccgagggccctctctcagttctgggaggatgactccagtccctgcacgccctggcacacccttcacggttgctacccaggcggccaagctccagaccgtgccagacccaggtgccccagtgcctttgtctatattctgctcccagcctgccaggcccaggaggaaataaacatgccccagttgctgatctctaaaaaaaaaaaaaaaaaaaaaaaaaaaaggggggggcggccaaaaattctccctctgggggggccccaatttttacgcggtcccccgggttttttggttccaagggggccccttattgggggcgggtttaaatagacccatgggcagcgggccccgcccgctgtataaccaccgcggtcggtggacctgtggggcaaacgcgtgcctatagcccttgggggcagccttgtgtggtgcaggcgacccctttactttcgtggcgcgtgccgccaccattacgtgcggccaaaacttacccttacccagagaatttaaacgcccctaagggggaaaacttttagaacatttaaccgtgcgtctctccgtggctgttcaccccataccgccgtgcaaatatgtggccctggggccggaccgtgggaagaaaattttggtgcggctcaacccggcagatatacgggattttaggtgaacaacctttttttttcccgcggggctcctctgttttataataatggggcagcgactgacatccatagacacatgcagcatcaacaacgaccacctgaacgccaaaacaatacctgccacagaaccatgctacgatcatcacaccggcgggactgaaccaccaccgaggccagccatcaatcatcaatcgacgcgagcacgaggcacgcacgatcatgcgcgactaccgcgacgagattcactacgcatgaccacagcagacgatagcacccaatcgagatccgacctccgacacgact

SEQ ID NO: 437517 - DNA, 2130 bp, Homo sapiens
tttaatgtaaagtaaaagctataaagcagtatttttttggccatttgtcaagaccggccccgccctccggagccggacgctgcgggaggcccgggagcggcagtggaaccgactcccagaactccggacgtgtgcggcgcagtgagtcgcagccatgttcctggttaactcgttcttgaagggcggcggcggcggcggcgggggaggcgggggcctgggtgggggcctgggaaatgtgcttggaggcctgatcagcggggccgggggcggcggcggcggcggcggcggcggcggcggtggtggaggcggcggtggcggtggaacggccatgcgcatcctaggcggagtcatcagcgccatcagcgaggcggctgcgcagtacaacccggagcccccgcccccacgcacacattactccaacattgaggccaacgagagtgaggaggtccggcagttccggagactctttgcccagctggctggagatgacatggaggtcagcgccacagaactcatgaacattctcaataaggttgtgacacgacaccctgatctgaagactgatggttttggcattgacacatgtcgcagcatggtggccgtgatggatagcgacaccacaggcaagctgggctttgaggaattcaagtacttgtggaacaacatcaaaaggtggcaggccatatacaaacagttcgacactgaccgatcagggaccatttgcagtagtgaactcccaggtgcctttgaggcagcagggttccacctgaatgagcatctctataacatgatcatccgacgctactcagatgaaagtgggaacatggattttgacaacttcatcagctgcttggtcaggctggacgccatgttccgtgccttcaaatctcttgacaaagatggcactggacaaatccaggtgaacatccaggagtggctgcagctgactatgtattcctgaactggagccccagacccgccccctcaccgccttgctataggagtcacctggagcctcggtctctcccagggccgatcctgtctgcagtcacatctttgtggggcctgctgacccacaagcttttgttctctcagtacttgtcacacccactccgtaacctctcccctgtacctgtgccaagcctagcacttgtgatgcctccatgccccgagggccctctctcagttctgggaggatgactccagtccctgcacgccctggcacacccttcacggttgctacccaggcggccaagctccagaccgtgccagacccaggtgccccagtgcctttgtctatattctgctcccagcctgccaggcccaggaggaaataaacatgccccagttgctgatctctaaaaaaaaaaaaaaaaaaaaaaaaaaaaggggggggcggccaaaaattctccctctgggggggccccaatttttacgcggtcccccgggttttttggttccaagggggccccttattgggggcgggtttaaatagacccatgggcagcgggccccgcccgctgtataaccaccgcggtcggtggacctgtggggcaaacgcgtgcctatagcccttgggggcagccttgtgtggtgcaggcgacccctttactttcgtggcgcgtgccgccaccattacgtgcggccaaaacttacccttacccagagaatttaaacgcccctaagggggaaaacttttagaacatttaaccgtgcgtctctccgtggctgttcaccccataccgccgtgcaaatatgtggccctggggccggaccgtgggaagaaaattttggtgcggctcaacccggcagatatacgggattttaggtgaacaacctttttttttcccgcggggctcctctgttttataataatggggcagcgactgacatccatagacacatgcagcatcaacaacgaccacctgaacgccaaaacaatacctgccacagaaccatgctacgatcatcacaccggcgggactgaaccaccaccgaggccagccatcaatcatcaatcgacgcgagcacgaggcacgcacgatcatgcgcgactaccgcgacgagattcactacgcatgaccacagcagacgatagcacccaatcgagatccgacctccgacacgact

SEQ ID NO: 437518 - DNA, 2046 bp, Homo sapiens
tttaatgtaaagtaaaagctataaagcagtatttttttggccatttgtcaagaccggccccgccctccggagccggacgctgcgggaggcccgggagcggcagtggaaccgactcccagaactccggacgtgtgcggcgcagtgagtcgcagccatgttcctggttaactcgttcttgaagggcggcggcggcggcggcgggggaggcgggggcctgggtgggggcctgggaaatgtgcttggaggcctgatcagcggggccgggggcggcggcggcggcggcggcggcggcggcggtggtggaggcggcggtggcggtggaacggccatgcgcatcctaggcggagtcatcagcgccatcagcgaggcggctgcgcagtacaacccggagcccccgcccccacgcacacattactccaacattgaggccaacgagagtgaggaggtccggcagttccggagactctttgcccagctggctggagatgacatggaggtcagcgccacagaactcatgaacattctcaataaggttgtgacacgacaccctgatctgaagactgatggttttggcattgacacatgtcgcagcatggtggccgtgatggatagcgacaccacaggcaagctgggctttgaggaattcaagtacttgtggaacaacatcaaaaggtggcaggccatatacaaacagttcgacactgaccgatcagggaccatttgcagtagtgaactcccaggtgcctttgaggcagcagggttccacctgaatgagcatctctataacatgatcatccgacgctactcagatgaaagtgggaacatggattttgacaacttcatcagctgcttggtcaggctggacgccatgttccgtgccttcaaatctcttgacaaagatggcactggacaaatccaggtgaacatccaggagtggctgcagctgactatgtattcctgaactggagccccagacccgccccctcaccgccttgctataggagtcacctggagcctcggtctctcccagggccgatcctgtctgcagtcacatctttgtggggcctgctgacccacaagcttttgttctctcagtacttgtttctgggaggatgactccagtccctgcacgccctggcacacccttcacggttgctacccaggcggccaagctccagaccgtgccagacccaggtgccccagtgcctttgtctatattctgctcccagcctgccaggcccaggaggaaataaacatgccccagttgctgatctctaaaaaaaaaaaaaaaaaaaaaaaaaaaaggggggggcggccaaaaattctccctctgggggggccccaatttttacgcggtcccccgggttttttggttccaagggggccccttattgggggcgggtttaaatagacccatgggcagcgggccccgcccgctgtataaccaccgcggtcggtggacctgtggggcaaacgcgtgcctatagcccttgggggcagccttgtgtggtgcaggcgacccctttactttcgtggcgcgtgccgccaccattacgtgcggccaaaacttacccttacccagagaatttaaacgcccctaagggggaaaacttttagaacatttaaccgtgcgtctctccgtggctgttcaccccataccgccgtgcaaatatgtggccctggggccggaccgtgggaagaaaattttggtgcggctcaacccggcagatatacgggattttaggtgaacaacctttttttttcccgcggggctcctctgttttataataatggggcagcgactgacatccatagacacatgcagcatcaacaacgaccacctgaacgccaaaacaatacctgccacagaaccatgctacgatcatcacaccggcgggactgaaccaccaccgaggccagccatcaatcatcaatcgacgcgagcacgaggcacgcacgatcatgcgcgactaccgcgacgagattcactacgcatgaccacagcagacgatagcacccaatcgagatccgacctccgacacgact

SEQ ID NO: 437519 - DNA, 1946 bp, Homo sapiens
  misc_feature (999)..(999): n is a, c, g, or t
tttaatgtaaagtaaaagctataaagcagtatttttttggccatttgtcaagaccggccccgccctccggagccggacgctgcgggaggcccgggagcggcagtggaaccgactcccagaactccggacgtgtgcggcgcagtgagtcgcagccatgttcctggttaactcgttcttgaagggcggcggcggcggcggcgggggaggcgggggcctgggtgggggcctgggaaatgtgcttggaggcctgatcagcggggccgggggcggcggcggcggcggcggcggcggcggcggtggtggaggcggcggtggcggtggaacggccatgcgcatcctaggcggagtcatcagcgccatcagcgaggcggctgcgcagtacaacccggagcccccgcccccacgcacacattactccaacattgaggccaacgagagtgaggaggtccggcagttccggagactctttgcccagctggctggagatgacatggaggtcagcgccacagaactcatgaacattctcaataaggttgtgacacgacaccctgatctgaagactgatggttttggcattgacacatgtcgcagcatggtggccgtgatggatagcgacaccacaggcaagctgggctttgaggaattcaagtacttgtggaacaacatcaaaaggtggcaggccatatacaaacagttcgacactgaccgatcagggaccatttgcagtagtgaactcccaggtgcctttgaggcagcagggttccacctgaatgagcatctctataacatgatcatccgacgctactcagatgaaagtgggaacatggattttgacaacttcatcagctgcttggtcaggctggacgccatgttcccttcaaatctcttgacaagatggcactggagcgaatcgacgagtgaatcagtcacctggatagtaggcttagcagcgtcgagcttagtttatttcctggaatgttggatgcccgctaagaaccnctgctcgctcgcgtctacctgccgttgtctaattgtggtgtaccataaaacctcggtctctcccagggccgatcctgtctgcagtcacatctttgtggggcctgctgacccacaagcttttgttctctcagtacttgttacccagcttctcaacatccagggcccaatttgccctgcctggagttccccctggctctaggacactctaacaagctctgtccacgggtctccccattcccaccaggccctgcacacacccactccgtaacctctcccctgtacctgtgccaagcctagcacttgtgatgcctccatgccccgagggccctctctcagttctgggaggatgactccagtccctgcacgccctggcacacccttcacggttgctacccaggcggccaagctccagaccgtgccagacccaggtgccccagtgcctttgtctatattctgctcccagcctgccaggcccaggaggaaataaacatgccccagttgctgatctctaaaacacaaacacacaagacaaacctcagaggaatcaaatgcagaggcgcggagacaaggggtcatgaactgggccatgggccaaacaagtaccgagacccaagatactggaccccacggtgacaacaagcgaggcaccaaaagagaagcgcatacaatttacgaaaaagcccgggtaccctcgtaacatcacgcgcacagagacaagagtagaattcaccaaaaaacagagggttataacggatagccagaaaattcaaaaggggtcaaaaaaacacaaaaccaaaacagcgcagtagcaaaacaagaaacaaaaataaagacgataaaaaatctatattctaatcaatataccttaaaataacataaaaataaaaactatctactaaaaactatcggattcttcatctaatcacagataaactccacaaaccagc

SEQ ID NO: 437520 - DNA, 1831 bp, Homo sapiens
tttaatgtaaagtaaaagctataaagcagtatttttttggccatttgtcaagaccggccccgccctccggagccggacgctgcgggaggcccgggagcggcagtggaaccgactcccagaactccggacgtgtgcggcgcagtgagtcgcagccatgttcctggttaactcgttcttgaagggcggcggcggcggcggcgggggaggcgggggcctgggtgggggcctgggaaatgtgcttggaggcctgatcagcggggccgggggcggcggcggcggcggcggcggcggcggcggtggtggaggcggcggtggcggtggaacggccatgcgcatcctaggcggagtcatcagcgccatcagcgaggcggctgcgcagtacaacccggagcccccgcccccacgcacacattactccaacattgaggccaacgagagtgaggaggtccggcagttccggagactctttgcccagctggctggagatgacatggaggtcagcgccacagaactcatgaacattctcaataaggttgtgacacgacaccctgatctgaagactgatggttttggcattgacacatgtcgcagcatggtggccgtgatggatagcgacaccacaggcaagctgggctttgaggaattcaagtacttgtggaacaacatcaaaaggtggcaggccatatacaaacagttcgacactgaccgatcagggaccatttgcagtagtgaactcccaggtgcctttgaggcagcagggttccacctgaatgagcatctctataacatgatcatccgacgctcacacccactccgtaacctctcccctgtacctgtgccaagcctagcacttgtgatgcctccatgccccgagggccctctctcagttctgggaggatgactccagtccctgcacgccctggcacacccttcacggttgctacccaggcggccaagctccagaccgtgccagacccaggtgccccagtgcctttgtctatattctgctcccagcctgccaggcccaggaggaaataaacatgccccagttgctgatctctaaaaaaaaaaaaaaaaaaaaaaaaaaaaggggggggcggccaaaaattctccctctgggggggccccaatttttacgcggtcccccgggttttttggttccaagggggccccttattgggggcgggtttaaatagacccatgggcagcgggccccgcccgctgtataaccaccgcggtcggtggacctgtggggcaaacgcgtgcctatagcccttgggggcagccttgtgtggtgcaggcgacccctttactttcgtggcgcgtgccgccaccattacgtgcggccaaaacttacccttacccagagaatttaaacgcccctaagggggaaaacttttagaacatttaaccgtgcgtctctccgtggctgttcaccccataccgccgtgcaaatatgtggccctggggccggaccgtgggaagaaaattttggtgcggctcaacccggcagatatacgggattttaggtgaacaacctttttttttcccgcggggctcctctgttttataataatggggcagcgactgacatccatagacacatgcagcatcaacaacgaccacctgaacgccaaaacaatacctgccacagaaccatgctacgatcatcacaccggcgggactgaaccaccaccgaggccagccatcaatcatcaatcgacgcgagcacgaggcacgcacgatcatgcgcgactaccgcgacgagattcactacgcatgaccacagcagacgatagcacccaatcgagatccgacctccgacacgact

SEQ ID NO: 437521 - DNA, 1336 bp, Homo sapiens
tttaatgtaaagtaaaagctataaagcagtatttttttggccatttgtcaagaccggccccgccctccggagccggacgctgcgggaggcccgggagcggcagtggaaccgactcccagaactccggacgtgtgcggcgcagtgagtcgcagccatgttcctggttaactcgttcttgaagggcggcggcggcggcggcgggggaggcgggggcctgggtgggggcctgggaaatgtgcttgcccctggctctaggacactctaacaagctctgtccacgggtctccccattcccaccaggccctgcacacacccactccgtaacctctcccctgtacctgtgccaagcctagcacttgtgatgcctccatgccccgagggccctctctcagttctgggaggatgactccagtccctgcacgccctggcacacccttcacggttgctacccaggcggccaagctccagaccgtgccagacccaggtgccccagtgcctttgtctatattctgctcccagcctgccaggcccaggaggaaataaacatgccccagttgctgatctctaaaaaaaaaaaaaaaaaaaaaaaaaaaaggggggggcggccaaaaattctccctctgggggggccccaatttttacgcggtcccccgggttttttggttccaagggggccccttattgggggcgggtttaaatagacccatgggcagcgggccccgcccgctgtataaccaccgcggtcggtggacctgtggggcaaacgcgtgcctatagcccttgggggcagccttgtgtggtgcaggcgacccctttactttcgtggcgcgtgccgccaccattacgtgcggccaaaacttacccttacccagagaatttaaacgcccctaagggggaaaacttttagaacatttaaccgtgcgtctctccgtggctgttcaccccataccgccgtgcaaatatgtggccctggggccggaccgtgggaagaaaattttggtgcggctcaacccggcagatatacgggattttaggtgaacaacctttttttttcccgcggggctcctctgttttataataatggggcagcgactgacatccatagacacatgcagcatcaacaacgaccacctgaacgccaaaacaatacctgccacagaaccatgctacgatcatcacaccggcgggactgaaccaccaccgaggccagccatcaatcatcaatcgacgcgagcacgaggcacgcacgatcatgcgcgactaccgcgacgagattcactacgcatgaccacagcagacgatagcacccaatcgagatccgacctccgacacgact

SEQ ID NO: 437522 - DNA, 842 bp, Homo sapiens
tttaatgtaaagtaaaagctataaagcagtatttttttggccatttgtcaagaccggccccgccctccggagccggacgctgcgggaggcccgggagcggcagtggaaccgactcccagaactccggacgtgtgcggcgcagtgagtcgcagccatgttcctggttaactcgttcttgaagggcggcggcggcggcggcgggggaggcgggggcctgggtgggggcctgggaaatgtgcttggaggcctgatcagcggggccgggggcggcggcggcggcggcggcggcggcggcggtggtggaggcggcggtggcggtggaacggccatgcgcatcctaggcggagtcatcagcgccatcagcgaggcggctgcgcagtacaacccggagcccccgcccccacgcacacattactccaacattgaggccaacgagagtgaggaggtccggcagttccggagactctttgcccagctggctggagatgacatggaggtcagcgccacagaactcatgaacattctcaataaggttgtgacacgacaccctgatctgaagactgatggttttggcattgacacatgtcgcagcatggtggccgtgatggatagcgacaccacaggcaagctgggctttgaggaattcaagtacttgtggaacaacatcaaaaggtggcaggccatatacaaacagttcgacactgaccgatcagggaccatttgcagtagtgaactcccaggtgcctttgaggcagcagttccacctgaatgagcagctgatgaagttgtcaaaatccatgttcccactttcatctgagtagcgtcggatgatcatgtataga

SEQ ID NO: 437523 - DNA, 730 bp, Homo sapiens
tttaatgtaaagtaaaagctataaagcagtatttttttggccatttgtcaagaccggccccgccctccggagccggacgctgcgggaggcccgggagcggcagtggaaccgactcccagaactccggacgtgtgcggcgcagtgagtcgcagccatgttcctggttaactcgttcttgaagggcggcggcggcggcggcgggggaggcgggggcctgggtgggggcctgggaaatgtgcttggaggcctgatcagcggggccgggggcggcggcggcggcggcggcggcggcggcggtggtggaggcggcggtggcggtggaacggccatgcgcatcctaggcggagtcatcagcgccatcagcgaggcggctgcgcagtacaacccggagcccccgcccccacgcacacattactccaacattgaggccaacgagagtgaggaggtccggcagttccggagactctttgcccagctggctggagatgacatggaggtcagcgccacagaactcatgaacattctcaataaggttgtgacacgacaccctgatctgaagactgatggttttggcattgacacatgtcgcagcatggtggccgtgatggatagcgacaccacaggcaagctgggctttgaggaattcaagtacttgtggaacaacatcaaaaggtggcaggcatatacaaacagttcgacactaatttctctcgaccaatggacgagctga

SEQ ID NO: 437524 - DNA, 954 bp, Homo sapiens
  misc_feature (19)..(19): n is a, c, g, or t
  misc_feature (27)..(27): n is a, c, g, or t
  misc_feature (30)..(30): n is a, c, g, or t
gactactactactaaattngcggccgntcngactacccagcttctcaacatccagggcccaatttgccctgcctggagttccccctggctctaggacactctaacaagctctgtccacgggtctccccattcccaccaggccctgcacacacccactccgtaacctctcccctgtacctgtgccaagcctagcacttgtgatgcctccatgccccgagggccctctctcagttctgggaggatgactccagtccctgcacgccctggcacacccttcacggttgctacccaggcggccaagctccagaccgtgccagacccaggtgccccagtgcctttgtctatattctgctcccagcctgccaggcccaggaggaaataaacatgccccagttgctgatctctaaaaaacgagaaacaaaaacaaaagacaaacgacacaaaaatttttgggtgaggcgagacattacgaccccgagaaaaaggttatttaaaacacacactatcgttatggggcgcggcgggaccccacatgatagagtcataaggtcacacacaggagcgaccataagagacggagctaaccccaaagagagaacaccccacgggacaaaagacaacaggcgggttgtgggtattccatcacaccgaatataaaaaaagcgcgcgcggtgggacaacccgagagctgttggtgaacaacaactcccaagatggggaaccaacgagagggccgaaaggggagtcacaacacaggggagccacaagagagagctctagaatacaaatatccccggacgcgggtgacagacgagcaagaccaaacaacacaacatacgaaacagcaacgaaagctgtagacggacgcaagcgaaagagagaagacaaagaacagacacgaacaagccagaaaagcacacagagaacgaacagagcaacgaacacaaagacacg

SEQ ID NO: 437525 - DNA, 1555 bp, Homo sapiens
  misc_feature (1482)..(1482): n is a, c, g, or t
  misc_feature (1485)..(1485): n is a, c, g, or t
  misc_feature (1487)..(1487): n is a, c, g, or t
tttaatgtaaagtaaaagctataaagcagtatttttttggccatttgtcaagaccggccccgccctccggagccggacgctgcgggaggcccgggagcggcagtggaaccgactcccagaactccggacgtgtgcggcgcagtgagtcgcagccatgttcctggttaactcgttcttgaagggcggcggcggcggcggcgggggaggcgggggcctgggtgggggcctgggaaatgtgcttggaggcctgatcagcggggccgggggcggcggcggcggcggcggcggcggcggcggtggtggaggcggcggtggcggtggaacggccatgcgcatcctaggcggagtcatcagcgccatcagcgaggcggctgcgcagtacaacccggagcccccgcccccacgcacacattactccaacattgaggccaacgagagtgaggaggtccggcagttccggagactctttgcccagctggctggagatgacatggaggtcagcgccacagaactcatgaacattctcaataaggttgtgacacgacaccctgatctgaagactgatggttttggcattgacacatgtcgcagcatggtggccgtgatggatagcgacaccacaggcaagctgggctttgaggaattcaagtacttgtggaacaacatcaaaaggtggcaggccatatacaaacagttcgacactgaccgatcagggaccatttgcagtagtgaactcccaggtgcctttgaggcagcagggttccacctgaatgagcatctctataacatgatcatccgacgctactcagatgaaagtgggaacatggattttgacaacttcatcagctgcttggtcaggctggacgccatgttccgtgccttcaaatctcttgacaaagatggcactggacaaatccaggtgaacatccaggagtggctgcagctgactatgtattcctgaactggagccccagacccgccccctcaccgccttgctataggagtcacctggagcctcggtctctcccagggccgatcctgtctgcagtcacatctttgtggggcctgctgacccacaagcttttgttctctcagtacttgttacccagcttctcaacatccagggcccaatttgccctgcctggagttccccctggctctaggacactctaacaagctctgtccacgggtctccccattcccaccaggccctgcacacacccactccgtaacctctcccctgtacctgtgccaagcctagcacttgtgatgcctccatgccccgagggccctctctcagttctgggaggatgactccagtccctgcacgccctggcacacccttcacggttgctacccaggcggccaagctccagaccgtgccagacccaggtgccccagtgcctttgtctatattctgctcccagcctgccaggcccaggaggaaataaacatgccccagttgctgatctctaaaaacanaananaaaaacccgagaaaaacacgggcaaaaagacaaacagaagacaggtgcaccccttgcaagggaaacgg

SEQ ID NO: 437526 - DNA, 2169 bp, Homo sapiens
  misc_feature (20)..(20): n is a, c, g, or t
  misc_feature (25)..(25): n is a, c, g, or t
tggctaggtcgaggcctggntttanatcggcaccgaggctccagaactccggacgtgtgcggcgcagtgagtcgcagccatgttcctggttaactcgttcttgaagggcggcggcggcggcggcgggggaggcgggggcctgggtgggggcctgggaaatgtgcttggaggcctgatcagcggggccgggggcggcggcggcggcggcggcggcggcggcggtggtggaggcggcggtggcggtggaacggccatgcgcatcctaggcggagtcatcagcgccatcagcgaggcggctgcgcagtacaacccggagcccccgcccccacgcacacattactccaacattgaggccaacgagagtgaggaggtccggcagttccggagactctttgcccagctggctggagatgacatggaggtcagcgccacagaactcatgaacattctcaataaggttgtgacacgacaccctgatctgaagactgatggttttggcattgacacatgtcgcagcatggtggccgtgatggatagcgacaccacaggcaagctgggctttgaggaattcaagtacttgtggaacaacatcaaaaggtggcaggccatatacaaacagttcgacactgaccgatcagggaccatttgcagtagtgaactcccaggtgcctttgaggcagcagggttccacctgaatgagcatctctataacatgatcatccgacgctactcagatgaaagtgggaacatggattttgacaacttcatcagctgcttggtcaggctggacgccatgttccgtgccttcaaatctcttgacaaagatggcactggacaaatccaggtgaacatccaggagtggctgcagctgactatgtattcctgaactggagccccagacccgccccctcaccgccttgctataggagtcacctggagcctcggtctctcccagggccgatcctgtctgcagtcacatctttgtggggcctgctgacccacaagcttttgttctctcagtacttgttacccagcttctcaacatccagggcccaatttgccctgcctggagttccccctggctctaggacactctaacaagctctgtccacgggtctccccattcccaccaggccctgcacacacccactccgtaacctctcccctgtacctgtgccaagcctagcacttgtgatgcctccatgccccgagggccctctctcagttctgggaggatgactccagtccctgcacgccctggcacacccttcacggttgctacccaggcggccaagctccagaccgtgccagacccaggtgccccagtgcctttgtctatattctgctcccagcctgccaggcccaggaggaaataaacatgccccagttgctgatctctaaaaaaaaaaaaaaaaaaaaaaaaaaaaggggggggcggccaaaaattctccctctgggggggccccaatttttacgcggtcccccgggttttttggttccaagggggccccttattgggggcgggtttaaatagacccatgggcagcgggccccgcccgctgtataaccaccgcggtcggtggacctgtggggcaaacgcgtgcctatagcccttgggggcagccttgtgtggtgcaggcgacccctttactttcgtggcgcgtgccgccaccattacgtgcggccaaaacttacccttacccagagaatttaaacgcccctaagggggaaaacttttagaacatttaaccgtgcgtctctccgtggctgttcaccccataccgccgtgcaaatatgtggccctggggccggaccgtgggaagaaaattttggtgcggctcaacccggcagatatacgggattttaggtgaacaacctttttttttcccgcggggctcctctgttttataataatggggcagcgactgacatccatagacacatgcagcatcaacaacgaccacctgaacgccaaaacaatacctgccacagaaccatgctacgatcatcacaccggcgggactgaaccaccaccgaggccagccatcaatcatcaatcgacgcgagcacgaggcacgcacgatcatgcgcgactaccgcgacgagattcactacgcatgaccacagcagacgatagcacccaatcgagatccgacctccgacacgact

SEQ ID NO: 437527 - DNA, 2156 bp, Homo sapiens
tttaatgtaaagtaaaagctataaagcagtatttttttggccatttgtcaagaccggccccgccctccggagccggacgctgcgggaggcccgggagcggcagtggaaccgactcccagaactccggacgtgtgcggcgcagtgagtcgcagccatgttcctggttaactcgttcttgaagggggcggcggcggcggcggcggcggcggtggtggaggcggcggtggcggtggaacggccatgcgcatcctaggcggagtcatcagcgccatcagcgaggcggctgcgcagtacaacccggagcccccgcccccacgcacacattactccaacattgaggccaacgagagtgaggaggtccggcagttccggagactctttgcccagctggctggagatgacatggaggtcagcgccacagaactcatgaacattctcaataaggttgtgacacgacaccctgatctgaagactgatggttttggcattgacacatgtcgcagcatggtggccgtgatggatagcgacaccacaggcaagctgggctttgaggaattcaagtacttgtggaacaacatcaaaaggtggcaggccatatacaaacagttcgacactgaccgatcagggaccatttgcagtagtgaactcccaggtgcctttgaggcagcagggttccacctgaatgagcatctctataacatgatcatccgacgctactcagatgaaagtgggaacatggattttgacaacttcatcagctgcttggtcaggctggacgccatgttccgtgccttcaaatctcttgacaaagatggcactggacaaatccaggtgaacatccaggagtggctgcagctgactatgtattcctgaactggagccccagacccgccccctcaccgccttgctataggagtcacctggagcctcggtctctcccagggccgatcctgtctgcagtcacatctttgtggggcctgctgacccacaagcttttgttctctcagtacttgttacccagcttctcaacatccagggcccaatttgccctgcctggagttccccctggctctaggacactctaacaagctctgtccacgggtctccccattcccaccaggccctgcacacacccactccgtaacctctcccctgtacctgtgccaagcctagcacttgtgatgcctccatgccccgagggccctctctcagttctgggaggatgactccagtccctgcacgccctggcacacccttcacggttgctacccaggcggccaagctccagaccgtgccagacccaggtgccccagtgcctttgtctatattctgctcccagcctgccaggcccaggaggaaataaacatgccccagttgctgatctctaaaaaaaaaaaaaaaaaaaaaaaaaaaaggggggggcggccaaaaattctccctctgggggggccccaatttttacgcggtcccccgggttttttggttccaagggggccccttattgggggcgggtttaaatagacccatgggcagcgggccccgcccgctgtataaccaccgcggtcggtggacctgtggggcaaacgcgtgcctatagcccttgggggcagccttgtgtggtgcaggcgacccctttactttcgtggcgcgtgccgccaccattacgtgcggccaaaacttacccttacccagagaatttaaacgcccctaagggggaaaacttttagaacatttaaccgtgcgtctctccgtggctgttcaccccataccgccgtgcaaatatgtggccctggggccggaccgtgggaagaaaattttggtgcggctcaacccggcagatatacgggattttaggtgaacaacctttttttttcccgcggggctcctctgttttataataatggggcagcgactgacatccatagacacatgcagcatcaacaacgaccacctgaacgccaaaacaatacctgccacagaaccatgctacgatcatcacaccggcgggactgaaccaccaccgaggccagccatcaatcatcaatcgacgcgagcacgaggcacgcacgatcatgcgcgactaccgcgacgagattcactacgcatgaccacagcagacgatagcacccaatcgagatccgacctccgacacgact

SEQ ID NO: 437528 - DNA, 2154 bp, Homo sapiens
tttaatgtaaagtaaaagctataaagcagtatttttttggccatttgtcaagaccggccccgccctccggagccggacgctgcgggaggcccgggagcggcagtggaaccgactcccagaactccggacgtgtgcggcgcagtgagtcgcagccatgttcctggttaactcgttcttgaagggcggcggcggcggcggcgggggaggcgggggcctgggtgggggcctgggaaatgtgcttggaggcctgatcagcggggccgggggcggcggcggcggcggcggcggcggcggcggtggtggaggcggcggtggcggtggaacggccatgcgcatcctaggcggagtcatcagcgccatcagcgaggcggctgcgcagtacaacccggagcccccggacatggaggtcagcgccacagaactcatgaacattctcaataaggttgtgacacgacaccctgatctgaagactgatggttttggcattgacacatgtcgcagcatggtggccgtgatggatagcgacaccacaggcaagctgggctttgaggaattcaagtacttgtggaacaacatcaaaaggtggcaggccatatacaaacagttcgacactgaccgatcagggaccatttgcagtagtgaactcccaggtgcctttgaggcagcagggttccacctgaatgagcatctctataacatgatcatccgacgctactcagatgaaagtgggaacatggattttgacaacttcatcagctgcttggtcaggctggacgccatgttccgtgccttcaaatctcttgacaaagatggcactggacaaatccaggtgaacatccaggagtggctgcagctgactatgtattcctgaactggagccccagacccgccccctcaccgccttgctataggagtcacctggagcctcggtctctcccagggccgatcctgtctgcagtcacatctttgtggggcctgctgacccacaagcttttgttctctcagtacttgttacccagcttctcaacatccagggcccaatttgccctgcctggagttccccctggctctaggacactctaacaagctctgtccacgggtctccccattcccaccaggccctgcacacacccactccgtaacctctcccctgtacctgtgccaagcctagcacttgtgatgcctccatgccccgagggccctctctcagttctgggaggatgactccagtccctgcacgccctggcacacccttcacggttgctacccaggcggccaagctccagaccgtgccagacccaggtgccccagtgcctttgtctatattctgctcccagcctgccaggcccaggaggaaataaacatgccccagttgctgatctctaaaaaaaaaaaaaaaaaaaaaaaaaaaaggggggggcggccaaaaattctccctctgggggggccccaatttttacgcggtcccccgggttttttggttccaagggggccccttattgggggcgggtttaaatagacccatgggcagcgggccccgcccgctgtataaccaccgcggtcggtggacctgtggggcaaacgcgtgcctatagcccttgggggcagccttgtgtggtgcaggcgacccctttactttcgtggcgcgtgccgccaccattacgtgcggccaaaacttacccttacccagagaatttaaacgcccctaagggggaaaacttttagaacatttaaccgtgcgtctctccgtggctgttcaccccataccgccgtgcaaatatgtggccctggggccggaccgtgggaagaaaattttggtgcggctcaacccggcagatatacgggattttaggtgaacaacctttttttttcccgcggggctcctctgttttataataatggggcagcgactgacatccatagacacatgcagcatcaacaacgaccacctgaacgccaaaacaatacctgccacagaaccatgctacgatcatcacaccggcgggactgaaccaccaccgaggccagccatcaatcatcaatcgacgcgagcacgaggcacgcacgatcatgcgcgactaccgcgacgagattcactacgcatgaccacagcagacgatagcacccaatcgagatccgacctccgacacgact

SEQ ID NO: 437529 - DNA, 2186 bp, Homo sapiens
tttaatgtaaagtaaaagctataaagcagtatttttttggccatttgtcaagaccggccccgccctccggagccggacgctgcgggaggcccgggagcggcagtggaaccgactcccagaactccggacgtgtgcggcgcagtgagtcgcagccatgttcctggttaactcgttcttgaagggcggcggcggcggcggcgggggaggcgggggcctgggtgggggcctgggaaatgtgcttggaggcctgatcagcggggccgggggcggcggcggcggcggcggcggcggcggcggtggtggaggcggcggtggcggtggaacggccatgcgcatcctaggcggagtcatcagcgccatcagcgaggcggctgcgcagtacaacccggagcccccgcccccacgcacacattactccaacattgaggccaacgagagtgaggaggtccggcagttccggagactctttgcccagctggctggagatgacatggaggtcagcgccacagaactcatgaacattctcaataaggttgtgacacgacaccctgatctgaagactgatggttttggcattgacacatgtcgcagcatggtggccgtgatggatagcgacaccacaggcaagctgggctttgaggaattcaagtacttgtggaacaacatcaaaaggtggcaggccatatacaaacagttcgacactgaccgatcagggaccatttgcagtagtgaactcccaggtgcctttgaggcagcagggttccacctgaatgagcatctctataacatgatcatccgacgctactcagatgaaagtgggaacatggattttgacaacttcatcagctgcttggtcaggctggacgccatgttccgtgccttcaaatctcttgacaaagatggcactggacaaatccaggtgaacatccaggagtggctgcagctgactatgtattcctgaactggagccccagacccgccccctcaccgccttgctataggagtcacctggagcctcggtctctcccagggccgatcctgtctgcagtcacatctttgtggggcctgctgacccacaagcttttgttctctcagtacttgttacccagcttctcaacatccagggcccaatttgccctgcctggagttccccctggctctaggacactctaacaagctctgtccacgggtctccccattcccaccaggccctgcacacacccactccgtaacctctcccctttctgggaggatgactccagtccctgcacgccctggcacacccttcacggttgctacccaggcggccaagctccagaccgtgccagacccaggtgccccagtgcctttgtctatattctgctcccagcctgccaggcccaggaggaaataaacatgccccagttgctgatctctaaaaaaaaaaaaaaaaaaaaaaaaaaaaggggggggcggccaaaaattctccctctgggggggccccaatttttacgcggtcccccgggttttttggttccaagggggccccttattgggggcgggtttaaatagacccatgggcagcgggccccgcccgctgtataaccaccgcggtcggtggacctgtggggcaaacgcgtgcctatagcccttgggggcagccttgtgtggtgcaggcgacccctttactttcgtggcgcgtgccgccaccattacgtgcggccaaaacttacccttacccagagaatttaaacgcccctaagggggaaaacttttagaacatttaaccgtgcgtctctccgtggctgttcaccccataccgccgtgcaaatatgtggccctggggccggaccgtgggaagaaaattttggtgcggctcaacccggcagatatacgggattttaggtgaacaacctttttttttcccgcggggctcctctgttttataataatggggcagcgactgacatccatagacacatgcagcatcaacaacgaccacctgaacgccaaaacaatacctgccacagaaccatgctacgatcatcacaccggcgggactgaaccaccaccgaggccagccatcaatcatcaatcgacgcgagcacgaggcacgcacgatcatgcgcgactaccgcgacgagattcactacgcatgaccacagcagacgatagcacccaatcgagatccgacctccgacacgact

SEQ ID NO: 437530 - DNA, 1546 bp, Homo sapiens
aacggctagtacgaggccgtgtgaatcggccgaggctcccaggtgcctttgaggcagcagggttccacctgaatgagcatctctataacatgatcatccgacgctactcagatgaaagtgggaacatggattttgacaacttcatcagctgcttggtcaggctggacgccatgttccgtgccttcaaatctcttgacaaagatggcactggacaaatccaggtgaacatccaggagtggctgcagctgactatgtattcctgaactggagccccagacccgccccctcaccgccttgctataggagtcacctggagcctcggtctctcccagggccgatcctgtctgcagtcacatctttgtggggcctgctgacccacaagcttttgttctctcagtacttgttacccagcttctcaacatccagggcccaatttgccctgcctggagttccccctggctctaggacactctaacaagctctgtccacgggtctccccattcccaccaggccctgcacacacccactccgtaacctctcccctgtacctgtgccaagcctagcacttgtgatgcctccatgccccgagggccctctctcagttctgggaggatgactccagtccctgcacgccctggcacacccttcacggttgctacccaggcggccaagctccagaccgtgccagacccaggtgccccagtgcctttgtctatattctgctcccagcctgccaggcccaggaggaaataaacatgccccagttgctgatctctaaaaaaaaaaaaaaaaaaaaaaaaaaaaggggggggcggccaaaaattctccctctgggggggccccaatttttacgcggtcccccgggttttttggttccaagggggccccttattgggggcgggtttaaatagacccatgggcagcgggccccgcccgctgtataaccaccgcggtcggtggacctgtggggcaaacgcgtgcctatagcccttgggggcagccttgtgtggtgcaggcgacccctttactttcgtggcgcgtgccgccaccattacgtgcggccaaaacttacccttacccagagaatttaaacgcccctaagggggaaaacttttagaacatttaaccgtgcgtctctccgtggctgttcaccccataccgccgtgcaaatatgtggccctggggccggaccgtgggaagaaaattttggtgcggctcaacccggcagatatacgggattttaggtgaacaacctttttttttcccgcggggctcctctgttttataataatggggcagcgactgacatccatagacacatgcagcatcaacaacgaccacctgaacgccaaaacaatacctgccacagaaccatgctacgatcatcacaccggcgggactgaaccaccaccgaggccagccatcaatcatcaatcgacgcgagcacgaggcacgcacgatcatgcgcgactaccgcgacgagattcactacgcatgaccacagcagacgatagcacccaatcgagatccgacctccgacacgact

SEQ ID NO: 437531 - DNA, 2199 bp, Homo sapiens
tttaatgtaaagtaaaagctataaagcagtatttttttggccatttgtcaagaccggccccgccctccggagccggacgctgcgggaggcccgggagcggcagtggaaccgactcccagaactccggacgtgtgcggcgcagtgagtcgcagccatgttcctggttaactcgttcttgaagggcggcggcggcggcggcgggggaggcgggggcctgggtgggggcctgggaaatgtgcttggaggcctgatcagcggggccgggggcggcggcggcggcggcggcggcggcggcggtggtggaggcggcggtggcggtggaacggccatgcgcatcctaggcggagtcatcagcgccatcagcgaggcggctgcgcagtacaacccggagcccccgcccccacgcacacattactccaacattgaggccaacgagagtgaggaggtccggcagttccggagactctttgcccagctggctggagatgacatggaggtcagcgccacagaactcatgaacattctcaataaggttgtgacacgacaccctgatctgaagactgatggttttggcattgacacatgtcgcagcatggtggccgtgatggatagcgacaccacaggcaagctgggctttgaggaattcaagtacttgtggaacaacatcaaaaggtggcaggccatatacaaacagttcgacactgaccgatcagggaccatttgcagtagtgaactcccaggtgcctttgaggcagcagactcagatgaaagtgggaacatggattttgacaacttcatcagctgcttggtcaggctggacgccatgttccgtgccttcaaatctcttgacaaagatggcactggacaaatccaggtgaacatccaggagtggctgcagctgactatgtattcctgaactggagccccagacccgccccctcaccgccttgctataggagtcacctggagcctcggtctctcccagggccgatcctgtctgcagtcacatctttgtggggcctgctgacccacaagcttttgttctctcagtacttgttacccagcttctcaacatccagggcccaatttgccctgcctggagttccccctggctctaggacactctaacaagctctgtccacgggtctccccattcccaccaggccctgcacacacccactccgtaacctctcccctgtacctgtgccaagcctagcacttgtgatgcctccatgccccgagggccctctctcagttctgggaggatgactccagtccctgcacgccctggcacacccttcacggttgctacccaggcggccaagctccagaccgtgccagacccaggtgccccagtgcctttgtctatattctgctcccagcctgccaggcccaggaggaaataaacatgccccagttgctgatctctaaaaaaaaaaaaaaaaaaaaaaaaaaaaggggggggcggccaaaaattctccctctgggggggccccaatttttacgcggtcccccgggttttttggttccaagggggccccttattgggggcgggtttaaatagacccatgggcagcgggccccgcccgctgtataaccaccgcggtcggtggacctgtggggcaaacgcgtgcctatagcccttgggggcagccttgtgtggtgcaggcgacccctttactttcgtggcgcgtgccgccaccattacgtgcggccaaaacttacccttacccagagaatttaaacgcccctaagggggaaaacttttagaacatttaaccgtgcgtctctccgtggctgttcaccccataccgccgtgcaaatatgtggccctggggccggaccgtgggaagaaaattttggtgcggctcaacccggcagatatacgggattttaggtgaacaacctttttttttcccgcggggctcctctgttttataataatggggcagcgactgacatccatagacacatgcagcatcaacaacgaccacctgaacgccaaaacaatacctgccacagaaccatgctacgatcatcacaccggcgggactgaaccaccaccgaggccagccatcaatcatcaatcgacgcgagcacgaggcacgcacgatcatgcgcgactaccgcgacgagattcactacgcatgaccacagcagacgatagcacccaatcgagatccgacctccgacacgact

SEQ ID NO: 437532 - DNA, 2089 bp, Homo sapiens
tttaatgtaaagtaaaagctataaagcagtatttttttggccatttgtcaagaccggccccgccctccggagccggacgctgcgggaggcccgggagcggcagtggaaccgactcccagaactccggacgtgtgcggcgcagtgagtcgcagccatgttcctggttaactcgttcttgaagggcggcggcggcggcggcgggggaggcgggggcctgggtgggggcctgggaaatgtgcttggaggcctgatcagcggggccgggggcggcggcggcggcggcggcggcggcggcggtggtggaggcggcggtggcggtggaacggccatgcgcatcctaggcggagtcatcagcgccatcagcgaggcggctgcgcagtacaacccggagcccccgcccccacgcacacattactccaacattgaggccaacgagagtgaggaggtccggcagttccggagactctttgcccagctggctggagatgacatggaggtcagcgccacagaactcatgaacattctcaataaggttgtgacacgacaccctgatctgaagactgatggttttggcattgacacatgtcgcagcatggtggccgtgatggatagcgacaccacaggcaagctgggctttgaggaattcaagtacttgtggaacaacatcaaaaggtggcaggccatatacaaacagttcgacactgaccgatcagggaccatttgcagtagtgaactcccaggtgcctttgaggcagcagggttccacctgaatgagcatctctataacatgatcatccgacgctactcagatgaaagtgggaacatggattttgacaacttcatcagctgcttggtcaggctggacgccatgttccgtgccttcaaatctcttgacaaagatggcactggacaaatccaggtgaacatccaggagtggctgcagctgactatgtattcctgaactggagccccagacccgccccctcaccgccttgcccctggctctaggacactctaacaagctctgtccacgggtctccccattcccaccaggccctgcacacacccactccgtaacctctcccctgtacctgtgccaagcctagcacttgtgatgcctccatgccccgagggccctctctcagttctgggaggatgactccagtccctgcacgccctggcacacccttcacggttgctacccaggcggccaagctccagaccgtgccagacccaggtgccccagtgcctttgtctatattctgctcccagcctgccaggcccaggaggaaataaacatgccccagttgctgatctctaaaaaaaaaaaaaaaaaaaaaaaaaaaaggggggggcggccaaaaattctccctctgggggggccccaatttttacgcggtcccccgggttttttggttccaagggggccccttattgggggcgggtttaaatagacccatgggcagcgggccccgcccgctgtataaccaccgcggtcggtggacctgtggggcaaacgcgtgcctatagcccttgggggcagccttgtgtggtgcaggcgacccctttactttcgtggcgcgtgccgccaccattacgtgcggccaaaacttacccttacccagagaatttaaacgcccctaagggggaaaacttttagaacatttaaccgtgcgtctctccgtggctgttcaccccataccgccgtgcaaatatgtggccctggggccggaccgtgggaagaaaattttggtgcggctcaacccggcagatatacgggattttaggtgaacaacctttttttttcccgcggggctcctctgttttataataatggggcagcgactgacatccatagacacatgcagcatcaacaacgaccacctgaacgccaaaacaatacctgccacagaaccatgctacgatcatcacaccggcgggactgaaccaccaccgaggccagccatcaatcatcaatcgacgcgagcacgaggcacgcacgatcatgcgcgactaccgcgacgagattcactacgcatgaccacagcagacgatagcacccaatcgagatccgacctccgacacgact

SEQ ID NO: 437533 - DNA, 1691 bp, Homo sapiens
tttaatgtaaagtaaaagctataaagcagtatttttttggccatttgtcaagaccggccccgccctccggagccggacgctgcgggaggcccgggagcggcagtggaaccgactcccagaactccggacgtgtgcggcgcagtgagtcgcagccatgttcctggttaactcgttcttgaagggcggcggcggcggcggcgggggaggcgggggcctgggtgggggcctgggaaatgtgcttggaggcctgatcagcggggccgggggcggcggcggcggcggcggcggcggcggcggtggtggaggcggcggtggcggtggaacggccatgcgcatcctaggcggagtcatcagcgccatcagcgaggcggctgcgcagtacaacccggagcccccgcccccacgcacacattactccaacattgaggccaacgagagtgaggaggtccggcagttccggagactctttgcccagctggctggagatgacatggaggtcagcgccacagaactcatgaacattctcaataaggttgtgacacgacaccctgatctgaagactgatggttttggcattgacacatgtcgcagcatggtggccgtgatggatagcgacaccacaggcaagctgggctttgaggaattcaagtacttgtggaacaacatcaaaaggtggcaggccatatacaaacagttcgacactgaccgatcagggaccatttgcagtagtgaactcccaggtgcctttgaggcagcagggttccacctgaatgagcatctctataacatgatcatccgacgctactcagatgaaagtgggaacatggattttgacaacttcatcagctgcttggtcaggctggacgccatgttccctgccaggcccaggaggaaataaacatgccccagttgctgatctctaaaaaaaaaaaaaaaaaaaaaaaaaaaaggggggggcggccaaaaattctccctctgggggggccccaatttttacgcggtcccccgggttttttggttccaagggggccccttattgggggcgggtttaaatagacccatgggcagcgggccccgcccgctgtataaccaccgcggtcggtggacctgtggggcaaacgcgtgcctatagcccttgggggcagccttgtgtggtgcaggcgacccctttactttcgtggcgcgtgccgccaccattacgtgcggccaaaacttacccttacccagagaatttaaacgcccctaagggggaaaacttttagaacatttaaccgtgcgtctctccgtggctgttcaccccataccgccgtgcaaatatgtggccctggggccggaccgtgggaagaaaattttggtgcggctcaacccggcagatatacgggattttaggtgaacaacctttttttttcccgcggggctcctctgttttataataatggggcagcgactgacatccatagacacatgcagcatcaacaacgaccacctgaacgccaaaacaatacctgccacagaaccatgctacgatcatcacaccggcgggactgaaccaccaccgaggccagccatcaatcatcaatcgacgcgagcacgaggcacgcacgatcatgcgcgactaccgcgacgagattcactacgcatgaccacagcagacgatagcacccaatcgagatccgacctccgacacgact

SEQ ID NO: 437534 - DNA, 1526 bp, Homo sapiens
tttaatgtaaagtaaaagctataaagcagtatttttttggccatttgtcaagaccggccccgccctccggagccggacgctgcgggaggcccgggagcggcagtggaaccgactcccagaactccggacgtgtgcggcgcagtgagtcgcagccatgttcctggttaactcgttcttgaagggcggcggcggcggcggcgggggaggcgggggcctgggtgggggcctgggaaatgtgcttggaggcctgatcagcggggccgggggcggcggcggcggcggcggcggcggcggcggtggtggaggcggcggtggcggtggaacggccatgcgcatcctaggcggagtcatcagcgccatcagcgaggcggctgcgcagtacaacccggagcccccgcccccacgcacacattactccaacattgaggccaacccctggctctaggacactctaacaagctctgtccacgggtctccccattcccaccaggccctgcacacacccactccgtaacctctcccctgtacctgtgccaagcctagcacttgtgatgcctccatgccccgagggccctctctcagttctgggaggatgactccagtccctgcacgccctggcacacccttcacggttgctacccaggcggccaagctccagaccgtgccagacccaggtgccccagtgcctttgtctatattctgctcccagcctgccaggcccaggaggaaataaacatgccccagttgctgatctctaaaaaaaaaaaaaaaaaaaaaaaaaaaaggggggggcggccaaaaattctccctctgggggggccccaatttttacgcggtcccccgggttttttggttccaagggggccccttattgggggcgggtttaaatagacccatgggcagcgggccccgcccgctgtataaccaccgcggtcggtggacctgtggggcaaacgcgtgcctatagcccttgggggcagccttgtgtggtgcaggcgacccctttactttcgtggcgcgtgccgccaccattacgtgcggccaaaacttacccttacccagagaatttaaacgcccctaagggggaaaacttttagaacatttaaccgtgcgtctctccgtggctgttcaccccataccgccgtgcaaatatgtggccctggggccggaccgtgggaagaaaattttggtgcggctcaacccggcagatatacgggattttaggtgaacaacctttttttttcccgcggggctcctctgttttataataatggggcagcgactgacatccatagacacatgcagcatcaacaacgaccacctgaacgccaaaacaatacctgccacagaaccatgctacgatcatcacaccggcgggactgaaccaccaccgaggccagccatcaatcatcaatcgacgcgagcacgaggcacgcacgatcatgcgcgactaccgcgacgagattcactacgcatgaccacagcagacgatagcacccaatcgagatccgacctccgacacgact

SEQ ID NO: 437535 - DNA, 1270 bp, Homo sapiens
tttaatgtaaagtaaaagctataaagcagtatttttttggccatttgtcaagaccggccccgccctccggagccggacgctgcgggaggcccgggagcggcagtggaaccgactcccagaactccggacgtgtgcggcgcagtgagtcgcagccatgttcctggttaactcgttcttgaagggcggcggcggcggcggcgggggaggcgggggcctgggtgggggcctgggaaatgtgcttgcacacccactccgtaacctctcccctgtacctgtgccaagcctagcacttgtgatgcctccatgccccgagggccctctctcagttctgggaggatgactccagtccctgcacgccctggcacacccttcacggttgctacccaggcggccaagctccagaccgtgccagacccaggtgccccagtgcctttgtctatattctgctcccagcctgccaggcccaggaggaaataaacatgccccagttgctgatctctaaaaaaaaaaaaaaaaaaaaaaaaaaaaggggggggcggccaaaaattctccctctgggggggccccaatttttacgcggtcccccgggttttttggttccaagggggccccttattgggggcgggtttaaatagacccatgggcagcgggccccgcccgctgtataaccaccgcggtcggtggacctgtggggcaaacgcgtgcctatagcccttgggggcagccttgtgtggtgcaggcgacccctttactttcgtggcgcgtgccgccaccattacgtgcggccaaaacttacccttacccagagaatttaaacgcccctaagggggaaaacttttagaacatttaaccgtgcgtctctccgtggctgttcaccccataccgccgtgcaaatatgtggccctggggccggaccgtgggaagaaaattttggtgcggctcaacccggcagatatacgggattttaggtgaacaacctttttttttcccgcggggctcctctgttttataataatggggcagcgactgacatccatagacacatgcagcatcaacaacgaccacctgaacgccaaaacaatacctgccacagaaccatgctacgatcatcacaccggcgggactgaaccaccaccgaggccagccatcaatcatcaatcgacgcgagcacgaggcacgcacgatcatgcgcgactaccgcgacgagattcactacgcatgaccacagcagacgatagcacccaatcgagatccgacctccgacacgact

SEQ ID NO: 437536 - DNA, 601 bp, Homo sapiens
tttaatgtaaagtaaaagctataaagcagtatttttttggccatttgtcaagaccggccccgccctccggagccggacgctgcgggaggcccgggagcggcagtggaaccgactcccagaactccggacgtgtgcggcgcagtgagtcgcagccatgttcctggttaactcgttcttgaagggcggcggcggcggcggcgggggaggcgggggcctgggtgggggcctgggaaatgtgcttggaggcctgatcagcggggccgggggcggcggcggcggcggcggcggcggcggcggtggtggaggcggcggtggcggtggaacggccatgcgcatcctaggcggagtcatcagcgccatcagcgaggcggctgcgcagtacaacccggagcccccgcccccacgcacacattactccaacattgaggccaacgagagtgaggaggtccggcagttccggagactctttgcccagctggctggagatgacatggaggtcagcgccacagaactcatgaacattctcaataaggttgtgacacgacagcctgatctgaaggctgatggttttggccctatcgaggggatcctaaggtgctca

SEQ ID NO: 437537 - DNA, 836 bp, Homo sapiens
tttgtaaatgaaaagggcttattttattttattcttatactaaattttagaaggtatttttataaagaccctgaattgtgttacctctctgataggtcttagatacttttttcctctggaagatttataaattaataatttgataggctataatttaaagtatgactttaagttcaaattggggcctgtgaaattttgagagtggagaatccatttgggtaaagagaaaacactcaaaatacatttgtgatttgtaaagttgtttacagaatgattcaaaaactgcgtctgggtactcagagatccaagtctaagttaaattgtctgtgatacccacggctgtgctgtctccttctttcagttcactccggggtcaggttagctgcatccttagcctttggcatggaatgtgctttgatgaacaaatgtctcatcaaacagccaaaatggtagaacttgcgtactttgaggtcagacaccatgtcttaaccataattaaaagatcatgaaacaataaaaagtaggtgacaagatcacctgctggattcacctcaattctttaaagttacttctttgagggcatgcagcttgcaaagcccatgctttaaaaatgcactgtgattttctcatcccccaccccctgtcttagctgtatccaaagaaaatttttatccttatttttgtctgtggagtgagattttcttttcaagtgcttgggagctttccatggtgtcctgtggatgcttcgaaatgaagccctctctttttaaatcctttccttttcttagacagaattgcctcttataatgtcttcttttttactctcaaaaaaaaaa

SEQ ID NO: 437538 - DNA, 250 bp, Homo sapiens
ctttgagggcatgcagcttgcaaagcccatgctttaaaaatgcactgtgattttctcatcccccaccccctgtcttagctgtatccaaagaaaatttttatccttatttttgtctgtggagtgagattttcttttcaagtgcttgggagctttccatggtgtcctgtggatgcttcgaaatgaagccctctctttttaaatcctttccttttcttagacagaattgcctcttataatgtcttctttttta

SEQ ID NO: 437539 - DNA, 296 bp, Homo sapiens
gacaattttgcagatgaaaaattgctgattcattgaagaaaaaaaatggtttgcatttgttatttatttttatgatttactttaatggacagtttgtaaatgaaaagggcttattttattttattcttatactaaattttagaaggtatttttataaagaccctgaattgtgttacctctctgataggtcttagatacttttttcctctggaagatttataaattaataatttgataggctataatttaaagtatgactttaagttcaaattggggcctgtgaaattttgagagtg

SEQ ID NO: 437540 - DNA, 2007 bp, Homo sapiens
gccatcgcgccattcctagttaaggcggcacagggccgaggcgtagtgtgggtgactcctccgttccttgggtcccgtcgtctgtgatactgcagcgcagccatggcagaaccgcagcccccgtccggcggcctcacggacgaggccgccctcagttgctgctccgacgcggaccccagtaccaaggattttctattgcagcagaccatgctacgagtgaaggatcctaagaagtcactggatttttatactagagttcttggaatgacgctaatccaaaaatgtgattttcccattatgaagttttcactctacttcttggcttatgaggataaaaatgacatccctaaagaaaaagatgaaaaaatagcctgggcgctctccagaaaagctacacttgagctgacacacaattggggcactgaagatgatgagacccagagttaccacaatggcaattcagaccctcgaggattcggtcatattggaattgctgttcctgatgtatacagtgcttgtaaaaggtttgaagaactgggagtcaaatttgtgaagaaacctgatgatggtaaaatgaaaggcctggcatttattcaagatcctgatggctactggattgaaattttgaatcctaacaaaatggcaaccttaatgtagtgctgtgagaattctcctttgagatttcagaagaaaggaaacaatgtgattcaagatatttacataccagaagcatctaggactgatggatcactgtcccgattcaaattattcttcagtccatttccccttcctatttcagctgttccttttcacctaactgttcagtcattctggttttcaagcagtgctttatctcatgtccttgaatatagttgtgtaactttattttttaggtaataattagaacagttcccttcagaggctgcatttgccttcttctgccacctaaatattacttcccttcaaatctgcctttgaatcatcatttttaaaaaaaaattaacatgtttttgttgtagttatcttctggggtttcaattcctcagaaacaacttttttcacaacggaaaggaaagaacactagtgttctttcagtaaagtacaaagtgtttattttacaaaagagtaggtactcttgagagcaattcaaatcatgctgacaaggatactgatagaaaaagtgatttcttcttattataaagtacatttaaagttcaaggactaaccttatttatttgggaaaggggaggaggaaggaaatgatatggtacccagacactgggctaggctgcaactttatctcatttaatactcccagctgtcatgtgagaaagaaagcaggctaggcatgtgaaatcactttcatggattattaatggatttaagagggcatcaatcagctcaactcaagatttcataatcatttttagtatttagattgtgcctcaaagttgtagtacctcacaatacctccactggtttcctgttgtaaaaaccttcagtgagtttgaccattgtgctcttggctcttgggctggagtaccgtggtgagggagtaaacactagaagtctttagtacaaaactgctctagggacacctggtgattcctacacaagtgatgtttatatttctcataaagagtcttccctatcccaaggtcttcatgatgccagtagccatatatgataaattatgttcagtgataacttagttatcagaaatcagctcagtggtcttccccgccatgattcacatttgatgagtttttaaaaatcaaagtgattttgaaaatctctaatggctcagaaaataaaaacatccagtttgtggatgactatatttagatttctctagactctagtggaagacctttggaaaggccatgccaaccgtgcttgtactgctagaagcactttatgtttcctttttgggtgaaatggatttatgtgagtgctttaaacaaatagcaatacttatagactgaaataaaatgaaacttcaaataa

SEQ ID NO: 437541 - DNA, 806 bp, Homo sapiens
cggacgcgtgggtcgacccacgcgtcgcccacgcgtgggaaaggggaggaggaaggaaatgatatggtacccagacactgggctaggctgcaactttatctcatttaatactcccagctgtcatgtgagaaagaaagcaggctaggcatgtgaaatcactttcatggattattaatggatttaagagggcatcaatcagctcaactcaagatttcataatcatttttagtatttagattgtgcctcaaagttgtagtacctcacaatacctccactggtttcctgttgtaaaaaccttcagtgagtttgaccattgtgctcttggctcttgggctggagtaccgtggtgagggagtaaacactagaagtctttagtacaaaactgctctagggacacctggtgattcctacacaagtgatgtttatatttctcataaagagtcttccctatcccaaggtcttcatgatgccagtagccatatatgataaattatgttcagtgataacttagttatcagaaatcagctcagtggtcttccccgccatgattcacatttgatgagtttttaaaaatcaaagtgattttgaaaatctctaatggctcagaaaataaaaacatccagtttgtggatgactatatttagatttctctagactctagtggaagacctttggaaaggccatgccaaccgtgcttgtactgctagaagcactttatgtttcctttttgggtgaaatggatttatgtgagtgctttaaacaaatagcaatacttatagactgaaataaaatgaaacttcaaataa

SEQ ID NO: 437542 - DNA, 2055 bp, Homo sapiens
gccatcgcgccattcctagttaaggcggcacagggccgaggcgtagtgtgggtgactcctccgttccttgggtcccgtcgtctgtgatactgcagcgcagccatggcagaaccgcagcccccgtccggcggcctcacggacgaggccgccctcagttgctgctccgacgcggaccccagtaccaaggattttctattgcagcagaccatgctacgagtgaaggatcctaagaagtcactggatttttatactagagttcttggaatgacgctaatccaaaaatgtgattttcccattatgaagttttcactctacttcttggcttatgaggataaaaatgacatccctaaagaaaaagatgaaaaaatagcctgggcgctctccagaaaagctacacttgagctgacacacaattggggcactgaagatgatgagacccagagttaccacaatggcaattcagaccctcgaggattcggtcatattggaattgctgttcctgatgtatacagtgcttgtaaaaggtttgaagaactgggagtcaaatttgtgaagaaacctgatgatggtaaaatgaaaggcctggcatttattcaagatcctgatggctactggattgaaattttgaatcctaacaaaatggcaaccttaatgtagtgctgtgagaattctcctttgagatttcagaagaaaggaaacaatgtgattcaagatatttacataccagaagcatctaggactgatggatcactgtcccgattcaaattattcttcagtccatttccccttcctatttcagctgttccttttcacctaactgttcagtcattctggttttcaagcagtgctttatctcatgtcttgaataaagttacacaactatattcaaggacatgagataaagcactgcttgaatatagttgtgtaactttattttttaggtaataattagaacagttcccttcagaggctgcatttgccttcttctgccacctaaatattacttcccttcaaatctgcctttgaatcatcatttttaaaaaaaaattaacatgtttttgttgtagttatcttctggggtttcaattcctcagaaacaacttttttcacaacggaaaggaaagaacactagtgttctttcagtaaagtacaaagtgtttattttacaaaagagtaggtactcttgagagcaattcaaatcatgctgacaaggatactgatagaaaaagtgatttcttcttattataaagtacatttaaagttcaaggactaaccttatttatttgggaaaggggaggaggaaggaaatgatatggtacccagacactgggctaggctgcaactttatctcatttaatactcccagctgtcatgtgagaaagaaagcaggctaggcatgtgaaatcactttcatggattattaatggatttaagagggcatcaatcagctcaactcaagatttcataatcatttttagtatttagattgtgcctcaaagttgtagtacctcacaatacctccactggtttcctgttgtaaaaaccttcagtgagtttgaccattgtgctcttggctcttgggctggagtaccgtggtgagggagtaaacactagaagtctttagtacaaaactgctctagggacacctggtgattcctacacaagtgatgtttatatttctcataaagagtcttccctatcccaaggtcttcatgatgccagtagccatatatgataaattatgttcagtgataacttagttatcagaaatcagctcagtggtcttccccgccatgattcacatttgatgagtttttaaaaatcaaagtgattttgaaaatctctaatggctcagaaaataaaaacatccagtttgtggatgactatatttagatttctctagactctagtggaagacctttggaaaggccatgccaaccgtgcttgtactgctagaagcactttatgtttcctttttgggtgaaatggatttatgtgagtgctttaaacaaatagcaatacttatagactgaaataaaatgaaacttcaaataa

SEQ ID NO: 437543 - DNA, 2612 bp, Homo sapiens
  misc_feature (2612)..(2612): n is a, c, g, or t
gccatcgcgccattcctagttaaggcggcacagggccgaggcgtagtgtgggtgactcctccgttccttgggtcccgtcgtctgtgatactgcagcgcagccatggcagaaccgcagcccccgtccggcggcctcacggacgaggccgccctcagttgctgctccgacgcggaccccagtaccaaggattttctattgcagcagaccatgctacgagtgaaggatcctaagaagtcactggatttttatactagagttcttggaatgacgctaatccaaaaatgtgattttcccattatgaagttttcactctacttcttggcttatgaggataaaaatgacatccctaaagaaaaagatgaaaaaatagcctgggcgctctccagaaaagctacacttgagctgacacacaattggggcactgaagatgatgagacccagagttaccacaatggcaattcagaccctcgaggattcggtcatattggaattgctgttcctgatgtatacagtgcttgtaaaaggtttgaagaactgggagtcaaatttgtgaagaaacctgatgatggtaaaatgaaaggcctggcatttattcaagatcctgatggctactggattgaaattttgaatcctaacaaaatggcaaccttaatgtagtgctgtgagaattctcctttgagatttcagaagaaaggaaacaatgtgattcaagatatttacataccagaagcatctaggactgatggatcactgtcccgattcaaattattcttcagtccatttccccttcctatttcagctgttccttttcacctaactgttcagtcattctggttttcaagcagtgctttatctcatgtccttgaatatagttgtgtaactttattttttaggtaataattagaacagttcccttcagaggctgcatttgccttcttctgccacctaaatattacttcccttcaaatctgcctttgaatcatcatttttaaaaaaaaattaacatgtttttgttgtagttatcttctggggtttcaattcctcagaaacaacttttttcacaacggaaaggaaagaacactagtgttctttcagtaaagtacaaagtgtttattttacaaaagagtaggtactcttgagagcaattcaaatcatgctgacaaggatactgatagaaaaagtgatttcttcttattataaagtacatttaaagttcaaggactaaccttatttatttgggaaaggggaggaggaaggaaatgatatggtacccagacactgggctaggctgcaactttatctcatttaatactcccagctgtcatgtgagaaagaaagcaggctaggcatgtgaaatcactttcatggattattaatggatttaagagggcatcaatcagctcaactcaagatttcataatcatttttagtatttagattgtgcctcaaagttgtagtacctcacaatacctccactggtttcctgttgtaaaaaccttcagtgagtttgaccattgtgctcttggctcttgggctggagtaccgtggtgagggagtaaacactagaagtctttagtacaaaactgctctagggacacctggtgattcctacacaagtgatgtttatatttctcataaagagtcttccctatcccaaggtcttcatgatgccagtagccatatatgataaattatgttcagtgataacttagttatcagaaatcagctcagtggtcttccccgccatgattcacatttgatgagtttttaaaaatcaaagtgattttgaaaatctctaatggctcagaaaataaaaacatccagtttgtggatgactatatttagatttctctagactctagtggaagacctttggaaaggccatgccaaccgtgcttgtactgctagaagcactttatgtttcctttttgggtgaaatggatttatgtgagtgctttaaacaaatagcaatacttatagactgaaataaaatgaaacttcaaataaaaaaaaaaaaaaaaaaaaaaaaaaaaaaaaaaaagaggggggggcgcgccccaaaaattcccccgcggggggccccaatttcgcggttccccggttttttgtggttccaagggggccccctatataggaggagcgcgcgcgatttatatataaccgctagagggcgccactggggccgcgccgtttttaaaccaaacgccttcgtgagcctggggggagacaacccgtcgtgatcccgcttcggggacgactcttcggggagaaggagagccctttatacctccctggggcgggggcgacattatcttgggggaccaaattatcacactatcgccagagagaatatttttataagcgcgcccctaaagggcggcgacacctttttatcaaccacccttctctatcaacacgggcggtgtatctagcggggggtggtgtcacccaccccataaccgccgcgcgatatattattgccttaggcgcgcggttttgtgacaaacagcgcttttggcggcgccacacaccgggggagggctactagcgcattcttatggagacacacatttttttttatccccccgagggagcgcatgcgtagtacctan

SEQ ID NO: 437544 - DNA, 1938 bp, Homo sapiens
gccatcgcgccattcctagttaaggcggcacagggccgaggcgtagtgtgggtgactcctccgttccttgggtcccgtcgtctgtgatactgcagcgcagccatggcagaaccgcagcccccgtccggcggcctcacggacgaggccgccctcagttgctgctccgacgcggaccccagtaccaaggattttctattgcagcagaccatgctacgagtgaaggatcctaagaagtcactggatttttatactagagttcttggaatgacgctaatccaaaaatgtgattttcccattatgaagttttcactctacttcttggcttatgaggataaaaatgacatccctaaagaaaaagatgaaaaaatagcctgggcgctctccagaaaagctacacttgagctgacacacaattggggcactgaagatgatgagacccagagttaccacaatggcaattcagaccctcgaggattcggtcatattggaattgctgttcctgatgtatacagtgcttgtaaaaggtttgaagaactgggagtcaaatttgtgaagaaacctgatgatggtaaaatgaaaggcctggcatttattcaagatcctgatggctactggattgaaattttgaatcctaacaaaatggcaaccttaatgtagtgctgtgagaattctcctttgagatttcagaagaaaggaaacaatgtgattcaagatatttacataccagaagcatctaggactgatggatcactgtcccgattcaaattattcttcagtccatttccccttcctatttcagctgttccttttcacctaactgttcagtcattctggttttcaagcagtgctttatctcatgtccttgaatatagttgtgtaactttattttttaggtaataattagaacagttcccttcagaggctgcatttgccttcttctgccacctaaatattacttcccttcaaatctgcctttgaatcatcatttttaaaaaaaaattaacatgtttttgttgtagttatcttctggggtttcaattcctcagaaacaacttttttcacaacggaaaggaaagaacactagtgttctttcagtaaagtacaaagtgtttattttacaaaagagtaggtactcttgagagcaattcaaatcatgctgacaaggatagggaaaggggaggaggaaggaaatgatatggtacccagacactgggctaggctgcaactttatctcatttaatactcccagctgtcatgtgagaaagaaagcaggctaggcatgtgaaatcactttcatggattattaatggatttaagagggcatcaatcagctcaactcaagatttcataatcatttttagtatttagattgtgcctcaaagttgtagtacctcacaatacctccactggtttcctgttgtaaaaaccttcagtgagtttgaccattgtgctcttggctcttgggctggagtaccgtggtgagggagtaaacactagaagtctttagtacaaaactgctctagggacacctggtgattcctacacaagtgatgtttatatttctcataaagagtcttccctatcccaaggtcttcatgatgccagtagccatatatgataaattatgttcagtgataacttagttatcagaaatcagctcagtggtcttccccgccatgattcacatttgatgagtttttaaaaatcaaagtgattttgaaaatctctaatggctcagaaaataaaaacatccagtttgtggatgactatatttagatttctctagactctagtggaagacctttggaaaggccatgccaaccgtgcttgtactgctagaagcactttatgtttcctttttgggtgaaatggatttatgtgagtgctttaaacaaatagcaatacttatagactgaaataaaatgaaacttcaaataa

SEQ ID NO: 437545 - DNA, 1994 bp, Homo sapiens
accacgcgtcgcggacgcgtgggtcgcggacgcgtgggcgcacagggccgaggcgtagtgtgggtgactcctccgttccttgggtcccgtcgtctgtgatactgcagcgcagccatggcagaaccgcagcccccgccctcagttgctgctccgacgcggaccccagtaccaaggattttctattgcagcagaccatgctacgagtgaaggatcctaagaagtcactggatttttatactagagttcttggaatgacgctaatccaaaaatgtgattttcccattatgaagttttcactctacttcttggcttatgaggataaaaatgacatccctaaagaaaaagatgaaaaaatagcctgggcgctctccagaaaagctacacttgagctgacacacaattggggcactgaagatgatgagacccagagttaccacaatggcaattcagaccctcgaggattcggtcatattggaattgctgttcctgatgtatacagtgcttgtaaaaggtttgaagaactgggagtcaaatttgtgaagaaacctgatgatggtaaaatgaaaggcctggcatttattcaagatcctgatggctactggattgaaattttgaatcctaacaaaatggcaaccttaatgtagtgctgtgagaattctcctttgagatttcagaagaaaggaaacaatgtgattcaagatatttacataccagaagcatctaggactgatggatcactgtcccgattcaaattattcttcagtccatttccccttcctatttcagctgttccttttcacctaactgttcagtcattctggttttcaagcagtgctttatctcatgtccttgaatatagttgtgtaactttattttttaggtaataattagaacagttcccttcagaggctgcatttgccttcttctgccacctaaatattacttcccttcaaatctgcctttgaatcatcatttttaaaaaaaaattaacatgtttttgttgtagttatcttctggggtttcaattcctcagaaacaacttttttcacaacggaaaggaaagaacactagtgttctttcagtaaagtacaaagtgtttattttacaaaagagtaggtactcttgagagcaattcaaatcatgctgacaaggatactgatagaaaaagtgatttcttcttattataaagtacatttaaagttcaaggactaaccttatttatttgggaaaggggaggaggaaggaaatgatatggtacccagacactgggctaggctgcaactttatctcatttaatactcccagctgtcatgtgagaaagaaagcaggctaggcatgtgaaatcactttcatggattattaatggatttaagagggcatcaatcagctcaactcaagatttcataatcatttttagtatttagattgtgcctcaaagttgtagtacctcacaatacctccactggtttcctgttgtaaaaaccttcagtgagtttgaccattgtgctcttggctcttgggctggagtaccgtggtgagggagtaaacactagaagtctttagtacaaaactgctctagggacacctggtgattcctacacaagtgatgtttatatttctcataaagagtcttccctatcccaaggtcttcatgatgccagtagccatatatgataaattatgttcagtgataacttagttatcagaaatcagctcagtggtcttccccgccatgattcacatttgatgagtttttaaaaatcaaagtgattttgaaaatctctaatggctcagaaaataaaaacatccagtttgtggatgactatatttagatttctctagactctagtggaagacctttggaaaggccatgccaaccgtgcttgtactgctagaagcactttatgtttcctttttgggtgaaatggatttatgtgagtgctttaaacaaatagcaatacttatagactgaaataaaatgaaacttcaaataa

SEQ ID NO: 437546 - DNA, 1924 bp, Homo sapiens
gccatcgcgccattcctagttaaggcggcacagggccgaggcgtagtgtgggtgactcctccgttccttgggtcccgtcgtctgtgatactgcagcgcagccatggcagaaccgcagcccccgtccggcggcctcacggacgaggccgccctcagttgctgctccgacgcggaccccagtaccaaggctaatccaaaaatgtgattttcccattatgaagttttcactctacttcttggcttatgaggataaaaatgacatccctaaagaaaaagatgaaaaaatagcctgggcgctctccagaaaagctacacttgagctgacacacaattggggcactgaagatgatgagacccagagttaccacaatggcaattcagaccctcgaggattcggtcatattggaattgctgttcctgatgtatacagtgcttgtaaaaggtttgaagaactgggagtcaaatttgtgaagaaacctgatgatggtaaaatgaaaggcctggcatttattcaagatcctgatggctactggattgaaattttgaatcctaacaaaatggcaaccttaatgtagtgctgtgagaattctcctttgagatttcagaagaaaggaaacaatgtgattcaagatatttacataccagaagcatctaggactgatggatcactgtcccgattcaaattattcttcagtccatttccccttcctatttcagctgttccttttcacctaactgttcagtcattctggttttcaagcagtgctttatctcatgtccttgaatatagttgtgtaactttattttttaggtaataattagaacagttcccttcagaggctgcatttgccttcttctgccacctaaatattacttcccttcaaatctgcctttgaatcatcatttttaaaaaaaaattaacatgtttttgttgtagttatcttctggggtttcaattcctcagaaacaacttttttcacaacggaaaggaaagaacactagtgttctttcagtaaagtacaaagtgtttattttacaaaagagtaggtactcttgagagcaattcaaatcatgctgacaaggatactgatagaaaaagtgatttcttcttattataaagtacatttaaagttcaaggactaaccttatttatttgggaaaggggaggaggaaggaaatgatatggtacccagacactgggctaggctgcaactttatctcatttaatactcccagctgtcatgtgagaaagaaagcaggctaggcatgtgaaatcactttcatggattattaatggatttaagagggcatcaatcagctcaactcaagatttcataatcatttttagtatttagattgtgcctcaaagttgtagtacctcacaatacctccactggtttcctgttgtaaaaaccttcagtgagtttgaccattgtgctcttggctcttgggctggagtaccgtggtgagggagtaaacactagaagtctttagtacaaaactgctctagggacacctggtgattcctacacaagtgatgtttatatttctcataaagagtcttccctatcccaaggtcttcatgatgccagtagccatatatgataaattatgttcagtgataacttagttatcagaaatcagctcagtggtcttccccgccatgattcacatttgatgagtttttaaaaatcaaagtgattttgaaaatctctaatggctcagaaaataaaaacatccagtttgtggatgactatatttagatttctctagactctagtggaagacctttggaaaggccatgccaaccgtgcttgtactgctagaagcactttatgtttcctttttgggtgaaatggatttatgtgagtgctttaaacaaatagcaatacttatagactgaaataaaatgaaacttcaaataa

SEQ ID NO: 437547 - DNA, 1662 bp, Homo sapiens
cggacgcgtgggtcgacccacgcgtcgcccacgcgtcgcagaaaagctacacttgagctgacacacaattggggcactgaagatgatgagacccagagttaccacaatggcaattcagaccctcgaggattcggtcatattggaattgctgttcctgatgtatacagtgcttgtaaaaggtttgaagaactgggagtcaaatttgtgaagaaacctgatgatggtaaaatgaaaggcctggcatttattcaagatcctgatggctactggattgaaattttgaatcctaacaaaatggcaaccttaatgtagtgctgtgagaattctcctttgagatttcagaagaaaggaaacaatgtgattcaagatatttacataccagaagcatctaggactgatggatcactgtcccgattcaaattattcttcagtccatttccccttcctatttcagctgttccttttcacctaactgttcagtcattctggttttcaagcagtgctttatctcatgtccttgaatatagttgtgtaactttattttttaggtaataattagaacagttcccttcagaggctgcatttgccttcttctgccacctaaatattacttcccttcaaatctgcctttgaatcatcatttttaaaaaaaaattaacatgtttttgttgtagttatcttctggggtttcaattcctcagaaacaacttttttcacaacggaaaggaaagaacactagtgttctttcagtaaagtacaaagtgtttattttacaaaagagtaggtactcttgagagcaattcaaatcatgctgacaaggatactgatagaaaaagtgatttcttcttattataaagtacatttaaagttcaaggactaaccttatttatttgggaaaggggaggaggaaggaaatgatatggtacccagacactgggctaggctgcaactttatctcatttaatactcccagctgtcatgtgagaaagaaagcaggctaggcatgtgaaatcactttcatggattattaatggatttaagagggcatcaatcagctcaactcaagatttcataatcatttttagtatttagattgtgcctcaaagttgtagtacctcacaatacctccactggtttcctgttgtaaaaaccttcagtgagtttgaccattgtgctcttggctcttgggctggagtaccgtggtgagggagtaaacactagaagtctttagtacaaaactgctctagggacacctggtgattcctacacaagtgatgtttatatttctcataaagagtcttccctatcccaaggtcttcatgatgccagtagccatatatgataaattatgttcagtgataacttagttatcagaaatcagctcagtggtcttccccgccatgattcacatttgatgagtttttaaaaatcaaagtgattttgaaaatctctaatggctcagaaaataaaaacatccagtttgtggatgactatatttagatttctctagactctagtggaagacctttggaaaggccatgccaaccgtgcttgtactgctagaagcactttatgtttcctttttgggtgaaatggatttatgtgagtgctttaaacaaatagcaatacttatagactgaaataaaatgaaacttcaaataa

SEQ ID NO: 437548 - DNA, 1937 bp, Homo sapiens
ggcagtttcatcaatagaatggagatgttcacacctagcccatggagctgttttaagggtttaaatgaaatataaagtacttagcacaataaatgagcattattattattcttattattgttcttgtccagtacctgtatttactgtctctttagtctcgttaaaatcatactttggccatttgtcctttctatagttgaaaacttaatatttttgtagcaggggttaggccaattatgtaaagtagcatataaacgtggtaagatttcaaagatgttacttgcttttcagaatatctattccctaggacattgtagctatgttttccttccttttgtagcaattggggcactgaagatgatgagacccagagttaccacaatggcaattcagaccctcgaggattcggtcatattggaattgctgttcctgatgtatacagtgcttgtaaaaggtttgaagaactgggagtcaaatttgtgaagaaacctgatgatggtaaaatgaaaggcctggcatttattcaagatcctgatggctactggattgaaattttgaatcctaacaaaatggcaaccttaatgtagtgctgtgagaattctcctttgagatttcagaagaaaggaaacaatgtgattcaagatatttacataccagaagcatctaggactgatggatcactgtcccgattcaaattattcttcagtccatttccccttcctatttcagctgttccttttcacctaactgttcagtcattctggttttcaagcagtgctttatctcatgtccttgaatatagttgtgtaactttattttttaggtaataattagaacagttcccttcagaggctgcatttgccttcttctgccacctaaatattacttcccttcaaatctgcctttgaatcatcatttttaaaaaaaaattaacatgtttttgttgtagttatcttctggggtttcaattcctcagaaacaacttttttcacaacggaaaggaaagaacactagtgttctttcagtaaagtacaaagtgtttattttacaaaagagtaggtactcttgagagcaattcaaatcatgctgacaaggatactgatagaaaaagtgatttcttcttattataaagtacatttaaagttcaaggactaaccttatttatttgggaaaggggaggaggaaggaaatgatatggtacccagacactgggctaggctgcaactttatctcatttaatactcccagctgtcatgtgagaaagaaagcaggctaggcatgtgaaatcactttcatggattattaatggatttaagagggcatcaatcagctcaactcaagatttcataatcatttttagtatttagattgtgcctcaaagttgtagtacctcacaatacctccactggtttcctgttgtaaaaaccttcagtgagtttgaccattgtgctcttggctcttgggctggagtaccgtggtgagggagtaaacactagaagtctttagtacaaaactgctctagggacacctggtgattcctacacaagtgatgtttatatttctcataaagagtcttccctatcccaaggtcttcatgatgccagtagccatatatgataaattatgttcagtgataacttagttatcagaaatcagctcagtggtcttccccgccatgattcacatttgatgagtttttaaaaatcaaagtgattttgaaaatctctaatggctcagaaaataaaaacatccagtttgtggatgactatatttagatttctctagactctagtggaagacctttggaaaggccatgccaaccgtgcttgtactgctagaagcactttatgtttcctttttgggtgaaatggatttatgtgagtgctttaaacaaatagcaatacttatagactgaaataaaatgaaacttcaaataa

SEQ ID NO: 437549 - DNA, 1953 bp, Homo sapiens
gccatcgcgccattcctagttaaggcggcacagggccgaggcgtagtgtgggtgactcctccgttccttgggtcccgtcgtctgtgatactgcagcgcagccatggcagaaccgcagcccccgtccggcggcctcacggacgaggccgccctcagttgctgctccgacgcggaccccagtaccaaggattttctattgcagcagaccatgctacgagtgaaggatcctaagaagtcactggatttttatactagagttcttggaatgacgctaatccaaaaatgtgattttcccattatgaagttttcactctacttcttggcttatgaggataaaaatgacatccctaaagaaaaagatgaaaaaatagcctgggcgctctccagaaaagctacacttgagctgacacacaattggggcactgaagatgatgagacccagagttaccacaatggcaattcagaccctcgaggattcggtcatattggaattgctgttcctgatgtatacagtgcttgtaaaaggtttgaagaactgggagtcaaatttgtgaagaaacctgatgatggtaaaatgaaaggcctggcatttattcaagatcctgatggctactggattgaaattttgaatcctaacaaaggaaacaatgtgattcaagatatttacataccagaagcatctaggactgatggatcactgtcccgattcaaattattcttcagtccatttccccttcctatttcagctgttccttttcacctaactgttcagtcattctggttttcaagcagtgctttatctcatgtccttgaatatagttgtgtaactttattttttaggtaataattagaacagttcccttcagaggctgcatttgccttcttctgccacctaaatattacttcccttcaaatctgcctttgaatcatcatttttaaaaaaaaattaacatgtttttgttgtagttatcttctggggtttcaattcctcagaaacaacttttttcacaacggaaaggaaagaacactagtgttctttcagtaaagtacaaagtgtttattttacaaaagagtaggtactcttgagagcaattcaaatcatgctgacaaggatactgatagaaaaagtgatttcttcttattataaagtacatttaaagttcaaggactaaccttatttatttgggaaaggggaggaggaaggaaatgatatggtacccagacactgggctaggctgcaactttatctcatttaatactcccagctgtcatgtgagaaagaaagcaggctaggcatgtgaaatcactttcatggattattaatggatttaagagggcatcaatcagctcaactcaagatttcataatcatttttagtatttagattgtgcctcaaagttgtagtacctcacaatacctccactggtttcctgttgtaaaaaccttcagtgagtttgaccattgtgctcttggctcttgggctggagtaccgtggtgagggagtaaacactagaagtctttagtacaaaactgctctagggacacctggtgattcctacacaagtgatgtttatatttctcataaagagtcttccctatcccaaggtcttcatgatgccagtagccatatatgataaattatgttcagtgataacttagttatcagaaatcagctcagtggtcttccccgccatgattcacatttgatgagtttttaaaaatcaaagtgattttgaaaatctctaatggctcagaaaataaaaacatccagtttgtggatgactatatttagatttctctagactctagtggaagacctttggaaaggccatgccaaccgtgcttgtactgctagaagcactttatgtttcctttttgggtgaaatggatttatgtgagtgctttaaacaaatagcaatacttatagactgaaataaaatgaaacttcaaataa

SEQ ID NO: 437550 - DNA, 1987 bp, Homo sapiens
gccatcgcgccattcctagttaaggcggcacagggccgaggcgtagtgtgggtgactcctccgttccttgggtcccgtcgtctgtgatactgcagcgcagccatggcagaaccgcagcccccgtccggcggcctcacggacgaggccgccctcagttgctgctccgacgcggaccccagtaccaaggattttctattgcagcagaccatgctacgagtgaaggatcctaagaagtcactggatttttatactagagttcttggaatgacgctaatccaaaaatgtgattttcccattatgaagttttcactctacttcttggcttatgaggataaaaatgacatccctaaagaaaaagatgaaaaaatagcctgggcgctctccagaaaagctacacttgagctgacacacaattggggcactgaagatgatgagacccagagttaccacaatggcaattcagaccctcgaggattcggtcatattggaattgctgttcctgatgtatacagtgcttgtaaaaggtttgaagaactgggagtcaaatttgtgaagaaacctgatgatggtaaaatgaaaggcctggcatttattcaagatcctgatggctactggattgaaattttgaatcctaacaaaatggcaaccttaatgtagtgctgtgagaattctcctttgagatttcagaagaaaggaaacaatgtgattcaagatatttacataccagaagcatctaggactgatggatcactgtcccgattcaaattattcttcagtccatttccccttcctatttcagctgttccttttcacctaactgttcagtcattctggttttcaagcagtgctttatctcatgtccttgaatatagttgtgtaactttattttttaggtaataattagaacagttcccttcagaggctgcatttgccttcttctgccacctaaatattacttcccttcaaatctgcctttgaatcatcatttttaaaaaaaaattaacatgtttttgttgtagttatcttctggggtttcaattcctcagaaacaacttttttcacaacggaaaggaaagaacactagtgttctttcagtaaagtacaaagtgtttattttacaaaagagtaggtactcttgagagcaattcaaatcatgctgacaaggatactgatagaaaaagtgatttcttcttattataaagtacatttaaagttcaaggactaaccttatttatttgggaaaggggaggaggaaggaaatgatatggtacccagacactgggctaggctgcaactttatctcatttaatactcccagctgtcatgtgagaaagaaagcaggctaggcatgtgaaatcactttcatggattattaatggatttaagagggcatcaatcagctcaactcaagatttcataatcatttttagtatttagattgtgcctcaaagttgtagtacctcacaatacctccactggtttcctgttgtaaaaaccttcagtgagtttgaccattgtgctcttggctcttgggctggagtaccgtggtgagggagtaaacactagaagtctttagtacaaaactgctctagggacacctggtgattcctacacaagtgatgtttatatttctcataaagagtcttccctatcccaaggtcttcatgatgccagtagccatatatgataaattatgttcagtgataacttagttatcagaaatcagctcagtggtcttccccgccatgattcacatttgatgattttgaaaatctctaatggctcagaaaataaaaacatccagtttgtggatgactatatttagatttctctagactctagtggaagacctttggaaaggccatgccaaccgtgcttgtactgctagaagcactttatgtttcctttttgggtgaaatggatttatgtgagtgctttaaacaaatagcaatacttatagactgaaataaaatgaaacttcaaataa

SEQ ID NO: 437551 - DNA, 1589 bp, Homo sapiens
gcctgagacctgggaggaagctggagaaaagatgccctctgaatctttgtgtttggctgcccagccacgcaacacagctctaaacactggactctcatatccaccaacactcaatacctgtatatctgttttcaaccatttggagtcgaggtaaaatgaaaggcctggcatttattcaagatcctgatggctactggattgaaattttgaatcctaacaaaatggcaaccttaatgtagtgctgtgagaattctcctttgagatttcagaagaaaggaaacaatgtgattcaagatatttacataccagaagcatctaggactgatggatcactgtcccgattcaaattattcttcagtccatttccccttcctatttcagctgttccttttcacctaactgttcagtcattctggttttcaagcagtgctttatctcatgtccttgaatatagttgtgtaactttattttttaggtaataattagaacagttcccttcagaggctgcatttgccttcttctgccacctaaatattacttcccttcaaatctgcctttgaatcatcatttttaaaaaaaaattaacatgtttttgttgtagttatcttctggggtttcaattcctcagaaacaacttttttcacaacggaaaggaaagaacactagtgttctttcagtaaagtacaaagtgtttattttacaaaagagtaggtactcttgagagcaattcaaatcatgctgacaaggatactgatagaaaaagtgatttcttcttattataaagtacatttaaagttcaaggactaaccttatttatttgggaaaggggaggaggaaggaaatgatatggtacccagacactgggctaggctgcaactttatctcatttaatactcccagctgtcatgtgagaaagaaagcaggctaggcatgtgaaatcactttcatggattattaatggatttaagagggcatcaatcagctcaactcaagatttcataatcatttttagtatttagattgtgcctcaaagttgtagtacctcacaatacctccactggtttcctgttgtaaaaaccttcagtgagtttgaccattgtgctcttggctcttgggctggagtaccgtggtgagggagtaaacactagaagtctttagtacaaaactgctctagggacacctggtgattcctacacaagtgatgtttatatttctcataaagagtcttccctatcccaaggtcttcatgatgccagtagccatatatgataaattatgttcagtgataacttagttatcagaaatcagctcagtggtcttccccgccatgattcacatttgatgagtttttaaaaatcaaagtgattttgaaaatctctaatggctcagaaaataaaaacatccagtttgtggatgactatatttagatttctctagactctagtggaagacctttggaaaggccatgccaaccgtgcttgtactgctagaagcactttatgtttcctttttgggtgaaatggatttatgtgagtgctttaaacaaatagcaatacttatagactgaaataaaatgaaacttcaaataa

SEQ ID NO: 437552 - DNA, 1761 bp, Homo sapiens
gtggtttgtgcttgtaatcccaccactttgggaggcaaggcaggaggattgcttgaggccaggagtttgatagcagcctgggcagtacattgagatcccgcctctacaaaatcaaaaaattagccaggcaaggtggtgcgtgcctgtcgccccagctacttggcaggctgagctcaggaggtcaagcctgccttgggccatgatcatcccatgcactccagcctgacattcagagcaagaccttgtctcaaagaaagaaaaacatttttatgggtgttttcttttttagtcttttcaataatgaaaattttcattttacagggtaaaatgaaaggcctggcatttattcaagatcctgatggctactggattgaaattttgaatcctaacaaaatggcaaccttaatgtagtgctgtgagaattctcctttgagatttcagaagaaaggaaacaatgtgattcaagatatttacataccagaagcatctaggactgatggatcactgtcccgattcaaattattcttcagtccatttccccttcctatttcagctgttccttttcacctaactgttcagtcattctggttttcaagcagtgctttatctcatgtccttgaatatagttgtgtaactttattttttaggtaataattagaacagttcccttcagaggctgcatttgccttcttctgccacctaaatattacttcccttcaaatctgcctttgaatcatcatttttaaaaaaaaattaacatgtttttgttgtagttatcttctggggtttcaattcctcagaaacaacttttttcacaacggaaaggaaagaacactagtgttctttcagtaaagtacaaagtgtttattttacaaaagagtaggtactcttgagagcaattcaaatcatgctgacaaggatactgatagaaaaagtgatttcttcttattataaagtacatttaaagttcaaggactaaccttatttatttgggaaaggggaggaggaaggaaatgatatggtacccagacactgggctaggctgcaactttatctcatttaatactcccagctgtcatgtgagaaagaaagcaggctaggcatgtgaaatcactttcatggattattaatggatttaagagggcatcaatcagctcaactcaagatttcataatcatttttagtatttagattgtgcctcaaagttgtagtacctcacaatacctccactggtttcctgttgtaaaaaccttcagtgagtttgaccattgtgctcttggctcttgggctggagtaccgtggtgagggagtaaacactagaagtctttagtacaaaactgctctagggacacctggtgattcctacacaagtgatgtttatatttctcataaagagtcttccctatcccaaggtcttcatgatgccagtagccatatatgataaattatgttcagtgataacttagttatcagaaatcagctcagtggtcttccccgccatgattcacatttgatgagtttttaaaaatcaaagtgattttgaaaatctctaatggctcagaaaataaaaacatccagtttgtggatgactatatttagatttctctagactctagtggaagacctttggaaaggccatgccaaccgtgcttgtactgctagaagcactttatgtttcctttttgggtgaaatggatttatgtgagtgctttaaacaaatagcaatacttatagactgaaataaaatgaaacttcaaataa

SEQ ID NO: 437553 - DNA, 1672 bp, Homo sapiens
gccatcgcgccattcctagttaaggcggcacagggccgaggcgtagtgtgggtgactcctccgttccttgggtcccgtcgtctgtgatactgcagcgcagccatggcagaaccgcagcccccgtccggcggcctcacggacgaggccgccctcagttgctgctccgacgcggaccccagtaccaaggattttctattgcagcagaccatgctacgagtgaaggatcctaagaagtcactggatttttatactagagttcttggaatgacgctaatccaaaaatgtgattttcccattatgaagttttcactctacttcttggcttatgaggataaaaatgacatccctaaagaaaaagatgaaaaaatagcctgggcgctctccagaaaagctacacttgagctgacacacaattggggcactgaagatgatgagacccagagttaccacaatggcaattcagaccctcgaggattcggtcatattggaattgctgttcctgatgtatacagtgcttgtaaaaggtttgaagaactgggagtcaaatttgtgaagaaacctgatgatggtaaaatgaaaggcctggcatttattcaagatcctgatggctactggattgaaattttgaatcctaacaaaatggcaaccttaatgtagtgctgtgagaattctcctttgagatttcagaagaaaggaaacaatgtgattcaagatatttacataccagaagcatctaggactgatggatcactgtcccgattcaaattattcttcagtccatttccccttcctatttcagctgttccttttcacctaactgttcagtcattctggttttcaagcagtgctttatctcatgtccttgaatatagttgtgtaactttattttttaggtaataattagaacagttcccttcagaggctgcatttgccttcttctgccacctaaatattacttcccttcaaatctgcctttgaatcatcatttttaaaaaaaaattaacatgtttttgttgtagttatcttctggggtttcaattcctcagaaacaacttttttcacaacggaaaggaaagaacactagtgttctttcagtaaagtacaaagtgtttattttacaaaagagtaggtactcttgagagcaattcaaatcatgctgacaaggatactgatagaaaaagtgatttcttcttattataaagtacatttaaagttcaaggactaaccttatttatttgggaaaggggaggaggaaggaaatgatatggtacccagacactgggctaggctgcaactttatctcatttaatactcccagctgtcatgtgagaaagaaagcaggctaggcatgtgaaatcactttcatggattattaatggatttaagagggcatcaatcagctcaactcaagatttcataatcatttttagtatttagattgtgcctcaaagttgtagtacctcacaatacctccactggtttcctgttgtaaaaaccttcagtgagtttgaccattgtgctcttggctcttgggctggagtaccgtggtgagggagtaaacactagaagtctttatgagaaatataaacatcacttgtgtaggaatcatcaggtgtccctagagcagttttgtactaaagacttctagtgtttagtcgacgcggccgcgaat

SEQ ID NO: 437554 - DNA, 846 bp, Homo sapiens
gccatcgcgccattcctagttaaggcggcacagggccgaggcgtagtgtgggtgactcctccgttccttgggtcccgtcgtctgtgatactgcagcgcagccatggcagaaccgcagcccccgtccggcggcctcacggacgaggccgccctcagttgctgctccgacgcggaccccagtaccaaggattttctattgcagcagaccatgctacgagtgaaggatcctaagaagtcactggatttttatactagagttcttggaatgacgctaatccaaaaatgtgattttcccattatgaagttttcactctacttcttggcttatgaggataaaaatgacatccctaaagaaaaagatgaaaaaatagcctgggcgctctccagaaaagctacacttgagctgacacacaattggggcactgaagatgatgagacccagagttaccacaatggcaattcagaccctcgaggattcggtcatattggaattgctgttcctgatgtatacagtgcttgtaaaaggtttgaagaactgggagtcaaatttgtgaagaaacctgatgatggtaaaatgaaaggcctggcatttattcaagatcctgatggctactggattgaaattttgaatcctaacaaaatggcaaccttaatgtagtgctgtgagaattctcctttgagatttcagaagacgggccaccctgtgttccgctttccttccagaagcctcttgctgggggtcctggccgttcaattatctcagtcattcccttctatttagtgtctttcctcccgtcgtctcggttccagccggggtccctgctgcaatatggcaccttggggcacc

SEQ ID NO: 437555 - DNA, 535 bp, Homo sapiens
  misc_feature (8)..(8): n is a, c, g, or t
  misc_feature (11)..(11): n is a, c, g, or t
  misc_feature (17)..(17): n is a, c, g, or t
ttgacttnctncctgcngtcactctagaggatccccaatatatccggcctatccctcttgggctggagtaccgtggtgagggagtaaacactagaagtctttagtacaaaactgctctagggacacctggtgattcctacacaagtgatgtttatatttctcataaagagtcttccctatcccaaggtcttcatgatgccagtagccatatatgataaattatgttcagtgataacttagttatcagaaatcagctcagtggtcttccccgccatgattcacatttgatgagtttttaaaaatcaaagtgattttgaaaatctctaatggctcagaaaataaaaacatccagtttgtggatgactatatttagatttctctagactctagtggaagacctttggaaaggccatgccaaccgtgcttgtactgctagaagcactttatgtttcctttttgggtgaaatggatttatgtgagtgctttaaacaaatagcaatacttatagactgaaataaaatgaaacttcaaataa

SEQ ID NO: 437556 - DNA, 964 bp, Homo sapiens
gccatcgcgccattcctagttaaggcggcacagggccgaggcgtagtgtgggtgactcctccgttccttgggtcccgtcgtctgtgatactgcagcgcagccatggcagaaccgcagcccccgtccggcggcctcacggacgaggccgccctcagttgctgctccgacgcggaccccagtaccaaggattttctattgcagcagaccatgctacgagtgaaggatcctaagaagtcactggatttttatactagagttcttggaatgacgctaatccaaaaatgtgattttcccattatgaagttttcactctacttcttggcttatgaggataaaaatgacatccctaaagaaaaagatgaaaaaatagcctgggcgctctccagaaaagctacacttgagctgacacacaatggggcagctgaagatgatgaggatgacgatgtcgataccaagaagcagaagaccgacgaggatgactagacagcaaaaaggacaacgttatacctaagaaaaaaaaggccggcgtgacctatacaccctccattcccatctcagaatctaaaacgtggtcgccttcgagtagagaggccgcccgcccccgtggcgtgcacccgagatgaacgggctcttcacaacaaaccgaaaccatgagaatttgcacacgggggggtacaagacccaactccaggccgcttttttctaaacgtcttcaccaagcacattggttgtcatgctatgacacttacctccgtgcattgttcggccgccgtttaagatcggtgacaacagcttggggcgccggccagctgcctctgtgggaccgctcaaacccgggggaacgttaaccggtacgacacttcctcccttgctggcggccaacgtgttcgataccccgcgcacctgtggacggcgctgatctccctttttctcctctttctctcttttatctttgtcctcttcg

SEQ ID NO: 437557 - DNA, 2019 bp, Homo sapiens
accacgcgtcgcggacgcgtgggtcgcggacgcgtgggcgcacagggccgaggcgtagtgtgggtgactcctccgttccttgggtcccgtcgtctgtgatactgcagcgcagccatggcagaaccgcagcccccgtccggcggcctcacggacgaggccgccctcagttgctgctccgacgcggaccccagtaccaaggattttctattgcagcagaccatgctacgagtgaaggatcctaagaagtcactggatttttatactagagttcttggaatgacgctaatccaaaaatgtgattttcccattatgaagttttcactctacttcttggcttatgaggataaaaatgacatccctaaagaaaaagatgaaaaaatagcctgggcgctctccagaaaagctacacttgagctgacacacaattggggcactgaagatgatgagacccagagttaccacaatggcaattcagaccctcgaggattcggtcatattggaattgctgttcctgatgtatacagtgcttgtaaaaggtttgaagaactgggagtcaaatttgtgaagaaacctgatgatggtaaaatgaaaggcctggcatttattcaagatcctgatggctactggattgaaattttgaatcctaacaaaatggcaaccttaatgtagtgctgtgagaattctcctttgagatttcagaagaaaggaaacaatgtgattcaagatatttacataccagaagcatctaggactgatggatcactgtcccgattcaaattattcttcagtccatttccccttcctatttcagctgttccttttcacctaactgttcagtcattctggttttcaagcagtgctttatctcatgtccttgaatatagttgtgtaactttattttttaggtaataattagaacagttcccttcagaggctgcatttgccttcttctgccacctaaatattacttcccttcaaatctgcctttgaatcatcatttttaaaaaaaaattaacatgtttttgttgtagttatcttctggggtttcaattcctcagaaacaacttttttcacaacggaaaggaaagaacactagtgttctttcagtaaagtacaaagtgtttattttacaaaagagtaggtactcttgagagcaattcaaatcatgctgacaaggatactgatagaaaaagtgatttcttcttattataaagtacatttaaagttcaaggactaaccttatttatttgggaaaggggaggaggaaggaaatgatatggtacccagacactgggctaggctgcaactttatctcatttaatactcccagctgtcatgtgagaaagaaagcaggctaggcatgtgaaatcactttcatggattattaatggatttaagagggcatcaatcagctcaactcaagatttcataatcatttttagtatttagattgtgcctcaaagttgtagtacctcacaatacctccactggtttcctgttgtaaaaaccttcagtgagtttgaccattgtgctcttggctcttgggctggagtaccgtggtgagggagtaaacactagaagtctttagtacaaaactgctctagggacacctggtgattcctacacaagtgatgtttatatttctcataaagagtcttccctatcccaaggtcttcatgatgccagtagccatatatgataaattatgttcagtgataacttagttatcagaaatcagctcagtggtcttccccgccatgattcacatttgatgagtttttaaaaatcaaagtgattttgaaaatctctaatggctcagaaaataaaaacatccagtttgtggatgactatatttagatttctctagactctagtggaagacctttggaaaggccatgccaaccgtgcttgtactgctagaagcactttatgtttcctttttgggtgaaatggatttatgtgagtgctttaaacaaatagcaatacttatagactgaaataaaatgaaacttcaaataa

SEQ ID NO: 437558 - DNA, 2415 bp, Homo sapiens
  misc_feature (2045)..(2046): n is a, c, g, or t
  misc_feature (2051)..(2051): n is a, c, g, or t
gccatcgcgccattcctagttaaggcggcacagggccgaggcgtagtgtgggtgactcctccgttccttgggtcccgtcgtctgtgatactgcagcgcagccatggcagaaccgcagcccccgtccggcggcctcacggacgaggccgccctcagttgctgctccgacgcggaccccagtaccaaggattttctattgcagcagaccatgctacgagtgaaggatcctaagaagtcactggatttttatactagagttcttggaatgacgctaatccaaaaatgtgattttcccattatgaagttttcactctacttcttggcttatgaggataaaaatgacatccctaaagaaaaagatgaaaaaatagcctgggcgctctccagaaaagctacacttgagctgacacacaattggggcactgaagatgatgagacccagagttaccacaatggcaattcagaccctcgaggattcggtcatattggaattgctgttcctgatgtatacagtgcttgtaaaaggtttgaagaactgggagtcaaatttgtgaagaaacctgatgatggtaaaatgaaaggcctggcatttattcaagatcctgatggctactggattgaaattttgaatcctaacaaaatggcaaccttaatgtagtgctgtgagaattctcctttgagatttcagaagaaaggaaacaatgtgattcaagatatttacataccagaagcatctaggactgatggatcactgtcccgattcaaattattcttcagtccatttccccttcctatttcagctgttccttttcacctaactgttcagtcattctggttttcaagcagtgctttatctcatgtccttgaatatagttgtgtaactttattttttaggtaataattagaacagttcccttcagaggctgcatttgccttcttctgccacctaaatattacttcccttcaaatctgcctttgaatcatcatttttaaaaaaaaattaacatgtttttgttgtagttatcttctggggtttcaattcctcagaaacaacttttttcacaacggaaaggaaagaacactagtgttctttcagtaaagtacaaagtgtttattttacaaaagagtaggtactcttgagagcaattcaaatcatgctgacaaggatactgatagaaaaagtgatttcttcttattataaagtacatttaaagttcaaggactaaccttatttatttgggaaaggggaggaggaaggaaatgatatggtacccagacactgggctaggctgcaactttatctcatttaatactcccagctgtcatgtgagaaagaaagcaggctaggcatgtgaaatcactttcatggattattaatggatttaagagggcatcaatcagctcaactcaagatttcataatcatttttagtatttagattgtgcctcaaagttgtagtacctcacaatacctccactggtttcctgttgtaaaaaccttcagtgagtttgaccattgtgctcttggctcttgggctggagtaccgtggtgagggagtaaacactagaagtctttagtacaaaactgctctagggacacctggtgattcctacacaagtgatgtttatatttctcataaagagtcttccctatcccaaggtcttcatgatgccagtagccatatatgataaattatgttcagtgataacttagttatcagaaatcagctcagtggtcttccccgccatgattcacatttgatgagtttttaaaaatcaaagtgattttgaaaatctctaatggctcagaaaataaaaacatccagtttgtggatgactatatttagatttctctagactctagtggaagacctttggaaaggccatgccaaccgtgcttgtactgctagaagcactttatgtttcctttttgggtgaaatggatttatgtgagtgctttaaacaaatagcaatacttatagactgaaataaaatgaaacttcaaataaaaaaaaaaaaaaaaaaaaaaaaaaaaaaaaaaaaaaannaaaanaaaaaaaaaaaaaaaaaaaaaaaaaaaaaaaaaaaaaaaaaaaaaaaaaaaaaaaaaaaaaaaaaaaaaaaaaagaaaaaaaaaaaaaaaaaggggggggggggcaataatccccgggggggcgccacagatagccgaccccccccagagttagtagagaaaagaggagccgccccacaagaaagaggggatataacaaagaggcgggcccggccgaaaaaaaggcgggaacgaggaaagagccatgggctcatgggagggacacctctgggggggaatgaggcgaccaccccgagaaaaacgccggaaaaaacacaggtggatggtaacacgcatcgtgcggcgaaacgccggaggaaaaaag

SEQ ID NO: 437559 - DNA, 2381 bp, Homo sapiens
  misc_feature (2011)..(2012): n is a, c, g, or t
  misc_feature (2017)..(2017): n is a, c, g, or t
gccatcgcgccattcctagttaaggcggcacagggccgaggcgtagtgtgggtgactcctccgttccttgggtcccgtcgtctgtgatactgcagcgcagccatggcagaaccgcagcccccgtccggcggcctcacggacgaggccgccctcagttgctgctccgacgcggaccccagtaccaaggattttctattgcagcagaccatgctacgagtgaaggatcctaagaagtcactggatttttatactagagttcttggaatgacgctaatccaaaaatgtgattttcccattatgaagttttcactctacttcttggcttatgaggataaaaatgacatccctaaagaaaaagatgaaaaaatagcctgggcgctctccagaaaagctacacttgagctgacacacaattggggcactgaagatgatgagacccagagttaccacaatggcaattcagaccctcgaggattcggtcatattggaattgctgttcctgatgtatacagtgcttgtaaaaggtttgaagaactgggagtcaaatttgtgaagaaacctgatgatggtaaaatgaaaggcctggcatttattcaagatcctgatggctactggattgaaattttgaatcctaacaaaatggcaaccttaatgtagtgctgtgagaattctcctttgagatttcagaagaaaggaaacaatgtgattcaagatatttacataccagaagcatctaggactgatggatcactgtcccgattcaaattattcttcagtccatttccccttcctatttcagctgttccttttcacctaactgttcagtcattctggttttcaagcagtgctttatctcatgtccttgaatatagttgtgtaactttattttttaggtaataattagaacagttcccttcagaggctgcatttgccttcttctgccacctaaatattacttcccttcaaatctgcctttgaatcatcatttttaaaaaaaaattaacatgtttttgttgtagttatcttctggggtttcaattcctcagaaacaacttttttcacaacggaaaggaaagaacactagtgttctttcagtaaagtacaaagtgtttattttacaaaagagtaggtactcttgagagcaattcaaatcatgctgacaaggatactgatagaaaaagtgatttcttcttattataaagtacatttaaagttcaaggactaaccttatttatttgggaaaggggaggaggaaggaaatgatatggtacccagacactgggctaggctgcaactttatctcatttaatactcccagctgtcatgtgagaaagaaagcaggctaggcatgtgaaatcactttcatggattattaatggatttaagagggcatcaatcagctcaactcaagatttcataatcatttttagtatttagattgtgcctcaaagttgtagtacctcacaatacctccactggtttcctgttgtaaaaaccttcagtgagtttgaccattgtgctcttggctcttgggctggagtaccgtggtgagggagtaaacactagaagtctttagtacaaaactgctctagggacacctggtgattcctacacaagtgatgtttatatttctcataaagagtcttccctatcccaaggtcttcatgatgccagtagccatatatgataaattatgttcagtgataacttagttatcagaaatcagctcagtggtcttccccgccatgattcacatttgatgagtttttaaaaatcaaagtgattttgaaaatctctaatggctcagaaaataaaaacatccagtttgtggatgactatatttagatttctctagactctagtggaagacctttggaaaggccatgccaaccgtgcttgtactgctagaagcactttatgtttcctttttgggtgaaatggatttatgtgagtgctttaaacaaatagcaatacttatagactgaaataaaatgaaacttcaaataaaaannaaaanaaaaaaaaaaaaaaaaaaaaaaaaaaaaaaaaaaaaaaaaaaaaaaaaaaaaaaaaaaaaaaaaaaaaaaaaaagaaaaaaaaaaaaaaaaaggggggggggggcaataatccccgggggggcgccacagatagccgaccccccccagagttagtagagaaaagaggagccgccccacaagaaagaggggatataacaaagaggcgggcccggccgaaaaaaaggcgggaacgaggaaagagccatgggctcatgggagggacacctctgggggggaatgaggcgaccaccccgagaaaaacgccggaaaaaacacaggtggatggtaacacgcatcgtgcggcgaaacgccggaggaaaaaag

SEQ ID NO: 437560 - DNA, 2061 bp, Homo sapiens
gccatcgcgccattcctagttaaggcggcacagggccgaggcgtagtgtgggtgactcctccgttccttgggtcccgtcgtctgtgatactgcagcgcagccatggcagaaccgcagcccccgtccggcggcctcacggacgaggccgccctcagttgctgctccgacgcggaccccagtaccaaggggcctgcaaccagaagataccactgagcagagagcccttgcaagttgtaggtggattttctattgcagcagaccatgctacgagtgaaggatcctaagaagtcactggatttttatactagagttcttggaatgacgctaatccaaaaatgtgattttcccattatgaagttttcactctacttcttggcttatgaggataaaaatgacatccctaaagaaaaagatgaaaaaatagcctgggcgctctccagaaaagctacacttgagctgacacacaattggggcactgaagatgatgagacccagagttaccacaatggcaattcagaccctcgaggattcggtcatattggaattgctgttcctgatgtatacagtgcttgtaaaaggtttgaagaactgggagtcaaatttgtgaagaaacctgatgatggtaaaatgaaaggcctggcatttattcaagatcctgatggctactggattgaaattttgaatcctaacaaaatggcaaccttaatgtagtgctgtgagaattctcctttgagatttcagaagaaaggaaacaatgtgattcaagatatttacataccagaagcatctaggactgatggatcactgtcccgattcaaattattcttcagtccatttccccttcctatttcagctgttccttttcacctaactgttcagtcattctggttttcaagcagtgctttatctcatgtccttgaatatagttgtgtaactttattttttaggtaataattagaacagttcccttcagaggctgcatttgccttcttctgccacctaaatattacttcccttcaaatctgcctttgaatcatcatttttaaaaaaaaattaacatgtttttgttgtagttatcttctggggtttcaattcctcagaaacaacttttttcacaacggaaaggaaagaacactagtgttctttcagtaaagtacaaagtgtttattttacaaaagagtaggtactcttgagagcaattcaaatcatgctgacaaggatactgatagaaaaagtgatttcttcttattataaagtacatttaaagttcaaggactaaccttatttatttgggaaaggggaggaggaaggaaatgatatggtacccagacactgggctaggctgcaactttatctcatttaatactcccagctgtcatgtgagaaagaaagcaggctaggcatgtgaaatcactttcatggattattaatggatttaagagggcatcaatcagctcaactcaagatttcataatcatttttagtatttagattgtgcctcaaagttgtagtacctcacaatacctccactggtttcctgttgtaaaaaccttcagtgagtttgaccattgtgctcttggctcttgggctggagtaccgtggtgagggagtaaacactagaagtctttagtacaaaactgctctagggacacctggtgattcctacacaagtgatgtttatatttctcataaagagtcttccctatcccaaggtcttcatgatgccagtagccatatatgataaattatgttcagtgataacttagttatcagaaatcagctcagtggtcttccccgccatgattcacatttgatgagtttttaaaaatcaaagtgattttgaaaatctctaatggctcagaaaataaaaacatccagtttgtggatgactatatttagatttctctagactctagtggaagacctttggaaaggccatgccaaccgtgcttgtactgctagaagcactttatgtttcctttttgggtgaaatggatttatgtgagtgctttaaacaaatagcaatacttatagactgaaataaaatgaaacttcaaataa

SEQ ID NO: 437561 - DNA, 1953 bp, Homo sapiens
gccatcgcgccattcctagttaaggcggcacagggccgaggcgtagtgtgggtgactcctccgttccttgggtcccgtcgtctgtgatactgcagcgcagccatggcagaaccgcagcccccgtccggcggcctcacggacgaggccgccctcagttgctgctccgacgcggaccccagtaccaaggattttctattgcagcagaccatgctacgagtgaaggatcctaagaagtcactggatttttatactagagttcttggaatgacgctaatccaaaaatgtgattttcccattatgaagttttcactctacttcttggcttatgaggataaaaatgacatccctaaagaaaaagatgaaaaaatagcctgggcgctctccagaagttaccacaatggcaattcagaccctcgaggattcggtcatattggaattgctgttcctgatgtatacagtgcttgtaaaaggtttgaagaactgggagtcaaatttgtgaagaaacctgatgatggtaaaatgaaaggcctggcatttattcaagatcctgatggctactggattgaaattttgaatcctaacaaaatggcaaccttaatgtagtgctgtgagaattctcctttgagatttcagaagaaaggaaacaatgtgattcaagatatttacataccagaagcatctaggactgatggatcactgtcccgattcaaattattcttcagtccatttccccttcctatttcagctgttccttttcacctaactgttcagtcattctggttttcaagcagtgctttatctcatgtccttgaatatagttgtgtaactttattttttaggtaataattagaacagttcccttcagaggctgcatttgccttcttctgccacctaaatattacttcccttcaaatctgcctttgaatcatcatttttaaaaaaaaattaacatgtttttgttgtagttatcttctggggtttcaattcctcagaaacaacttttttcacaacggaaaggaaagaacactagtgttctttcagtaaagtacaaagtgtttattttacaaaagagtaggtactcttgagagcaattcaaatcatgctgacaaggatactgatagaaaaagtgatttcttcttattataaagtacatttaaagttcaaggactaaccttatttatttgggaaaggggaggaggaaggaaatgatatggtacccagacactgggctaggctgcaactttatctcatttaatactcccagctgtcatgtgagaaagaaagcaggctaggcatgtgaaatcactttcatggattattaatggatttaagagggcatcaatcagctcaactcaagatttcataatcatttttagtatttagattgtgcctcaaagttgtagtacctcacaatacctccactggtttcctgttgtaaaaaccttcagtgagtttgaccattgtgctcttggctcttgggctggagtaccgtggtgagggagtaaacactagaagtctttagtacaaaactgctctagggacacctggtgattcctacacaagtgatgtttatatttctcataaagagtcttccctatcccaaggtcttcatgatgccagtagccatatatgataaattatgttcagtgataacttagttatcagaaatcagctcagtggtcttccccgccatgattcacatttgatgagtttttaaaaatcaaagtgattttgaaaatctctaatggctcagaaaataaaaacatccagtttgtggatgactatatttagatttctctagactctagtggaagacctttggaaaggccatgccaaccgtgcttgtactgctagaagcactttatgtttcctttttgggtgaaatggatttatgtgagtgctttaaacaaatagcaatacttatagactgaaataaaatgaaacttcaaataa

SEQ ID NO: 437562 - DNA, 2348 bp, Homo sapiens
  misc_feature (1978)..(1979): n is a, c, g, or t
  misc_feature (1984)..(1984): n is a, c, g, or t
gccatcgcgccattcctagttaaggcggcacagggccgaggcgtagtgtgggtgactcctccgttccttgggtcccgtcgtctgtgatactgcagcgcagccatggcagaaccgcagcccccgtccggcggcctcacggacgaggccgccctcagttgctgctccgacgcggaccccagtaccaaggattttctattgcagcagaccatgctacgagtgaaggatcctaagaagtcactggatttttatactagagttcttggaatgacgctaatccaaaaatgtgattttcccattatgaagttttcactctacttcttggcttatgaggataaaaatgacatccctaaagaaaaagatgaaaaaatagcctgggcgctctccagaaaagctacacttgagctgacacacaattggggcactgaagatgatgagacccagagttaccacaatggcaattcagaccctcgaggattcggtcatattggaattgctgttcctgatgtatacagtgcttgtaaaaggtttgaagaactgggagtcaaatttgtgaagaaacctgatgatggtaaaatgaaaggcctggcatttattcaagatcctgatggctactggattgaaattttgaatcctaacaaaatggcaaccttaatgtagtgctgtgagaattctcctttgagatttcagaagaaaggaaacaatgtgattcaagatatttacataccagaagcatctaggactgatggatcactgtcccgattcaaattattcttcagtccatttccccttcctatttcagctgttccttttcacctaactgttcagtcattctggttttcaagcagtgctttatctcatgtccttgaatatagttgtgtaactttattttttaggtaataattagaacagttcccttcagaggctgcatttgccttcttctgccacctaaatattacttcccttcaaatctgcctttgaatcatcatttttaaaaaaaaattaacatgtttttgttgtagttatcttctggggtttcaattcctcagaaacaacttttttcacaacggaaaggaaagaacactagtgttctttcagtaaagtacaaagtgtttattttacaaaagagtaggtactcttgagagcaattcaaatcatgctgacaaggatactgatagaaaaagtgatttcttcttattataaagtacatttaaagttcaaggactaaccttatttatttgggaaaggggaggaggaaggaaatgatatggtacccagacactgggctaggctgcaactttatctcatttaatactcccagctgtcatgtgagaaagaaagcaggctaggcatgtgaaatcactttcatggattattaatggatttaagagggcatcaatcagctcaactcaagatttcataatcatttttagtatttagattgtgcctcaaagttgtagtacctcacaatacctccactggtttcctgttgtaaaaaccttcagtgagtttgaccattgtgctcttggctcttgggctggagtaccgtggtgagggagtaaacactagaagtctttagtacaaaactgctctagggacacctggtgattcctacacaagtgatgtttatatttctcataaagagtcttccctatcccaaggtcttcatgatgccagtagccatatatgataaattatgttcagtgataacttagttatcagaaatcagctcagtggtcttccccgccatgattcacatttgatgagtttttaaaaatcaaagtgattttgaaaatctctaatggctcagggaaaggccatgccaaccgtgcttgtactgctagaagcactttatgtttcctttttgggtgaaatggatttatgtgagtgctttaaacaaatagcaatacttatagactgaaataaaatgaaacttcaaataaaaaaaaaaaaaaaaaaaaaaaaaaaaaaaaaaaaaaannaaaanaaaaaaaaaaaaaaaaaaaaaaaaaaaaaaaaaaaaaaaaaaaaaaaaaaaaaaaaaaaaaaaaaaaaaaaaaagaaaaaaaaaaaaaaaaaggggggggggggcaataatccccgggggggcgccacagatagccgaccccccccagagttagtagagaaaagaggagccgccccacaagaaagaggggatataacaaagaggcgggcccggccgaaaaaaaggcgggaacgaggaaagagccatgggctcatgggagggacacctctgggggggaatgaggcgaccaccccgagaaaaacgccggaaaaaacacaggtggatggtaacacgcatcgtgcggcgaaacgccggaggaaaaaag

SEQ ID NO: 437563 - DNA, 2274 bp, Homo sapiens
  misc_feature (1904)..(1905): n is a, c, g, or t
  misc_feature (1910)..(1910): n is a, c, g, or t
gccatcgcgccattcctagttaaggcggcacagggccgaggcgtagtgtgggtgactcctccgttccttgggtcccgtcgtctgtgatactgcagcgcagccatggcagaaccgcagcccccgtccggcggcctcacggacgaggccgccctcagttgctgctccgacgcggaccccagtaccaaggattttctattgcagcagaccatgctacgagtgaaggatcctaagaagtcactggatttttatactagagttcttggaatgacgctaatccaaaaatgtgattttcccattatgaagttttcactctacttcttggcttatgaggataaaaatgacatccctaaagaaaaagatgaaaaaatagcctgggcgctctccagaaaagctacacttgagctgacacacaattggggcactgaagatgatgagacccagagttaccacaatggcaattcagaccctcgaggattcggtcatattggaattgctgttcctgatgtatacagtgcttgtaaaaggtttgaagaactgggagtcaaatttgtgaagaaacctgatgatggtaaaatgaaaggcctggcatttattcaagatcctgatggctactggattgaaattttgaatcctaacaaaatggcaaccttaatgtagtgctgtgagaattctcctttgagatttcagaagaaaggaaacaatgtgattcaagatatttacataccagaagcatctaggactgatggatcactgtcccgattcaaattattcttcagtccatttccccttcctatttcagctgttccttttcacctaactgttcagtcattctggttttcaagcagtgctttatctcatgtccttgaatatagttgtgtaactttattttttaggtaataattagaacagttcccttcagaggctgcatttgccttcttctgccacctaaatattacttcccttcaaatctgcctttgaatcatcatttttaaaaaaaaattaacatgtttttgttgtagttatcttctggggtttcaattcctcagaaacaacttttttcacaacggaaaggaaagaacactagtgttctttcagtaaagtacaaagtgtttattttacaaaagagtaggtactcttgagagcaattcaaatcatgctgacaaggatactgatagaaaaagtgatttcttcttattataaagtacatttaaagttcaaggactaaccttatttatttgggaaaggggaggaggaaggaaatgatatggtacccagacactgggctaggctgcaactttatctcatttaatactcccagctgtcatgtgagaaagaaagcaggctaggcatgtgaaatcactttcatggattattaatggatttaagagggcatcaatcagctcaactcaagatttcataatcatttttagtatttagattgtgcctcaaagttgtagtacctcacaatacctccactggtttcctgttgtaaaaaccttcagtgagtttgaccattgtgctcttggctcttgggctggagtaccgtggtgagggagtaaacactagaagtctttagtacaaaactgctctagggacacctggtgattcctacacaagtgatgtttatatttctcataaagagtcttccctatcccaaggtcttcataaaataaaaacatccagtttgtggatgactatatttagatttctctagactctagtggaagacctttggaaaggccatgccaaccgtgcttgtactgctagaagcactttatgtttcctttttgggtgaaatggatttatgtgagtgctttaaacaaatagcaatacttatagactgaaataaaatgaaacttcaaataaaaaaaaaaaaaaaaaaaaaaaaaaaaaaaaaaaaaaannaaaanaaaaaaaaaaaaaaaaaaaaaaaaaaaaaaaaaaaaaaaaaaaaaaaaaaaaaaaaaaaaaaaaaaaaaaaaaagaaaaaaaaaaaaaaaaaggggggggggggcaataatccccgggggggcgccacagatagccgaccccccccagagttagtagagaaaagaggagccgccccacaagaaagaggggatataacaaagaggcgggcccggccgaaaaaaaggcgggaacgaggaaagagccatgggctcatgggagggacacctctgggggggaatgaggcgaccaccccgagaaaaacgccggaaaaaacacaggtggatggtaacacgcatcgtgcggcgaaacgccggaggaaaaaag

SEQ ID NO: 437564 - DNA, 657 bp, Homo sapiens
gccatcgcgccattcctagttaaggcggcacagggccgaggcgtagtgtgggtgactcctccgttccttgggtcccgtcgtctgtgatactgcagcgcagccatggcagaaccgcagcccccgtccggcggcctcacggacgaggccgccctcagttgctgctccgacgcggaccccagtaccaaggattttctattgcagcagaccatgctacgagtgaaggatcctaagaagtcactggatttttatactagagttcttggaatgacgctaatccaaaaatgtgattttcccattatgaagttttcactctacttcttggcttatgaggataaaaatgacatccctaaagaaaaagatgaaaaaatagcctgggcgctctccagaaaagctacacttgagctgacacacaattggggcactgaagatgatgagacccagagttaccacaatggcaattcagaccctcgaggattcggtcatattggaattgctgttcctgatgtatacagtgcttgtaaaagggaaaggccatgccaaccgtgcttgtactgctagaagcactttatgtttcctttttgggtgaaatggatttatgtgagtgctttaaacaaatagcaatacttatagactgaaataaaatgaaacttcaaataa

SEQ ID NO: 437565 - DNA, 618 bp, Homo sapiens
cttctagatgggtcgaccacagaccacagctgcttctaattggccatcttggcacctcctcatttaaccttcttttctcatctaaaggggataaaggatgaaactgtcccaaagaaaagtttataaaccaattaagggagaaaataaaattcaactaggcttgcagaataatcagtggcaatcatgaaatccacttcccaatttggcctacttccttgtagctagttacttcttactcccccaagatagtgtagcccttgtcacaagactgtgttccttttcttttctatagataagatctaaggcacatgagatgatatgctttctgtttgagtttctcctttatgttacgcatactgataaaattgttgatgccagttgatctgaaggtcccagcaaggagccgactcacagaagaatgaagttttcacatcatgatgatttaatcttccttgacctgagcaattgacaaccccaattctccagaacctcacccgccacaatccccttaaaaaccctggcccagaacccctcaagcagacagatgtgaagcttgaggattccttcatctctttgcccaatggcattgtgattattaaactctttttctgctgcaaa

SEQ ID NO: 437566 - DNA, 616 bp, Homo sapiens
gtgagttgaagagccgatgggcagcaggcagacttgagtctcctttctgtccatgagctcgggccactgtatcaggtccacccgtggctccaaaatggtctcctggtccgtgatagcaaagatccaggaaatatggtgcgaggaagatgagaggaagatggcgcgagagttcctggccgagttcatgagcacatatgtcatgatgaacatacatatgatagttgagaaagacacatattctgatcatgaagaaataaacacaagttaaatatgactaagcagaaagatggaaggaccaggaatggtgatgctaacttggaaccacgatgcaggctctaaactcctctacaatcatcctcccttgtgagaaaaatacttgatctgaaggtcccagcaaggagccgactcacagaagaatgaagttttcacatcatgatgatttaatcttccttgacctgagcaattgacaaccccaattctccagaacctcacccgccacaatccccttaaaaaccctggcccagaacccctcaagcagacagatgtgaagcttgaggattccttcatctctttgcccaatggcattgtgattattaaactctttttctgctgcaaa

SEQ ID NO: 437567 - DNA, 414 bp, Homo sapiens
gtgagttgaagagccgatgggcagcaggcagacttgagtctcctttctgtccatgagctcgggccactgtatcaggtccacccgtggctccaaaatggtctcctggtccgtgatagcaaagatccaggaaatatggtgcgaggaagatgagaggaagatggcgcgagagttcctggccgagttcatgagcacatatgtcatgatgaacatacatatgatagttgagaaagacacatattctgatcatgaagaaataaacacaagttaaatatgactaagcagaaagatggaaggaccaggaatggtgatgctaacttggaaccacgatgcaggctctaaactcctctacaatcatcctcccttgtgagaaaaatacgtaagtcacttttaaaataaatagaaacctgaacacac

SEQ ID NO: 437568 - DNA, 395 bp, Homo sapiens
tcacttgtacccgggaattggaggtttccatgagccgggatttggcccttgcaagtcggcttgggcgacagagccagactgtttccaaaaaaaaaaaaaaaaaattggctgcgtgccgaggcacatgcccatagtcccaaggtgctgggattacaggcatgagtcaccgtgcccagcccaatatcacagtcttgacccttaacctctatgctctgtaccttagcttaaatattgccagcttttaaagactggcttgttaatgctcccccagccagggtaaagtcctcactttcaggtagttcaagatgcctctctcggcctcagtttccccatttatagagtgggagaaaaattcttgctgtgcagatttgttgtgaggattgaagacagtagca

SEQ ID NO: 437569 - DNA, 601 bp, Homo sapiens
gtgagttgaagagccgatgggcagcaggcagacttgagtctcctttctgtccatgagctcgggccactgtatcaggtccacccgtggctccaaaatggtctcctggtccgtgatagcaaagatccaggaaatatggtgcgaggaagatgagaggaagatggcgcgagagttcctggccgagttcatgagcacatatgtcatgatggcatgtgcagagatgaactcactaattgttcaaaataaacaatttgaattcaaagcaaagtatatttttggaatatcaattatcacttattgcagataaatgataatataaaacaccaactttggaatttatttgttttacttctgtgactctcagccttctttttaaaatatagtgtatgttttagaacatacatatgatagttgagaaagacacatattctgatcatgaagaaataaacacaagttaaatatgactaagcagaaagatggaaggaccaggaatggtgatgctaacttggaaccacgatgcaggctctaaactcctctacaatcatcctcccttgtgagaaaaatacgtaagtcacttttaaaataaatagaaacctgaacacac

SEQ ID NO: 437570 - DNA, 602 bp, Homo sapiens
gtggggccaagttctgtgtcctccagccctagtgacctctctttggctcctcagcatctacaaatctgaaggacaaaacatggttcaagcatctgggcacaggcgaacatacatatgatagttgagaaagacacatattctgatcatgaagaaataaacacaagttaaatatgactaagcagaaagatggaaggaccaggaatggtgatgctaacttggaaccacgatgcaggctctaaactcctctacaatcatcctcccttgtgagaaaaatacataagatctaaggcacatgagatgatatgctttctgtttgagtttctcctttatgttacgcatactgataaaattgttgatgccagttgatctgaaggtcccagcaaggagccgactcacagaagaatgaagttttcacatcatgatgatttaatcttccttgacctgagcaattgacaaccccaattctccagaacctcacccgccacaatccccttaaaaaccctggcccagaacccctcaagcagacagatgtgaagcttgaggattccttcatctctttgcccaatggcattgtgattattaaactctttttctgctgcaaa

SEQ ID NO: 437571 - DNA, 949 bp, Homo sapiens
atgacattctgtggtgtagctttgcactaggacggttgtaccacgtcgtgattgggcaatacttggcgtgtgcccatttgccttgtgtctgcagtcccctggccacacccagtaacagttctgtgatctatgagaatagtttccttagcgagctttcccttcaaatactttgcagccaggtagagaagtttggagtgaagattttgttctttgtttcttcacaatatggatatgaatcttcttttgaaaacgttaaagtaaattacctcttttcagatattgtcttcatgtgaacttggtatcctgtttccatcccagccttctataacccagtaacatctttgttgaaaccagtgggtgagaaagacacctggtcaggaatgtggaccacgggccaactcaggctcgcccatggtgtcagactaaagacaaacaaggactctctgtataagaacatacatatgatagttgagaaagacacatattctgatcatgaagaaataaacacaagttaaatatgactaagcagaaagatggaaggaccaggaatggtgatgctaacttggaaccacgatgcaggctctaaactcctctacaatcatcctcccttgtgagaaaaatacataagatctaaggcacatgagatgatatgctttctgtttgagtttctcctttatgttacgcatactgataaaattgttgatgccagttgatctgaaggtcccagcaaggagccgactcacagaagaatgaagttttcacatcatgatgatttaatcttccttgacctgagcaattgacaaccccaattctccagaacctcacccgccacaatccccttaaaaaccctggcccagaacccctcaagcagacagatgtgaagcttgaggattccttcatctctttgcccaatggcattgtgattattaaactctttttctgctgcaaa

SEQ ID NO: 437572 - DNA, 863 bp, Homo sapiens
atgacattctgtggtgtagctttgcactaggacggttgtaccacgtcgtgattgggcaatacttggcgtgtgcccatttgccttgtgtctgcagtcccctggccacacccagtaacagttctgtgatctatgagaatagtttccttagcgagctttcccttcaaatactttgcagccaggtagagaagtttggagtgaagattttgttctttgtttcttcacaatatggatatgaatcttcttttgaaaacgttaaagtaaattacctcttttcagatattgtcttcatgtgaacttggtatcctgtttccatcccagccttctataacccagtaacatctttgttgaaaccagtgggtgagaaagacacctggtcaggaatgtggaccacgggccaactcaggctcgcccatggtgtcagactaaagacaaacaaggactctctgtataagaacatacatatgatagttgagaaagacacatattctgatcatgaagaaataaacacaagttaaatatgactaagcagaaagatggaaggaccaggaatggtgatgctaacttggaaccacgatgcaggctctaaactcctctacaatcatcctcccttgtgagaaaaatacttgatctgaaggtcccagcaaggagccgactcacagaagaatgaagttttcacatcatgatgatttaatcttccttgacctgagcaattgacaaccccaattctccagaacctcacccgccacaatccccttaaaaaccctggcccagaacccctcaagcagacagatgtgaagcttgaggattccttcatctctttgcccaatggcattgtgattattaaactctttttctgctgcaaa

SEQ ID NO: 437573 - DNA, 767 bp, Homo sapiens
acacagggatagctgagccccagctgggggtggaagctgagccagagacagtcacagaggaacaagatcaagatgcgctttaactgagaagcccccaaggcagaggctgagaatcagaagacatttcagcagacatctacaaatctgaaggacaaaacatggttcaagcatctgggcacaggcggtaagtaccccaccctctgatgagaggaagatggcgcgagagttcctggccgagttcatgagcacatatgtcatgatggagtggctgaccgggatgctccagctgtgtctcttcgccatcgtggaccaggagaacaacccagcactgccaggaacacacgcactggtgataggcatcctcgtggtcatcatcagggtgtaccatggcatgaacacaggatatgccatcaatccgtcccgggacctgccccccccgcatcttcaccttcattgctggttggggcaaactggtcttcaggtggcatcatctacctggtcttcattggctccaccatcccacgggagcccctgaaattggaggactctgtggcatatgaagaccacgggataactgtattgcccaagatgggatctcatgaacccatgatctctccccttaccctcatctccgtgagccctgccaacagatcttcagtccaccctgccccacccttacatgaatccatggccctagagcacttctaagcagagattatttgtgatcccatcccttccccaataaagagaagcttgtcccacagcag

SEQ ID NO: 437574 - DNA, 799 bp, Homo sapiens
acacagggatagctgagccccagctgggggtggaagctgagccagagacagtcacagaggaacaagatcaagatgcgctttaactgagaagcccccaaggcagaggctgagaatcagaagacatttcagcagacatctacaaatctgaaggacaaaacatggttcaagcatctgggcacaggcggtccacccgtggctccaaaatggtctcctggtccgtgatagcaaagatccaggaaatatggtgcgaggaagatgagaggaagatggcgcgagagttcctggccgagttcatgagcacatatgtcatgatgatacagtcttgctttgtcacagtggtgcaatctcggctcactgcaacctctacctcctgggttcaagcgattcttgcatctcagcctctggagtagctggaattacaggtgcatgccaccattgcccagccaattttttgtatttttaggaaagacaaggtttcaccatgttgtcaaggctggtcttgaactccctgacttcaagtgatcctcccacctcggcctcccaaagtgctgggattacaggcatgagtcaccgtgcccagcccaatatcacagtcttgacccttaacctctatgctctgtaccttagcttaaatattgccagcttttaaagactggcttgttaatgctcccccagccagggtaaagtcctcactttcaggtagttcaagatgcctctctcggcctcagtttccccatttatagagtgggagaaaaattcttgctgtgcagatttgttgtgaggattgaagacagtagca

SEQ ID NO: 437575 - DNA, 506 bp, Homo sapiens
ctccagctgtgtctcttcgccatcgtggaccaggagaacaacccagcactgccaggaacacacgcactggtgataggcatcctcgtggtcatcatcagggtgtaccatggcatgaacacaggatatgccatcaatccgtcccgggacctgccccccccgcatcttcaccttcattgctggttggggcaaactggtcttcaggtactgcccctgcccaggcccattcctttgagattttctgtggggcccctgtgtgttgaggtgtggggggtgatgtgaggggcagcacaggagggtcctgcagagcccccaggtggcctggggagcaggagtgagtcccaacatttccccaggccagtacagatacagatcctgcacctgcactgagtgtcaaccctgtccctgaatcgggctgaggctgaccagggccccgggttgggggtgtttcctgggttagcctgaggatgactcctctgctcaaccagtcttggcccgaggtggatgag

SEQ ID NO: 437576 - DNA, 283 bp, Homo sapiens
gtccacccgtggctccaaaatggtctcctggtccgtgatagcaaagatccaggaaatatggtgcgaggaagatgagaggaagatggcgcgagagttcctggccgagttcatgagcacatatgtcatgatggtgagtgggcgggcagcacgaagtgggtgggctctgccagggccttccatgaccccctccccattctgaccccatgggtcacattgtccattccttgcctctgagctgggagcctggggaagcagcgaggaaagtaagggggggggggctttc

SEQ ID NO: 437577 - DNA, 233 bp, Homo sapiens
gcggccgcctactactactactactgctcgaattccaagcttctaacgatgtacggggccatggtgtcagactaaagacaaacaaggactctctgtataaggtactggtcgtgtgtgtgttagtggagatgaagcctgtgctctacagacagggagtcacacagacacttttctataatttcttacatactttgaatgttcaagtataaagtctaatgttaaatttgattgaa

SEQ ID NO: 437578 - DNA, 757 bp, Homo sapiens
acacagggatagctgagccccagctgggggtggaagctgagccagagacagtcacagaggaacaagatcaagatgcgctttaactgagaagcccccaaggcagaggctgagaatcagaagacatttcagcagacatctacaaatctgaaggacaaaacatggttcaagcatctgggcacaggcggtccacccgtggctccaaaatggtctcctggtccgtgatagcaaagatccaggaaatatggtgcgaggaagatgagaggaagatggcgcgagagttcctggccgagttcatgagcacatatgtcatgatggagtggctgaccgggatgctccagctgtgtctcttcgccatcgtggaccaggagaacaacccagcactgccaggaacacacgcactggtgataggcatcctcgtggtcatcatcagggtgtaccatggcatgaacacaggatatgccatcaatccgtcccgggacctgccccccccgcatcttcaccttcattgctggttggggcaaactggtcttcaggtggcatcatctacctggtcttcattggctccaccatcccacgggagcccctgaaattggaggactctgtggcatatgaagaccacgggataactgtattgcccaagatgggatctcatgaacccatgatctctccccttaccctatatttccggggagcctgggcaaaaaaatttttatccccccctgcccccctctttcatgaattctggggccctaaccct

SEQ ID NO: 437579 - DNA, 1676 bp, Homo sapiens
gcgggggcggccgggcggcgggggcggggaaggggcgggcgcggaggcggtgccgcagcccgagccggagcccgagccggatcccgaggcgacgggagccgaacaggagccgccgctgaagccaccgccgggtgcccagcgccgccgccgcccccgagctcccccgcgcccctgcccgcgggcggccggtgggcagcgggcgccatggccgcgccggagccgctgcggccgcgcctgtgccgcttggtgcgcggagagcagggctacggcttccacctgcacggcgagaagggccgccgcgggcagttcatccggcgcgtggaacccggttcccccgccgaggccgccgcgctgcgcgctggggaccgcctggtcgaggtcaacggcgtcaacgtggagggcgagacgcaccaccaggtggtgcaaaggatcaaggctgtggaggggcagactcggctgctggtggtggaccaggagacagatgaggagctccgccggcggcagctgacctgtaccgaggagatggcccagcgagggctcccacccgcccacgacccctgggagccgaagccagactgggcacacaccggcagccacagctccgaagctggcaagaaggatgtcagtgggcccctgagggagctgcgccctcggctctgccacctgcgaaagggacctcagggctatgggttcaacctgcatagtgacaagtcccggcccggccagtacatccgctctgtggacccgggctcacctgccgcccgctctggcctccgcgcccaggaccggctcattgaggtgaacgggcagaatgtggagggactgcgccatgctgaggtggtggccagcatcaaggcacgggaggacgaggcccggctgctggtcgtggaccccgagacagatgaacacttcaagcggcttcgggtcacacccaccgaggagcacgtggaaggtcctctgccgtcacccgtcaccaatggaaccagccctgcccagctcaatggtggctctgcgtgctcgtcccgaagtgacctgcctggttccgacaaggacactgaggagagcggcctccacctgagccccacggcggccgaggccaaggagaaggctcgagccatgcgagtcaacaagcgcgcgccacagatggactggaacaggaagcgtgaaatcttcagcaacttctgagccccttcctgcctgtctcgggaccctgggacccctcccgcacggaccttgggcctcagcctgccccgagctcccccagcctcagtggactggagggtggtcctgccattgcccagaaatcagccccagccccggtgagcccccatcctgcccctgcccaccaggtactgggggcctgtggcagcaagatagggggagagagacccagagatgtgagagagagtcagagacagagacagagagagagagagagagacacagagagagacagagagagagcgagcgagcgcgcggcagccgcggggcgagggcctttgctgctctgccggggcctgctgactgaaaggaatttgtgtttttgctttttttccaaaaagatctccagctccacacatgtttccacttaataccagagaccccccccccccccttcccctcccccttgggacgcgctctaaataattgcaataaaacaaacctttctctgcaaa

SEQ ID NO: 437580 - DNA, 527 bp, Homo sapiens
tcagcagcggccgtcctgagtgggagtccctgggacttcccagtggccaagttggggcgcccagcctcttcgtgggggccttgggtaaggccagggaggcctgatgtggccgtaggagctgcccctgcccacctgccctggtgtgggggtccctaggccacaccctgctccccacccagctaccctgtgcgcctgtgccctgctgggggcctgggctctccgaggggcctgaggatggaggccccacgtccccgaggagggcggcctctggacaggcccctcattccgcgcggcagctcccaggcctggggaacgtaggtgtgtgagagcggcacccgggaaggacgcctggcctctggctcagccctgcttggcgggctcccccgtggacaccctgttgactttgcacttccctcccgggccccgcacccccgaaccgaccaccgatcgaccggcaccgctgttgcctcgtaagccatagcgcatgcgcgctctcagaataaacaggccctgcctgggaaccacac

SEQ ID NO: 437581 - DNA, 1741 bp, Homo sapiens
  misc_feature (1723)..(1723): n is a, c, g, or t
  misc_feature (1727)..(1727): n is a, c, g, or t
  misc_feature (1734)..(1734): n is a, c, g, or t
gcgggggcggccgggcggcgggggcggggaaggggcgggcgcggaggcggtgccgcagcccgagccggagcccgagccggatcccgaggcgacgggagccgaacaggagccgccgctgaagccaccgccgggtgcccagcgccgccgccgcccccgagctcccccgcgcccctgcccgcgggcggccggtgggcagcgggcgccatggccgcgccggagccgctgcggccgcgcctgtgccgcttggtgcgcggagagcagggctacggcttccacctgcacggcgagaagggccgccgcgggcagttcatccggcgcgtggaacccggttcccccgccgaggccgccgcgctgcgcgctggggaccgcctggtcgaggtcaacggcgtcaacgtggagggcgagacgcaccaccaggtggtgcaaaggatcaaggctgtggaggggcagactcggctgctggtggtggaccaggagacagatgaggagctccgccggcggcagctgacctgtaccgaggagatggcccagcgagggctcccacccgcccacgacccctgggagccgaagccagactgggcacacaccggcagccacagctccgaagctggcaagaaggatgtcagtgggcccctgagggagctgcgccctcggctctgccacctgcgaaagggacctcagggctatgggttcaacctgcatagtgacaagtcccggcccggccagtacatccgctctgtggacccgggctcacctgccgcccgctctggcctccgcgcccaggaccggctcattgaggtgaacgggcagaatgtggagggactgcgccatgctgaggtggtggccagcatcaaggcacgggaggacgaggcccggctgctggtcgtggaccccgagacagatgaacacttcaagcggcttcgggtcacacccaccgaggagcacgtggaaggtcctctgccgtcacccgtcaccaatggaaccagccctgcccagctcaatggtggctctgcgtgctcgtcccgaagtgacctgcctggttccgacaaggacactgaggatggcagtgcctggaagcaagatcccttccaggagagcggcctccacctgagccccacggcggccgaggccaaggagaaggctcgagccatgcgagtcaacaagcgcgcgccacagatggactggaacaggaagcgtgaaatcttcagcaacttctgagccccttcctgcctgtctcgggaccctgggacccctcccgcacggaccttgggcctcagcctgccccgagctcccccagcctcagtggactggagggtggtcctgccattgcccagaaatcagccccagccccggtgagcccccatcctgcccctgcccaccaggtactgggggcctgtggcagcaagatagggggagagagacccagagatgtgagagagagtcagagacagagacagagagagagagagagagacacagagagagacagagagagagcgagcgagcgcgcggcagccgcggggcgagggcctttgctgctctgccggggcctgctgactgaaaggaatttgtgtttttgctttttttccaaaaagatctccagctccacacatgtttccacttaataccagagaccccccccccccccttcccctcccccttgggacgcgctctaaataattgcaataaaacaaacctttctctgcaaaaaaaagaaaaaaanacanaaaaaanaaaaaaa

SEQ ID NO: 437582 - DNA, 1674 bp, Homo sapiens
  misc_feature (89)..(89): n is a, c, g, or t
  misc_feature (153)..(153): n is a, c, g, or t
  misc_feature (162)..(162): n is a, c, g, or t
  misc_feature (195)..(195): n is a, c, g, or t
ccggccggacgcctgccacttgctgtcactgtgccgctgtcatggcacgctccgggagtgcacgccacctgcccgggctccggagcccntccacggagccaccccagaggctggtacaggatgtcagtgggcccctgaggagctgcgcctcgntctgcaccntgcgaaagggacctcagggctatgggttcaacntgcatagttccgcttggtgcgcggagagcagggctacggcttccacctgcacggcgagaagggccgccgcgggcagttcatccggcgcgtggaacccggttcccccgccgaggccgccgcgctgcgcgctggggaccgcctggtcgaggtcaacggcgtcaacgtggagggcgagacgcaccaccaggtggtgcaaaggatcaaggctgtggaggggcagactcggctgctggtggtggaccaggagacagatgaggagctccgccggcggcagctgacctgtaccgaggagatggcccagcgagggctcccacccgcccacgacccctgggagccgaagccagactgggcacacaccggcagccacagctccgaagctggcaagaaggatgtcagtgggcccctgagggagctgcgccctcggctctgccacctgcgaaagggacctcagggctatgggttcaacctgcatagtgacaagtcccggcccggccagtacatccgctctgtggacccgggctcacctgccgcccgctctggcctccgcgcccaggaccggctcattgaggtgaacgggcagaatgtggagggactgcgccatgctgaggtggtggccagcatcaaggcacgggaggacgaggcccggctgctggtcgtggaccccgagacagatgaacacttcaagcggcttcgggtcacacccaccgaggagcacgtggaaggtcctctgccgtcacccgtcaccaatggaaccagccctgcccagctcaatggtggctctgcgtgctcgtcccgaagtgacctgcctggttccgacaaggacactgaggatggcagtgcctggaagcaagatcccttccaggagagcggcctccacctgagccccacggcggccgaggccaaggagaaggctcgagccatgcgagtcaacaagcgcgcgccacagatggactggaacaggaagcgtgaaatcttcagcaacttctgagccccttcctgcctgtctcgggaccctgggacccctcccgcacggaccttgggcctcagcctgccccgagctcccccagcctcagtggactggagggtggtcctgccattgcccagaaatcagccccagccccggtgagcccccatcctgcccctgcccaccaggtactgggggcctgtggcagcaagatagggggagagagacccagagatgtgagagagagtcagagacagagacagagagagagagagagagacacagagagagacagagagagagcgagcgagcgcgcggcagccgcggggcgagggcctttgctgctctgccggggcctgctgactgaaaggaatttgtgtttttgctttttttccaaaaagatctccagctccacacatgtttccacttaataccagagaccccccccccccccttcccctcccccttgggacgcgctctaaataattgcaataaaacaaacctttctctgcaaa

SEQ ID NO: 437583 - DNA, 1220 bp, Homo sapiens
ggccaccccggccggacgcctgccacttgctgtcactgtgccgctgtcatggcacgctccgggagtgccacgccacctgcccgggctccgggagcccctccacggagcccaccccagaggctggtacaggatgtcagtgggcccctgagggagctgcgccctcggctctgccacctgcgaaagggacctcagggctatgggttcaacctgcatagtgacaagtcccggcccggccagtacatccgctctgtggacccgggctcacctgccgcccgctctggcctccgcgcccaggaccggctcattgaggtgaacgggcagaatgtggagggactgcgccatgctgaggtggtggccagcatcaaggcacgggaggacgaggcccggctgctggtcgtggaccccgagacagatgaacacttcaagcggcttcgggtcacacccaccgaggagcacgtggaaggtcctctgccgtcacccgtcaccaatggaaccagccctgcccagctcaatggtggctctgcgtgctcgtcccgaagtgacctgcctggttccgacaaggacactgaggatggcagtgcctggaagcaagatcccttccaggagagcggcctccacctgagccccacggcggccgaggccaaggagaaggctcgagccatgcgagtcaacaagcgcgcgccacagatggactggaacaggaagcgtgaaatcttcagcaacttctgagccccttcctgcctgtctcgggaccctgggacccctcccgcacggaccttgggcctcagcctgccccgagctcccccagcctcagtggactggagggtggtcctgccattgcccagaaatcagccccagccccggtgagcccccatcctgcccctgcccaccaggtactgggggcctgtggcagcaagatagggggagagagacccagagatgtgagagagagtcagagacagagacagagagagagagagagagacacagagagagacagagagagagcgagcgagcgcgcggcagccgcggggcgagggcctttgctgctctgccggggcctgctgactgaaaggaatttgtgtttttgctttttttccaaaaagatctccagctccacacatgtttccacttaataccagagaccccccccccccccttcccctcccccttgggacgcgctctaaataattgcaataaaacaaacctttctctgcaaa

SEQ ID NO: 437584 - DNA, 1501 bp, Homo sapiens
cagcggtgccaggccctggaggtggtggcagaccctgagccctctgccccctgcccctagcccatgtctccacccccatctggagggccttgggggctaagagcagccctggcctggcctggcctgtggtccctcagggacacacagggaggtaggaggtgagggaagggccctggcagcccccagcccgcctgcacagtctcccctgcgcacgccctcaagcttggcgctccctggaaacctgagctgcctcctgcctgctccggccaccgccatgtttaactgagcacgggcagccgctggccaccgccgccgcaccctggcccaccccctggctgggaggtggtcattgggcctggccttgcctgcatggtcccctggcccagagccctacctgcaggatgccagaggatgtcagtgggcccctgagggagctgcgccctcggctctgccacctgcgaaagggacctcagggctatgggttcaacctgcatagtgacaagtcccggcccggccagtacatccgctctgtggacccgggctcacctgccgcccgctctggcctccgcgcccaggaccggctcattgaggtgaacgggcagaatgtggagggactgcgccatgctgaggtggtggccagcatcaaggcacgggaggacgaggcccggctgctggtcgtggaccccgagacagatgaacacttcaagcggcttcgggtcacacccaccgaggagcacgtggaaggtcctctgccgtcacccgtcaccaatggaaccagccctgcccagctcaatggtggctctgcgtgctcgtcccgaagtgacctgcctggttccgacaaggacactgaggatggcagtgcctggaagcaagatcccttccaggagagcggcctccacctgagccccacggcggccgaggccaaggagaaggctcgagccatgcgagtcaacaagcgcgcgccacagatggactggaacaggaagcgtgaaatcttcagcaacttctgagccccttcctgcctgtctcgggaccctgggacccctcccgcacggaccttgggcctcagcctgccccgagctcccccagcctcagtggactggagggtggtcctgccattgcccagaaatcagccccagccccggtgagcccccatcctgcccctgcccaccaggtactgggggcctgtggcagcaagatagggggagagagacccagagatgtgagagagagtcagagacagagacagagagagagagagagagacacagagagagacagagagagagcgagcgagcgcgcggcagccgcggggcgagggcctttgctgctctgccggggcctgctgactgaaaggaatttgtgtttttgctttttttccaaaaagatctccagctccacacatgtttccacttaataccagagaccccccccccccccttcccctcccccttgggacgcgctctaaataattgcaataaaacaaacctttctctgcaaa

SEQ ID NO: 437585 - DNA, 1653 bp, Homo sapiens
gcgggggcggccgggcggcgggggcggggaaggggcgggcgcggaggcggtgccgcagcccgagccggagcccgagccggatcccgaggcgacgggagccgaacaggagccgccgctgaagccaccgccgggtgcccagcgccgccgccgcccccgagctcccccgcgcccctgcccgcgggcggccggtgggcagcgggcgccatggccgcgccggagccgctgcggccgcgcctgtgccgcttggtgcgcggagagcagggctacggcttccacctgcacggcgagaagggccgccgcgggcagttcatccggcgcgtggaacccggttcccccgccgaggccgccgcgctgcgcgctggggaccgcctggtcgaggtcaacggcgtcaacgtggagggcgagacgcaccaccaggtggtgcaaaggatcaaggctgtggaggggcagactcggctgctggtggtggaccaggagacagatgaggagctccgccggcggcagctgacctgtaccgaggagatggcccagcgagggctcccacccgcccacgacccctgggagccgaagccagactgggcacacaccggcagccacagctccgaagctggcaagaaggatgtcagtgggcccctgagggagctgcgccctcggctctgccacctgcgaaagggacctcagggctatgggttcaacctgcatagtgacaagtcccggcccggccagtacatccgctctgtggacccgggctcacctgccgcccgctctggcctccgcgcccaggaccggctcattgaggtgaacgggcagaatgtggagggactgcgccatgctgaggtggtggccagcatcaaggcacgggaggacgaggcccggctgctggtcgtggaccccgagacagatgaacacttcaagcggcttcgggtcacacccaccgaggagcacgtggaaggtcctctgccgtcacccgtcaccaatggaaccagccctgcccagctcaatggtggctctgcgtgctcgtcccgaagtgacctgcctggttccgacaaggacactgaggatggcagtgcctggaagcaagatcccttccaggagagcggcctccacctgagccccacggcggccgaggccaaggagaaggctcgagccatgcgagtcaacaagcgcgcgccacagatggactggaacaggaagcgtgaaatcttcagcaacttctgagccccttcctgcctgtctcgggaccctgggacccctcccgcacggaccttgggcctcagcctgccccgagctcccccagcctcagtggactggagggtggtcctgccattgcccagaaatcagccccagccccggtgagcccccatcctgcccctgcccaccaggtactgggggcctgtggcagcaagatagggggagagagacccagagatgtgagagagagtcagagacagagacacagccgcggggcgagggcctttgctgctctgccggggcctgctgactgaaaggaatttgtgtttttgctttttttccaaaaagatctccagctccacacatgtttccacttaataccagagaccccccccccccccttcccctcccccttgggacgcgctctaaataattgcaataaaacaaacctttctctgcaaa

SEQ ID NO: 437586 - DNA, 956 bp, Homo sapiens
gcgggggcggccgggcggcgggggcggggaaggggcgggcgcggaggcggtgccgcagcccgagccggagcccgagccggatcccgaggcgacgggagccgaacaggagccgccgctgaagccaccgccgggtgcccagcgccgccgccgcccccgagctcccccgcgcccctgcccgcgggcggccggtgggcagcgggcgccatggccgcgccggagccgctgcggccgcgcctgtgccgcttggtgcgcggagagcagggctacggcttccacctgcacggcgagaagggccgccgcgggcagttcatccggcgcgtggaacccggttcccccgccgaggccgccgcgctgcgcgctggggaccgcctggtcgaggtcaacggcgtcaacgtggagggcgagacgcaccaccaggtggtgcaaaggatcaaggctgtggaggggcagactcggctgctggtggtggaccaggagacagatgaggagctccgccggcggcagctgacctgtaccgaggagatggcccagcgagggctcccacccgcccacgacccctgggagccgaagccagactgggcacacaccggcagccacagctccgaagctggcaagaaggatgtcagtgggcccctgagggagctgcgccctcggctctgccacctgcgaaagggacctcagggctatgggttcaacctgcatagtgacaagtcccggcccggccagtacatccgctctgtggacccgggctcacctgccgcccgctctggcctccgcgcccaggaccggctcattgaggtgaacgggcagaatgtggagggactgcgccatgctgaggtggtggccagcatcaaggcacgggaggacgaggcccgatcgaccggcaccgctgttgcctcgtaagccatagcgcatgcgcgctctcagaataaacaggccctgcctgggaaccacac

SEQ ID NO: 437587 - DNA, 613 bp, Homo sapiens
gcgggggcggccgggcggcgggggcggggaaggggcgggcgcggaggcggtgccgcagcccgagccggagcccgagccggatcccgaggcgacgggagccgaacaggagccgccgctgaagccaccgccgggtgcccagcgccgccgccgcccccgagctcccccgcgcccctgcccgcgggcggccggtgggcagcgggcgccatggccgcgccggagccgctgcggccgcgcctgtgccgcttggtgcgcggagagcagggctacggcttccacctgcacggcgagaagggccgccgcgggcagttcatccggcgcgtggaacccggttcccccgccgaggccgccgcgctgcgcgctggggaccgcctggtcgaggtcaacggcgtcaacgtggagggcgagacgcaccaccaggtgggggccagcgctcgcccccggcccgccgccccctccccgagcgcgtccccctggggcgagcaggggtcgcacgggggcccgagggggctcccgcggggaggacgcggacgttgtcgggaggcagcggcccggcgccttcggagtcccggcgcaggaagctcagtcctgcacgggggtgggggggggcatcctg

SEQ ID NO: 437588 - DNA, 1709 bp, Homo sapiens
gcgggggcggccgggcggcgggggcggggaaggggcgggcgcggaggcggtgccgcagcccgagccggagcccgagccggatcccgaggcgacgggagccgaacaggagccgccgctgaagccaccgccgggtgcccagcgccgccgccgcccccgagctcccccgcgcccctgcccgcgggcggccggtgggcagcgggcgccatggccgcgccggagccgctgcggccgcgcctgtgccgcttggtgcgcggagagcagggctacggcttccacctgcacggcgagaagggccgccgcgggcagttcatccggcgcgtggaacccggttcccccgccgaggccgccgcgctgcgcgctggggaccgcctggtcgaggtcaacggcgtcaacgtggagggcgagacgcaccaccaggtggtgcaaaggatcaaggctgtggaggggcagactcggctgctggtggtggaccaggagacagatgaggagctccgccggcggcagctgacctgtaccgaggagatggcccagcgagggctcccacccgcccacgacccctgggagccgaagccagactgggcacacaccggcagccacagctccgaagctggcaagaaggatgtcagtgggcccctgagggagctgcgccctcggctctgccacctgcgaaagggacctcagggctatgggttcaacctgcatagtgacaagtcccggcccggccagtacatccgctctgtggacccgggctcacctgccgcccgctctggcctccgcgcccaggaccggctcattgaggtgaacgggcagaatgtggagggactgcgccatgctgaggtggtggccagcatcaaggcacgggaggacgaggcccggctgctggtcgtggaccccgagacagatgaacacttcaagcggcttcgggtcacacccaccgaggagcacgtggaaggtcctctgccgtcacccgtcaccaatggaaccagccctgcccagctcaatggtggctctgcgtgctcgtcccgaagtgacctgcctggttccgacaaggacactgaggatggcagtgcctggaagcaagatcccttccaggagagcggcctccacctgagccccacggcggccgaggccaaggagaaggctcgagccatgcgagtcaacaagcgcgcgccacagatggactggaacaggaagcgtgaaatcttcagcaacttctgagccccttcctgcctgtctcgggaccctgggacccctcccgcacggaccttgggcctcagcctgccccgagctcccccagcctcagtggactggagggtggtcctgccattgcccagaaatcagccccagccccggtgagcccccatcctgcccctgcccaccaggtactgggggcctgtggcagcaagatagggggagagagacccagagatgtgagagagagtcagagacagagacagagagagagagagagagacacagagagagacagagagagagcgagcgagcgcgcggcagccgcggggcgagggcctttgctgctctgccggggcctgctgactgaaaggaatttgtgtttttgctttttttccaaaaagatctccagctccacacatgtttccacttaataccagagaccccccccccccccttcccctcccccttgggacgcgctctaaataattgcaataaaacaaacctttctctgcaaa

SEQ ID NO: 437589 - DNA, 739 bp, Homo sapiens
  misc_feature (89)..(89): n is a, c, g, or t
  misc_feature (153)..(153): n is a, c, g, or t
  misc_feature (162)..(162): n is a, c, g, or t
  misc_feature (195)..(195): n is a, c, g, or t
ccggccggacgcctgccacttgctgtcactgtgccgctgtcatggcacgctccgggagtgcacgccacctgcccgggctccggagcccntccacggagccaccccagaggctggtacaggatgtcagtgggcccctgaggagctgcgcctcgntctgcaccntgcgaaagggacctcagggctatgggttcaacntgcatagttccgcttggtgcgcggagagcagggctacggcttccacctgcacggcgagaagggccgccgcgggcagttcatccggcgcgtggaacccggttcccccgccgaggccgccgcgctgcgcgctggggaccgcctggtcgaggtcaacggcgtcaacgtggagggcgagacgcaccaccaggtggtgcaaaggatcaaggctgtggaggggcagactcggctgctggtggtggaccaggagacagatgaggagctccgccggcggcagctgacctgtaccgaggagatggcccagcgagggctcccacccgcccacgacccctgggagccgaagccagactgggcacacaccggcagccacagctccgaagctggcaagaagctgactgaaaggaatttgtgtttttgctttttttccaaaaagatctccagctccacacatgtttccacttaataccagagaccccccccccccccttcccctcccccttgggacgcgctctaaataattgcaataaaacaaacctttctctgcaaa

SEQ ID NO: 437590 - DNA, 1384 bp, Homo sapiens
cgcacgcctgggccagcccagagtggtgccactgcccatgtgctgcccggaatgtgggccactgacccgctcctatcgcccattcgccccaggtggtgcaaaggatcaaggctgtggaggggcagactcggctgctggtggtggaccaggagacagatgaggagctccgccggcggcagctgacctgtaccgaggagatggcccagcgagggctcccacccgcccacgacccctgggagccgaagccagactgggcacacaccggcagccacagctccgaagctggcaagaaggatgtcagtgggcccctgagggagctgcgccctcggctctgccacctgcgaaagggacctcagggctatgggttcaacctgcatagtgacaagtcccggcccggccagtacatccgctctgtggacccgggctcacctgccgcccgctctggcctccgcgcccaggaccggctcattgaggtgaacgggcagaatgtggagggactgcgccatgctgaggtggtggccagcatcaaggcacgggaggacgaggcccggctgctggtcgtggaccccgagacagatgaacacttcaagcggcttcgggtcacacccaccgaggagcacgtggaaggtcctctgccgtcacccgtcaccaatggaaccagccctgcccagctcaatggtggctctgcgtgctcgtcccgaagtgacctgcctggttccgacaaggacactgaggatggcagtgcctggaagcaagatcccttccaggagagcggcctccacctgagccccacggcggccgaggccaaggagaaggctcgagccatgcgagtcaacaagcgcgcgccacagatggactggaacaggaagcgtgaaatcttcagcaacttctgagccccttcctgcctgtctcgggaccctgggacccctcccgcacggaccttgggcctcagcctgccccgagctcccccagcctcagtggactggagggtggtcctgccattgcccagaaatcagccccagccccggtgagcccccatcctgcccctgcccaccaggtactgggggcctgtggcagcaagatagggggagagagacccagagatgtgagagagagtcagagacagagacagagagagagagagagagacacagagagagacagagagagagcgagcgagcgcgcggcagccgcggggcgagggcctttgctgctctgccggggcctgctgactgaaaggaatttgtgtttttgctttttttccaaaaagatctccagctccacacatgtttccacttaataccagagaccccccccccccccttcccctcccccttgggacgcgctctaaataattgcaataaaacaaacctttctctgcaaa

SEQ ID NO: 437591 - DNA, 1712 bp, Homo sapiens
ggcagggcctgggatggtagcggggggtccttccgggcaccaggaggccctctgtgccctgtccacactaagctcctgccccagcccctgcttgctgggcccacgggggtggggcggctcattttcctggaatgtgaaagcaaacagagccgccaccgcagccagccccacggaggcctctggagagaaaacaaaactgctggcctaggagcgcctgccccacgctctggaggagagcccggggcagggggacgcacaggcagagccctcagggacaaccgccccaggaggccgacggcgacagttcatcccacctggtgcttcctcccaccctgcctgtgcgccacgctggcctcgagccaaaggaattctcccagcaacccgggaaggcggctgggcccgtcggggaggcttctgggtttgaaaacaggctttgcccaagttcccacagctaaagctctgtcacaggcagcctgggtgcccggagtgtttgccactgagacctgggcctgcccgtggggggcacggtaccgagtttgggcagtggcggcaccaccggggagtggcctctggaggcgggaggctggagcaagagactgaccctgtccgttgggcctgcaggatgtcagtgggcccctgagggagctgcgccctcggctctgccacctgcgaaagggacctcagggctatgggttcaacctgcatagtgacaagtcccggcccggccagtacatccgctctgtggacccgggctcacctgccgcccgctctggcctccgcgcccaggaccggctcattgaggtgaacgggcagaatgtggagggactgcgccatgctgaggtggtggccagcatcaaggcacgggaggacgaggcccggctgctggtcgtggaccccgagacagatgaacacttcaagcggcttcgggtcacacccaccgaggagcacgtggaaggtcctctgccgtcacccgtcaccaatggaaccagccctgcccagctcaatggtggctctgcgtgctcgtcccgaagtgacctgcctggttccgacaaggacactgaggatggcagtgcctggaagcaagatcccttccaggagagcggcctccacctgagccccacggcggccgaggccaaggagaaggctcgagccatgcgagtcaacaagcgcgcgccacagatggactggaacaggaagcgtgaaatcttcagcaacttctgagccccttcctgcctgtctcgggaccctgggacccctcccgcacggaccttgggcctcagcctgccccgagctcccccagcctcagtggactggagggtggtcctgccattgcccagaaatcagccccagccccggtgagcccccatcctgcccctgcccaccaggtactgggggcctgtggcagcaagatagggggagagagacccagagatgtgagagagagtcagagacagagacagagagagagagagagagacacagagagagacagagagagagcgagcgagcgcgcggcagccgcggggcgagggcctttgctgctctgccggggcctgctgactgaaaggaatttgtgtttttgctttttttccaaaaagatctccagctccacacatgtttccacttaataccagagaccccccccccccccttcccctcccccttgggacgcgctctaaataattgcaataaaacaaacctttctctgcaaa

SEQ ID NO: 437592 - DNA, 977 bp, Homo sapiens
tcgcggaaatctctgacacgccgcagacatcctaggaccctccgcgcccaggaccggctcattgaggtgaacgggcagaatgtggagggactgcgccatgctgaggtggtggccagcatcaaggcacgggaggacgaggcccggctgctggtcgtggaccccgagacagatgaacacttcaagcggcttcgggtcacacccaccgaggagcacgtggaaggtcctctgccgtcacccgtcaccaatggaaccagccctgcccagctcaatggtggctctgcgtgctcgtcccgaagtgacctgcctggttccgacaaggacactgaggatggcagtgcctggaagcaagatcccttccaggagagcggcctccacctgagccccacggcggccgaggccaaggagaaggctcgagccatgcgagtcaacaagcgcgcgccacagatggactggaacaggaagcgtgaaatcttcagcaacttctgagccccttcctgcctgtctcgggaccctgggacccctcccgcacggaccttgggcctcagcctgccccgagctcccccagcctcagtggactggagggtggtcctgccattgcccagaaatcagccccagccccggtgagcccccatcctgcccctgcccaccaggtactgggggcctgtggcagcaagatagggggagagagacccagagatgtgagagagagtcagagacagagacagagagagagagagagagacacagagagagacagagagagagcgagcgagcgcgcggcagccgcggggcgagggcctttgctgctctgccggggcctgctgactgaaaggaatttgtgtttttgctttttttccaaaaagatctccagctccacacatgtttccacttaataccagagaccccccccccccccttcccctcccccttgggacgcgctctaaataattgcaataaaacaaacctttctctgcaaa

SEQ ID NO: 437593 - DNA, 774 bp, Homo sapiens
gcgggggcggccgggcggcgggggcggggaaggggcgggcgcggaggcggtgccgcagcccgagccggagcccgagccggatcccgaggcgacgggagccgaacaggagccgccgctgaagccaccgccgggtgcccagcgccgccgccgcccccgagctcccccgcgcccctgcccgcgggcggccggtgggcagcgggcgccatggccgcgccggagccgctgcggccgcgcctgtgccgcttggtgcgcggagagcagggctacggcttccacctgcacggcgagaagggccgccgcgggcagttcatccggcgcgtggaacccggttcccccgccgaggccgccgcgctgcgcgctggggaccgcctggtcgaggtcaacggcgtcaacgtggagggcgagacgcaccaccaggtggtgcaaaggatcaaggctgtggaggggcagactcggctgctggtggtggaccaggagacagatgaggagctccgccggcggcagctgacctgtaccgaggagatggcccagcgagggctcccacccgcccacgacccctgggagccgaagccagactgggcacacaccggcagccacagctccgaagctggcaagaagctgactgaaaggaatttgtgtttttgctttttttccaaaaagatctccagctccacacatgtttccacttaataccagagaccccccccccccccttcccctcccccttgggacgcgctctaaataattgcaataaaacaaacctttctctgcaaa

SEQ ID NO: 437594 - DNA, 1224 bp, Homo sapiens
aaagataaagcctttcaaatttgaggaagaccttcggtcccgcctccatttcacgtccggcttaccgtcgtttacgacagtgtcaggatcgcgggcttgctttccggtagcgtgggctgacgcctcgctcaatttctcacagggctgcgcaggtttcccccgtctgcgaatggaccactggaggggttcaaaggttcgcgtcccagtacgggaatgagcctctttgatctcttccggggctttttcggctttcctggacctcggagccacagagatcccttttttggagggatgactcgagatgaagatgatgatgaggaagaagaagaagaagggggctcatggggccgtgggaacccaaggttccatagtcctcagcacccccctgaggaatttggcttcggcttcagcttcagcccaggaggagggatacgtttccacgataacttcggctttgatgacctagtacgagatttcaatagcatcttcagcgatatgggggcctggaccttgccttcccatcctcctgaacttccaggtcctgagtcagagacacctggtgagagactacgggagggacagacacttcgggactcaatgcttaagtatccagatagtcaccagcccaggatctttgggggggtcttggagagtgatgcaagaagtgaatccccccaacagcaccagactggggctcccagaggccatttcataggtttgatgatgtatggcctatggacccccatcctagaaccagagaggacaatgatcttgattcccaggtttcccaggagggtcttggcccggttctacagccccagcccaaatcctatttcaagagcatctctgtgaccaagatcactaaaccagatgggatagtggaggagcgccggactgtggtggacagtgagggccggacagagactacagtaacccgacacgaagcagatagcagtcctaggggtgatccagaatcaccaagacctccagccctggatgatgccttttccatcctggacttattcctgggacgttggttccggtcccggtagccttgttaaccctcagaggccttcaagtcctttccacctctcacccattgcccaccattaataagcttagcttctcttgccacctcaggggcttggatatgtggaatagtgaactggggccatgtcagtttgtcactcacccaaactgaccaataaaacctttatttatgct

SEQ ID NO: 437595 - DNA, 976 bp, Homo sapiens
aaagataaagcctttcaaatttgaggaagaccttcggtcccgcctccatttcacgtccggcttaccgtcgtttacgacagtgtcaggatcgcgggcttgctttccggtagcgtgggctgacgcctcgctcaatttctcacagggctgcgcaggtttcccccgtctgcgaatggaccactggaggggttcaaaggttcgcgtcccagtacgggaatgagcctctttgatctcttccggggctttttcggctttcctggacctcggagccacagagatcccttttttggagggatgactcgagatgaagatgatgatgaggaagaagaagaagaagggggctcatggggccgtgggaacccaaggttccatagtcctcagcacccccctgaggaatttggcttcggcttcagcttcagcccaggaggagggatacgtttccacgataacttcggctttgatgacctagtacgagatttcaatagcatcttcagcgatatgggggcctggaccttgccttcccatcctcctgaacttccaggtcctgagtcagagacacctggtgagagactacgggagggacagacacttcgggactcaatgcttaagtatccagatagtcaccagcccaggatctttgggggggtcttggagagtgatgcaagaagtgaatccccccaacagcaccagactggggctcccagaggccatttcataggtttgatgatgtatggcctatggacccccatcctagaaccagagaggacaatgatcttgattcccaggtttcccaggagggtcttggcccggttctacagccccagcccaaatcctatttcaagagcatctctgtgaccaagatcactaaaccagatggtttgggggcgcggcgtggtgcagggggggaaaaaaagaccggcaaaaaaggccgggggcaaaacaaccccgggggtcccgcaaagagggcggcgggcgacca

SEQ ID NO: 437596 - DNA, 1276 bp, Homo sapiens
aaagataaagcctttcaaatttgaggaagaccttcggtcccgcctccatttcacgtccggcttaccgtcgtttacgacagtgtcaggatcgcgggcttgctttccggtagcgtgggctgacgcctcgctcaatttctcacagggctgcgcaggtttcccccgtctgcgaatggaccactggaggggttcaaaggttcgcgtcccagtacgggaatgagcctctttgatctcttccggggctttttcggctttcctggacctcggagccacagagatcccttttttggagggatgactcgagatgaagatgatgatgaggaagaagaagaagaagggggctcatggggccgtgggaacccaaggttccatagtcctcagcacccccctgaggaatttggcttcggcttcagcttcagcccaggaggagggatacgtttccacgataacttcggctttgatgacctagtacgagatttcaatagcatcttcagcgatatgggggcctggaccttgccttcccatcctcctgaacttccaggtcctgagtcagagacacctggtgagagactacgggagggacagacacttcgggactcaatgcttaagtatccagatagtcaccagcccaggatctttgggggggtcttggagagtgatgcaagaagtgaatccccccaacagcaccagactggggctcccagaggccatttcataggtttgatgatgtatggcctatggacccccatcctagaaccagagaggacaatgatcttgattcccaggtttcccaggagggtcttggcccggttctacagccccagcccaaatcctatttcaagagcatctctgtgaccaagatcactaaaccagatgggatagtggaggagcgccggactgtggtggacagtgagggccggacagagactacagtaacccgacacgaagcagatagcagtcctaggggtgatccagaatcaccaagacctccagccctggatgatgccttttccatcctggacttattcctgggacgttggttccggtcccggtagccttgttaaccctcagaggccttcaagtcctttccacctctcacccattgcccaccattaataagcttagcttctcttgccacctcaggggcttggatatgtggaatagtgaactggggccatgtcagtttgtcactcaccatgcataactttttgtaaaaaaaatcggctttgggcggcaggtagcgtcctccgccttgaggatcggctgggtcgagagccta

SEQ ID NO: 437597 - DNA, 1151 bp, Homo sapiens
gcacgacccggccaactgaacaagaatccgcggcacaacatacggcaggtagcgaggcctgggtgtcggggctgcgcaggtttcccccgtctgcgaatggaccactggaggggttcaaaggttcgcgtcccagtacgggaatgagcctctttgatctcttccggggctttttcggctttcctggacctcggagccacagagatcccttttttggagggatgactcgagatgaagatgatgatgaggaagaagaagaagaagggggctcatggggccgtgggaacccaaggttccatagtcctcagcacccccctgaggaatttggcttcggcttcagcttcagcccaggaggagggatacgtttccacgataacttcggctttgatgacctagtacgagatttcaatagcatcttcagcgatatgggggcctggaccttgccttcccatcctcctgaacttccaggtcctgagtcagagacacctggtgagagactacgggagggacagacacttcgggactcaatgcttaagtatccagatagtcaccagcccaggatctttgggggggtcttggagagtgatgcaagaagtgaatccccccaacagcaccagactggggctcccagaggccatttcataggtttgatgatgtatggcctatggacccccatcctagaaccagagaggacaatgatcttgattcccaggtttcccaggagggtcttggcccggttctacagccccagcccaaatcctatttcaagagcatctctgtgaccaagatcactaaaccagatgggatagtggaggagcgccggactgtggtggacagtgagggccggacagagactacagtaacccgacacgaagcagatagcagtcctaggggtgatccagaatcaccaagacctccagccctggatgatgccttttccatcctggacttattcctgggacgttggttccggtcccggtagccttgttaaccctcagaggccttcaagtcctttccacctctcacccattgcccaccattaataagcttagcttctcttgccacctcaggggcttggatatgtggaatagtgaactggggccatgtcagtttgtcactcacccaaactgaccaataaaacctttatttatgct

SEQ ID NO: 437598 - DNA, 1116 bp, Homo sapiens
  misc_feature (1)..(1): n is a, c, g, or t
naaacttacggctaggtacgaggctgggtgttagggctgcgcaggtttcccccgtctgcgaatggaccactggaggggttcaaaggttcgcgtcccagtacgggaatgagcctctttgatctcttccggggctttttcggctttcctggacctcggagccacagagatcccttttttggagggatgactcgagatgaagatgatgatgaggaagaagaagaagaagggggctcatggggccgtgggaacccaaggttccatagtcctcagcacccccctgaggaatttggcttcggcttcagcttcagcccaggaggagggatacgtttccacgataacttcggctttgatgacctagtacgagatttcaatagcatcttcagcgatatgggggcctggaccttgccttcccatcctcctgaacttccaggtcctgagtcagagacacctggtgagagactacgggagggacagacacttcgggactcaatgcttaagtatccagatagtcaccagcccaggatctttgggggggtcttggagagtgatgcaagaagtgaatccccccaacagcaccagactggggctcccagaggccatttcataggtttgatgatgtatggcctatggacccccatcctagaaccagagaggacaatgatcttgattcccaggtttcccaggagggtcttggcccggttctacagccccagcccaaatcctatttcaagagcatctctgtgaccaagatcactaaaccagatgggatagtggaggagcgccggactgtggtggacagtgagggccggacagagactacagtaacccgacacgaagcagatagcagtcctaggggtgatccagaatcaccaagacctccagccctggatgatgccttttccatcctggacttattcctgggacgttggttccggtcccggtagccttgttaaccctcagaggccttcaagtcctttccacctctcacccattgcccaccattaataagcttagcttctcttgccacctcaggggcttggatatgtggaatagtgaactggggccatgtcagtttgtcactcacccaaactgaccaataaaacctttatttatgct

SEQ ID NO: 437599 - DNA, 1183 bp, Homo sapiens
aaagataaagcctttcaaatttgaggaagaccttcggtcccgcctccatttcacgtccggcttaccgtcgtttacgacagtgtcaggatcgcgggcttgctttccggtagcgtgggctgacgcctcgctcaatttctcacagggctgcgcaggtttcccccgtctgcgaatggaccactggaggggttcaaaggttcgcgtcccagtacgggaatgagcctctttgatctcttccggggctttttcggctttcctggacctcggagccacagagatcccttttttggagggatgactcgagatgaagatgatgatgaggaagaagaagaagaagggggctcatggggccgtgggaacccaaggttccatagtcctcagcacccccctgaggaatttggcttcggcttcagcttcagcccaggaggagggatacgtttccacgataacttcggctttgatgacctagtacgagatttcaatagcatcttcagcgatatgggggcctggaccttgccttcccatcctcctgaacttccaggtcctgagtcagagacacctggtgagagactacgggagggacagacacttcgggactcaatgcttaagtatccagatagtcaccagcccaggatctttgggggggtcttggagagtgatgcaagaagtgaatccccccaacagcaccagactggggctcccagaggccatttcataggtttgatgatgtatggcctatggacccccatcctagaaccagagaggacaatgatcttgattcccaggtttcccaggagggtcttggcccggttctacagccccagcccaaatcctatttcaagagcatctctgtgaccaagatcactaaaccagatgggatagtggaggagcgccggactgtggtggacagtgagggccggacagagactacagtaacccgacacgaagcagatagcagtcctaggggtgtccagaatcacagaactcagcctgatgaggctttcatcctggattatctggaacgtggtccggccgtaacttgttaacctcaagggttaagtctttcactccttcccctggcccataataggggttgtcccaggggctttggaaagggcgctggtcccccagcaaactcttttaacaaggggggacaggcagcgacgtatgcggagaacggacgagg

SEQ ID NO: 437600 - DNA, 1410 bp, Homo sapiens
aaagataaagcctttcaaatttgaggaagaccttcggtcccgcctccatttcacgtccggcttaccgtcgtttacgacagtgtcaggatcgcgggcttgctttccggtagcgtgggctgacgcctcgctcaatttctcacagggctgcgcaggtttcccccgtctgcgaatggaccactggaggggttcaaaggttcgcgtcccagtacgggaatgagcctctttgatctcttccggggctttttcggctttcctggacctcggagccacagagatcccttttttggagggatgactcgagatgaagatgatgatgaggaagaagaagaagaagggggctcatggggccgtgggaacccaaggttccatagtcctcagcacccccctgaggaatttggcttcggcttcagcttcagcccaggaggagggatacgtttccacgataacttcggctttgatgacctagtacgagatttcaatagcatcttcagcgatatgggggcctggaccttgccttcccatcctcctgaacttccaggtcctgagtcagagacacctggtgagagactacgggagggacagacacttcgggactcaatgcttaagtatccagatagtcaccagcccaggatctttgggggggtcttggagagtgatgcaagaagtgaatccccccaacagcaccagactggggctcccagaggccatttcataggtttgatgatgtatggcctatggacccccatcctagaaccagagaggacaatgatcttgattcccaggtttcccaggagggtcttggcccggttctacagccccagcccaaatcctatttcaagagcatctctgtgaccaagatcactaaaccagatggggtgagttgaaagaaagaggtaaaggaaagtatggccagggaacgaatgccctgaaacagggatctgtgtaaagaaactgctgagcataacctttagtaacattcggaatatggtggggacttctctttgtagatagtggaggagcgccggactgtggtggacagtgagggccggacagagactacagtaacccgacacgaagcagatagcagtcctaggggtgatccagaatcaccaagacctccagccctggatgatgccttttccatcctggacttattcctgggacgttggttccggtcccggtagccttgttaaccctcagaggccttcaagtcctttccacctctcacccattgcccaccattaataagcttagcttctcttgccacctcaggggcttggatatgtggaatagtgaactggggccatgtcagtttgtcactcacccaaactgaccaataaaacctttatttatgcttttagcataaataaaggtcgagcggccgaaaatttagtagtagtaggcggctgc

SEQ ID NO: 437601 - DNA, 1003 bp, Homo sapiens
ggacatgaaatgattgtcactggaggattaaaactttaacgaatactaataatcattaaaatattggtaactacctatagaactttatgatgatgaggaagaagaagaagaagggggctcatggggccgtgggaacccaaggttccatagtcctcagcacccccctgaggaatttggcttcggcttcagcttcagcccaggaggagggatacgtttccacgataacttcggctttgatgacctagtacgagatttcaatagcatcttcagcgatatgggggcctggaccttgccttcccatcctcctgaacttccaggtcctgagtcagagacacctggtgagagactacgggagggacagacacttcgggactcaatgcttaagtatccagatagtcaccagcccaggatctttgggggggtcttggagagtgatgcaagaagtgaatccccccaacagcaccagactggggctcccagaggccatttcataggtttgatgatgtatggcctatggacccccatcctagaaccagagaggacaatgatcttgattcccaggtttcccaggagggtcttggcccggttctacagccccagcccaaatcctatttcaagagcatctctgtgaccaagatcactaaaccagatgggatagtggaggagcgccggactgtggtggacagtgagggccggacagagactacagtaacccgacacgaagcagatagcagtcctaggggtgatccagaatcaccaagacctccagccctggatgatgccttttccatcctggacttattcctgggacgttggttccggtcccggtagccttgttaaccctcagaggccttcaagtcctttccacctctcacccattgcccaccattaataagcttagcttctcttgccacctcaggggcttggatatgtggaatagtgaactggggccatgtcagtttgtcactcacccaaactgaccaataaaacctttatttatgct

SEQ ID NO: 437602 - DNA, 1080 bp, Homo sapiens
aaagataaagcctttcaaatttgaggaagaccttcggtcccgcctccatttcacgtccggcttaccgtcgtttacgacagtgtcaggatcgcgggcttgctttccggtagcgtgggctgacgcctcgctcaatttctcacagggctgcgcaggtttcccccgtctgcgaatggaccactggaggggttcaaaggttcgcgtcccagtacgggaatgagcctctttgatctcttccggggctttttcggctttcctggacctcggagcttcagcccaggaggagggatacgtttccacgataacttcggctttgatgacctagtacgagatttcaatagcatcttcagcgatatgggggcctggaccttgccttcccatcctcctgaacttccaggtcctgagtcagagacacctggtgagagactacgggagggacagacacttcgggactcaatgcttaagtatccagatagtcaccagcccaggatctttgggggggtcttggagagtgatgcaagaagtgaatccccccaacagcaccagactggggctcccagaggccatttcataggtttgatgatgtatggcctatggacccccatcctagaaccagagaggacaatgatcttgattcccaggtttcccaggagggtcttggcccggttctacagccccagcccaaatcctatttcaagagcatctctgtgaccaagatcactaaaccagatgggatagtggaggagcgccggactgtggtggacagtgagggccggacagagactacagtaacccgacacgaagcagatagcagtcctaggggtgatccagaatcaccaagacctccagccctggatgatgccttttccatcctggacttattcctgggacgttggttccggtcccggtagccttgttaaccctcagaggccttcaagtcctttccacctctcacccattgcccaccattaataagcttagcttctcttgccacctcaggggcttggatatgtggaatagtgaactggggccatgtcagtttgtcactcacccaaactgaccaataaaacctttatttatgct

SEQ ID NO: 437603 - DNA, 1399 bp, Homo sapiens
aaagataaagcctttcaaatttgaggaagaccttcggtcccgcctccatttcacgtccggcttaccgtcgtttacgacagtgtcaggatcgcgggcttgctttccggtagcgtgggctgacgcctcgctcaatttctcacagggctgcgcaggtttcccccgtctgcgaatggaccactggaggggttcaaaggttcgcgtcccagtacgggaatgagcctctttgatctcttccggggctttttcggctttcctggacctcggagccacagagatcccttttttggagggatgactcgagatgaagatgatgatgaggaagaagaagaagaagggggctcatggggccgtgggaacccaaggttccatagtcctcagcacccccctgaggaatttggcttcggcttcagcttcagcccaggaggagggatacgtttccacgataacttcggctttgatgacctagtacgagatttcaatagcatcttcagcgatatgggggcctggaccttgccttcccatcctcctggtgtgtggctttccctaaggggcaacctgtggtttctggtgggttggtgggtgaaataaagagcctgcagggagtagctgggggatgggaagtgtgagaagactgatgatttcagagagattaatagagcccaagtcctttcccatcccagcaaacacctgccacctttctgcagaacttccaggtcctgagtcagagacacctggtgagagactacgggagggacagacacttcgggactcaatgcttaagtatccagatagtcaccagcccaggatctttgggggggtcttggagagtgatgcaagaagtgaatccccccaacagcaccagactggggctcccagaggccatttcataggtttgatgatgtatggcctatggacccccatcctagaaccagagaggacaatgatcttgattcccaggtttcccaggagggtcttggcccggttctacagccccagcccaaatcctatttcaagagcatctctgtgaccaagatcactaaaccagatgggatagtggaggagcgccggactgtggtggacagtgagggccggacagagactacagtaacccgacacgaagcagatagcagtcctaggggtgatccagaatcaccaagacctccagccctggatgatgccttttccatcctggacttattcctgggacgttggttccggtcccggtagccttgttaaccctcagaggccttcaagtcctttccacctctcacccattgcccaccattaataagcttagcttctcttgccacctcaggggcttggatatgtggaatagtgaactggggccatgtcagtttgtcactcacccaaactgaccaataaaacctttatttatgct

SEQ ID NO: 437604 - DNA, 853 bp, Homo sapiens
  misc_feature (1)..(1): n is a, c, g, or t
naaacttacggctaggtacgaggctgggtgttagggctgcgcaggtttcccccgtctgcgaatggaccactggaggggttcaaaggttcgcgtcccagtacgggaatgagcctctttgatctcttccggggctttttcggctttcctggacctcggagaacttccaggtcctgagtcagagacacctggtgagagactacgggagggacagacacttcgggactcaatgcttaagtatccagatagtcaccagcccaggatctttgggggggtcttggagagtgatgcaagaagtgaatccccccaacagcaccagactggggctcccagaggccatttcataggtttgatgatgtatggcctatggacccccatcctagaaccagagaggacaatgatcttgattcccaggtttcccaggagggtcttggcccggttctacagccccagcccaaatcctatttcaagagcatctctgtgaccaagatcactaaaccagatgggatagtggaggagcgccggactgtggtggacagtgagggccggacagagactacagtaacccgacacgaagcagatagcagtcctaggggtgatccagaatcaccaagacctccagccctggatgatgccttttccatcctggacttattcctgggacgttggttccggtcccggtagccttgttaaccctcagaggccttcaagtcctttccacctctcacccattgcccaccattaataagcttagcttctcttgccacctcaggggcttggatatgtggaatagtgaactggggccatgtcagtttgtcactcacccaaactgaccaataaaacctttatttatgct

SEQ ID NO: 437605 - DNA, 804 bp, Homo sapiens
catatcgctgaagatgctattgaaatctcgtactaggtcatcaaagccgaagttatcgtggaaacgtatccctcctcctgggcctggaccttgccttcccatcctcctgaacttccaggtcctgagtcagagacacctggtgagagactacgggagggacagacacttcgggactcaatgcttaagtatccagatagtcaccagcccaggatctttgggggggtcttggagagtgatgcaagaagtgaatccccccaacagcaccagactggggctcccagaggccatttcataggtttgatgatgtatggcctatggacccccatcctagaaccagagaggacaatgatcttgattcccaggtttcccaggagggtcttggcccggttctacagccccagcccaaatcctatttcaagagcatctctgtgaccaagatcactaaaccagatgggatagtggaggagcgccggactgtggtggacagtgagggccggacagagactacagtaacccgacacgaagcagatagcagtcctaggggtgatccagaatcaccaagacctccagccctggatgatgccttttccatcctggacttattcctgggacgttggttccggtcccggtagccttgttaaccctcagaggccttcaagtcctttccacctctcacccattgcccaccattaataagcttagcttctcttgccacctcaggggcttggatatgtggaatagtgaactggggccatgtcagtttgtcactcacccaaactgaccaataaaacctttatttatgct

SEQ ID NO: 437606 - DNA, 646 bp, Homo sapiens
tgttctagaggataccctctggatgcaagtgtcagatagtcaccagcccaggatctttgggggggtcttggagagtgatgcaagaagtgaatccccccaacagcaccagactggggctcccagaggccatttcataggtttgatgatgtatggcctatggacccccatcctagaaccagagaggacaatgatcttgattcccaggtttcccaggagggtcttggcccggttctacagccccagcccaaatcctatttcaagagcatctctgtgaccaagatcactaaaccagatgggatagtggaggagcgccggactgtggtggacagtgagggccggacagagactacagtaacccgacacgaagcagatagcagtcctaggggtgatccagaatcaccaagacctccagccctggatgatgccttttccatcctggacttattcctgggacgttggttccggtcccggtagccttgttaaccctcagaggccttcaagtcctttccacctctcacccattgcccaccattaataagcttagcttctcttgccacctcaggggcttggatatgtggaatagtgaactggggccatgtcagtttgtcactcacccaaactgaccaataaaacctttatttatgct

SEQ ID NO: 437607 - DNA, 840 bp, Homo sapiens
aaagataaagcctttcaaatttgaggaagaccttcggtcccgcctccatttcacgtccggcttaccgtcgtttacgacagtgtcaggatcgcgggcttgctttccggtagcgtgggctgacgcctcgctcaatttctcacagggctgcgcaggtttcccccgtctgcgaatggaccactggaggggttcaaaggttcgcgtcccagtacgggaatgagcctctttgatctcttccggggctttttcggctttcctggacctcggagccacagagatcccttttttggagggatgactcgagatgaagatgatgatgaggaagaagaagaagaagggggctcatggggccgtgggaacccaaggttccatagtcctcagcacccccctgaggaatttggcttcggcttcagcttcagcccaggaggagggatacgtttccacgataacttcggctttgatgacctagtacgagatttcaatagcatcttcagcgatatgggggcctggaccttgccttcccatcctcctgaacttccaggtcctgagtcagagacacctggtgagagactacgggagggacagacacttcgggactcaatgcttaagtatccagatagtcaccagcccaggatctttgggggggtcttggagagtgatgcaagaagtgaatccccccaacagcaccagactggggctcccagaggccatttcataggcctccgcggaggcgagaggaccttcgtctccctgagggagacctggcaaggagattgagcagaagtgcgactgtggagaagagatcctgatacacggtgtctctctgccatgacagacgaggca

SEQ ID NO: 437608 - DNA, 1380 bp, Homo sapiens
aaagataaagcctttcaaatttgaggaagaccttcggtcccgcctccatttcacgtccggcttaccgtcgtttacgacagtgtcaggatcgcgggcttgctttccggtagcgtgggctgacgcctcgctcaatttctcacagggctgcgcaggtttcccccgtctgcgaatggaccactggaggggttcaaaggttcgcgtcccagtacgggaatgagcctctttgatctcttccggggctttttcggctttcctggacctcggagccacagagatcccttttttggagggatgactcgagatgaagatgatgatgaggaagaagaagaagaagggggctcatggggccgtgggaacccaaggttccatagtcctcagcacccccctgaggaatttggcttcggcttcagcttcagcccaggaggagggatacgtttccacgataacttcggctttgatgacctagtacgagatttcaatagcatcttcagcgatatgggggcctggaccttgccttcccatcctcctgcaaacacctgccacctttctgcagaacttccaggtcctgagtcagagacacctggtgagagactacgggagggacagacacttcgggactcaatgcttaagtatccagatagtcaccagcccaggatctttgggggggtcttggagagtgatgcaagaagtgaatccccccaacagcaccagactggggctcccagaggccatttcataggtttgatgatgtatggcctatggacccccatcctagaaccagagaggacaatgatcttgattcccaggtttcccaggagggtcttggcccggttctacagccccagcccaaatcctatttcaagagcatctctgtgaccaagatcactaaaccagatggggtgagttgaaagaaagaggtaaaggaaagtatggccagggaacgaatgccctgaaacagggatctgtgtaaagaaactgctgagcataacctttagtaacattcggaatatggtggggacttctctttgtagatagtggaggagcgccggactgtggtggacagtgagggccggacagagactacagtaacccgacacgaagcagatagcagtcctaggggtgatccagaatcaccaagacctccagccctggatgatgccttttccatcctggacttattcctgggacgttggttccggtcccggtagccttgttaaccctcagaggccttcaagtcctttccacctctcacccattgcccaccattaataagcttagcttctcttgccacctcaggggcttggatatgtggaatagtgaactggggccatgtcagtttgtcactcacccaaactgaccaataaaacctttatttatgct

SEQ ID NO: 437609 - DNA, 238 bp, Homo sapiens
ggtctatgacctttcaaatttcagattggaaggagtcttttcacttactatggtttcttctgcagtttgatgatgtatggcctatggacccccatcctagaaccagagaggacaatggtaagtctggaggaaggggaagtttaccagccttttgttattcttctgaagttctgtgtgttctccctccctgaagtttcttcctgtacacttgtctccttttttcctttggactctttct

SEQ ID NO: 437610 - DNA, 1597 bp, Homo sapiens
aaagataaagcctttcaaatttgaggaagaccttcggtcccgcctccatttcacgtccggcttaccgtcgtttacgacagtgtcaggatcgcgggcttgctttccggtagcgtgggctgacgcctcgctcaatttctcacagggctgcgcaggtttcccccgtctgcgaatggaccactggaggggttcaaaggttcgcgtcccagtacgggaatgagcctctttgatctcttccggggctttttcggctttcctggacctcggagccacagagatcccttttttggagggatgactcgagatgaagatgatgatgaggaagaagaagaagaagggggctcatggggccgtgggaacccaaggttccatagtcctcagcacccccctgaggaatttggcttcggcttcagcttcagcccaggaggagggatacgtttccacgataacttcggctttgatgacctagtacgagatttcaatagcatcttcagcgatatgggggcctggaccttgccttcccatcctcctgaacttccaggtcctgagtcagagacacctggtgagagactacgggagggacagacacttcgggactcaatgcttaagtatccagatagtcaccagcccaggatctttgggggggtcttggagagtgatgcaagaagtgaatccccccaacagcaccagactggggctcccagaggccatttcataggtttgatgatgtatggcctatggacccccatcctagaaccagagaggacaatgatcttgattcccaggtttcccaggagggtcttggcccggttctacagccccagcccaaatcctatttcaagagcatctctgtgaccaagatcactaaaccagatgggatagtggaggagcgccggactgtggtggacagtgagggccggacagagactacagtaacccgacacgaagcagatagcagtcctaggggtgatccagaatcaccaagacctccagccctggatgatgccttttccatcctggacttattcctgggacgttggttccggtcccggtagccttgttaaccctcagaggccttcaagtcctttccacctctcacccattgcccaccattaataagcttagcttctcttgccacctcaggggcttggatatgtggaatagtgaactggggccatgtcagtttgtcactcacccaaactgaccaataaaacctttatttatgcttaaaaaaaacaacaaaaacaaacaaaattgtgcgggcgacaaggacccaaagaaattagaaccctcccgtggggcgccgggccattagtaatgaacatgggcaacagggaccagagaatcggggtacaaagggggtgtctccccaaaaagagccgggaagcgcaggttgtgaacacaggcggtgggggccagggattcacaggggcgagtaggaaccccccggcgcagggagcaacaacgcaagacaagaacaacagaggacgacaagcagcagcagacgggagcaaagcagcaaaacgagcgaagacacagaagcacgaacgtgcacgaaccagacagggagcccgcccaccgcaccagaagaagaaaaacc

SEQ ID NO: 437611 - DNA, 1011 bp, Homo sapiens
aaagagcaggctgtaccggtctgggagtacggatggggctttttcggctttcctggacctcggagccacagagatcccttttttggagggatgactcgagatgaagatgatgatgaggaagaagaagaagaagggggctcatggggccgtgggaacccaaggttccatagtcctcagcacccccctgaggaatttggcttcggcttcagcttcagcccaggaggagggatacgtttccacgataacttcggctttgatgacctagtacgagatttcaatagcatcttcagcgatatgggggcctggaccttgccttcccatcctcctgaacttccaggtcctgagtcagagacacctggtgagagactacgggagggacagacacttcgggactcaatgcttaagtatccagatagtcaccagcccaggatctttgggggggtcttggagagtgatgcaagaagtgaatccccccaacagcaccagactggggctcccagaggccatttcataggtttgatgatgtatggcctatggacccccatcctagaaccagagaggacaatgatcttgattcccaggtttcccaggagggtcttggcccggttctacagccccagcccaaatcctatttcaagagcatctctgtgaccaagatcactaaaccagatgggatagtggaggagcgccggactgtggtggacagtgagggccggacagagactacagtaacccgacacgaagcagatagcagtcctaggggtgatccagaatcaccaaggacttcatgcctggatgatgcatattaccaatcctgtgactatattcatgggacaggtagggtaccagagaacacagagaagcattggaaaacacgtacagaaggcatcaacagaccattacaacaacatcaaacataggcgaaccacacacaccgttacctaacactgcaagtaacgggagcatagaaaacaggaaaaggaacaggccaagacaacaaagacatccacg

SEQ ID NO: 437612 - DNA, 1572 bp, Homo sapiens
  misc_feature (1572)..(1572): n is a, c, g, or t
aaagataaagcctttcaaatttgaggaagaccttcggtcccgcctccatttcacgtccggcttaccgtcgtttacgacagtgtcaggatcgcgggcttgctttccggtagcgtgggctgacgcctcgctcaatttctcacagggctgcgcaggtttcccccgtctgcgaatggaccactggaggggttcaaaggttcgcgtcccagtacgggaatgagcctctttgatctcttccggggctttttcggctttcctggacctcggagccacagagatcccttttttggagggatgactcgagatgaagatgatgatgaggaagaagaagaagaagggggctcatggggccgtgggaacccaaggttccatagtcctcagcacccccctgaggaatttggcttcggcttcagcttcagcccaggaggagggatacgtttccacgataacttcggctttgatgacctagtacgagatttcaatagcatcttcagcgatatgggggcctggaccttgccttcccatcctcctgaacttccaggtcctgagtcagagacacctggtgagagactacgggagggacagacacttcgggactcaatgcttaagtatccagatagtcaccagcccaggatctttgggggggtcttggagagtgatgcaagaagtgaatccccccaacagcaccagactggggctcccagaggccatttcataggtttgatgatgtatggcctatggacccccatcctagaaccagagaggacaatgatcttgattcccaggtttcccaggagggtcttggcccggttctacagccccagcccaaatcctatttcaagagcatctctgtgaccaagatcactaaaccagatgggatagtggaggagcgccggactgtggtggacagtgagggccggacagagactacagtaacccgacacgaagcagatagcagtcctaggggtgatccagaatcaccaagacctccagccctggatgatgccttttccatcctggacttattcctgggacgttggttccggtcccggtagccttgttaaccctcagaggccttcaagtcctttccacctctcacccattgcccaccattaataagcttagcttctcttgccacctcaggggcttggatatgtggaatagtgaactggggccatgtcagtttgtcactcacccaaactgaccaataaaacctttatttatgctaaaaaaaaaaaaaaaaaaaaaaaaaacagaaaaaaaaaccaaaaaaaaaaacaaaaacacatagcacaaacaaaagaggaggggcgggccgcctgatgagaagattcaaccccagccgagggggcccacgacgctgtgctgccccaccccaccttttgtctcggaccacagatgggcgccccctaatggggtgcgccttcctttcttcaaggcgcgcgcggggcgcctgccgtctttttcacccccggtctgtctcggggggacacacgggcgtcgctgcgtgctcactctctggcgcgggacccctctctccggggcgggtgccccttctggcgccctcccgcctcn

SEQ ID NO: 437613 - DNA, 1356 bp, Homo sapiens
aaagataaagcctttcaaatttgaggaagaccttcggtcccgcctccatttcacgtccggcttaccgtcgtttacgacagtgtcaggatcgcgggcttgctttccggtagcgtgggctgacgcctcgctcaatttctcacagggctgcgcaggtttcccccgtctgcgaatggaccactggaggggttcaaaggttcgcgtcccagtacgggaatgagcctctttgatctcttccggggctttttcggctttcctggacctcggagccacagagatcccttttttggagggatgactcgagatgaagatgatgatgaggaagaagaagaagaagggggctcatggggccgtgggaacccaaggttccatagtcctcagcacccccctgaggaatttggcttcggcttcagcttcagcccaggaggagggatacgtttccacgataacttcggctttgatgacctagtacgagatttcaatagcatcttcagcgatatgggggcctggaccttgccttcccatcctcctgaacttccaggtcctgagtcagagacacctggtgagagactacgggagggacagacacttcgggactcaatgcttaagtatccagatagtcaccagcccaggatctttgggggggtcttggagagtgatgcaagaagtgaatccccccaacagcaccagactggggctcccagaggccatttcataggtttgatgatgtatggcctatggacccccatcctagaaccagagaggacaatgatcttgattcccaggtttcccaggagggtcttggcccggttctacagccccagcccaaatcctatttcaagagcatctctgtgaccaagatcactaaaccagatgggatagtggaggagcgccggactgtggtggacagtgagggccggacagagactacagtaacccgacacgaagcagatagcagtcctaggggtggtaagttaaaagacaaaggggttcatctcaagattccttggggaagggaaatcttactcttctacccttgtcctttgcttctgcctagtctctttcatttagcctatttacgtgtatgactttcttccttagatccagaatcaccaagacctccagccctggatgatgccttttccatcctggacttattcctgggacgttggttccggtcccggtagccttgttaaccctcagaggccttcaagtcctttccacctctcacccattgcccaccattaataagcttagcttctcttgccacctcaggggcttggatatgtggaatagtgaactggggccatgtcagtttgtcactcacccaaactgaccaataaaacctttatttatgct

SEQ ID NO: 437614 - DNA, 1356 bp, Homo sapiens
aaagataaagcctttcaaatttgaggaagaccttcggtcccgcctccatttcacgtccggcttaccgtcgtttacgacagtgtcaggatcgcgggcttgctttccggtagcgtgggctgacgcctcgctcaatttctcacagggctgcgcaggtttcccccgtctgcgaatggaccactggaggggttcaaaggttcgcgtcccagtacgggaatgagcctctttgatctcttccggggctttttcggctttcctggacctcggagccacagagatcccttttttggagggatgactcgagatgaagatgatgatgaggaagaagaagaagaagggggctcatggggccgtgggaacccaaggttccatagtcctcagcacccccctgaggaatttggcttcggcttcagcttcagcccaggaggagggatacgtttccacgataacttcggctttgatgacctagtacgagatttcaatagcatcttcagcgatatgggggcctggaccttgccttcccatcctcctgaacttccaggtcctgagtcagagacacctggtgagagactacgggagggacagacacttcgggactcaatgcttaagtatccagatagtcaccagcccaggatctttgggggggtcttggagagtgatgcaagaagtgaatccccccaacagcaccagactggggctcccagaggccatttcataggtttgatgatgtatggcctatggacccccatcctagaaccagagaggacaatgatcttgattcccaggtttcccaggagggtcttggcccggttctacagccccagcccaaatcctatttcaagagcatctctgtgaccaagatcactaaaccagatggggtgagttgaaagaaagaggtaaaggaaagtatggccagggaacgaatgccctgaaacagggatctgtgtaaagaaactgctgagcataacctttagtaacattcggaatatggtggggacttctctttgtagatagtggaggagcgccggactgtggtggacagtgagggccggacagagactacagtaacccgacacgaagcagatagcagtcctaggggtgatccagaatcaccaagacctccagccctggatgatgccttttccatcctggacttattcctgggacgttggttccggtcccggtagccttgttaaccctcagaggccttcaagtcctttccacctctcacccattgcccaccattaataagcttagcttctcttgccacctcaggggcttggatatgtggaatagtgaactggggccatgtcagtttgtcactcacccaaactgaccaataaaacctttatttatgct

SEQ ID NO: 437615 - DNA, 1223 bp, Homo sapiens
  misc_feature (878)..(878): n is a, c, g, or t
aaagataaagcctttcaaatttgaggaagaccttcggtcccgcctccatttcacgtccggcttaccgtcgtttacgacagtgtcaggatcgcgggcttgctttccggtagcgtgggctgacgcctcgctcaatttctcacagggctgcgcaggtttcccccgtctgcgaatggaccactggaggggttcaaaggttcgcgtcccagtacgggaatgagcctctttgatctcttccggggctttttcggctttcctggacctcggagccacagagatcccttttttggagggatgactcgagatgaagatgatgatgaggaagaagaagaagaagggggctcatggggccgtgggaacccaaggttccatagtcctcagcacccccctgaggaatttggcttcggcttcagcttcagcccaggaggagggatacgtttccacgataacttcggctttgatgacctagtacgagatttcaatagcatcttcagcgatatgggggcctggaccttgccttcccatcctcctgaacttccaggtcctgagtcagagacacctggtgagagactacgggagggacagacacttcgggactcaatgcttaagtatccagatagtcaccagcccaggatctttgggggggtcttggagagtgatgcaagaagtgaatccccccaacagcaccagactggggctcccagaggccatttcataggtttgatgatgtatggcctatggacccccatcctagaaccagagaggacaatgatcttgattcccaggtttcccaggagggtcttggcccggttctacagccccagcccaaatcctatttcaagagcatctctgtgaccaagatcactaaaccagatggcaanaccagccacactcgtacttcgtgaaggaccctggcaaggctacaccccaccgccacagttctccatgagaaagatcatcctccgtgagatcaaccaaggcagatgtgacagcaagggcctcggaccccatggcaggggtggtgtcttcatgagggaggggcccaaagcccttgtgggcggacctcccctgagcctgtctgaggggccagcccttagtgcattcaggctaaggcccctgggcaaggatgccacccctgctcattcggaggaagtgccctcacccctcactggtccaatggcttgagactcaccccgtctgcccagtaaaagcctttttgcagcaaa

SEQ ID NO: 437616 - DNA, 943 bp, Homo sapiens
ggtagcgaggtctgggtggcgacttcggcacgagggaccactggaggggttcaaaggttcgcgtcccagtacgggaatgagcctctttgatctcttccggggctttttcggctttcctggacctcggagcttcagcccaggaggagggatacgtttccacgataacttcggctttgatgacctagtacgagatttcaatagcatcttcagcgatatgggggcctggaccttgccttcccatcctcctgaacttccaggtcctgagtcagagacacctggtgagagactacgggagggacagacacttcgggactcaatgcttaagtatccagatagtcaccagcccaggatctttgggggggtcttggagagtgatgcaagaagtgaatccccccaacagcaccagactggggctcccagaggccatttcataggtttgatgatgtatggcctatggacccccatcctagaaccagagaggacaatgatcttgattcccaggtttcccaggagggtcttggcccggttctacagccccagcccaaatcctatttcaagagcatctctgtgaccaagatcactaaaccagatgggatagtggaggagcgccggactgtggtggacagtgagggccggacagagactacagtaacccgacacgaagcagatagcagtcctaggggtgatccagaatcaccaagacctccagccctggatgatgccttttccatcctggacttattcctgggacgttggttccggtcccggtagccttgttaaccctcagaggccttcaagtcctttccacctctcacccattgcccaccattaataagcttagcttctcttgccacctcaggggcttggatatgtggaatagtgaactggggccatgtcagtttgtcactcacccaaactgaccaataaaacctttatttatgct

SEQ ID NO: 437617 - DNA, 1248 bp, Homo sapiens
aaagataaagcctttcaaatttgaggaagaccttcggtcccgcctccatttcacgtccggcttaccgtcgtttacgacagtgtcaggatcgcgggcttgctttccggtagcgtgggctgacgcctcgctcaatttctcacagggctgcgcaggtttcccccgtctgcgaatggaccactggaggggttcaaaggttcgcgtcccagtacgggaatgagcctctttgatctcttccggggctttttcggctttcctggacctcggagccacagagatcccttttttggagggatgactcgagatgaagatgatgatgaggaagaagaagaagaagggggctcatggggccgtgggaacccaaggttccatagtcctcagcacccccctgaggaatttggcttcggcttcagcttcagcccaggaggagggatacgtttccacgataacttcggctttgatgacctagtacgagatttcaatagcatcttcagcgatatgggggcctggaccttgccttcccatcctcctgcaaacacctgccacctttctgcagaacttccaggtcctgagtcagagacacctggtgagagactacgggagggacagacacttcgggactcaatgcttaagtatccagatagtcaccagcccaggatctttgggggggtcttggagagtgatgcaagaagtgaatccccccaacagcaccagactggggctcccagaggccatttcataggtttgatgatgtatggcctatggacccccatcctagaaccagagaggacaatgatcttgattcccaggtttcccaggagggtcttggcccggttctacagccccagcccaaatcctatttcaagagcatctctgtgaccaagatcactaaaccagatgggatagtggaggagcgccggactgtggtggacagtgagggccggacagagactacagtaacccgacacgaagcagatagcagtcctaggggtgatccagaatcaccaagacctccagccctggatgatgccttttccatcctggacttattcctgggacgttggttccggtcccggtagccttgttaaccctcagaggccttcaagtcctttccacctctcacccattgcccaccattaataagcttagcttctcttgccacctcaggggcttggatatgtggaatagtgaactggggccatgtcagtttgtcactcacccaaactgaccaataaaacctttatttatgct

SEQ ID NO: 437618 - DNA, 1236 bp, Homo sapiens
aaagataaagcctttcaaatttgaggaagaccttcggtcccgcctccatttcacgtccggcttaccgtcgtttacgacagtgtcaggatcgcgggcttgctttccggtagcgtgggctgacgcctcgctcaatttctcacagggctgcgcaggtttcccccgtctgcgaatggaccactggaggggttcaaaggttcgcgtcccagtacgggaatgagcctctttgatctcttccggggctttttcggctttcctggacctcggagccacagagatcccttttttggagggatgactcgagatgaagatgatgatgaggaagaagaagaagaagggggctcatggggccgtgggaacccaaggttccatagtcctcagcacccccctgaggaatttggcttcggcttcagcttcagcccaggaggagggatacgtttccacgataacttcggctttgatgacctaaacttccaggtcctgagtcagagacacctggtgagagactacgggagggacagacacttcgggactcaatgcttaagtatccagatagtcaccagcccaggatctttgggggggtcttggagagtgatgcaagaagtgaatccccccaacagcaccagactggggctcccagaggccatttcataggtttgatgatgtatggcctatggacccccatcctagaaccagagaggacaatgtttcttcctgtacacttgtctccttttttcctttggactctttctctcctgcttcttcatctctctgctcttccagatcttgattcccaggtttcccaggagggtcttggcccggttctacagccccagcccaaatcctatttcaagagcatctctgtgaccaagatcactaaaccagatgggatagtggaggagcgccggactgtggtggacagtgagggccggacagagactacagtaacccgacacgaagcagatagcagtcctaggggtgatccagaatcaccaagacctccagccctggatgatgccttttccatcctggacttattcctgggacgttggttccggtcccggtagccttgttaaccctcagaggccttcaagtcctttccacctctcacccattgcccaccattaataagcttagcttctcttgccacctcaggggcttggatatgtggaatagtgaactggggccatgtcagtttgtcactcacccaaactgaccaataaaacctttatttatgct

SEQ ID NO: 437619 - DNA, 457 bp, Homo sapiens
gacggagtctcactctgtcgcccaggctggagtgcagtggtgtgatctcggctcactgcaagctctgcctcctgggttcacgccattctcctgccttggcctcccaaagtgctgagattacaggcatgagccactgtgcccagccctgattccttcttgatatcactacatctttgtcctctagggacctcggaccgtcccccagacccactggagccaccgtcacttcctgctgagaggccagggccccccacacctgctgcggcccacagcatcccctacaacagctgcagagagaaggagccaagttaccccatgcctgtccaggagacccaggcgccagagtccccaggagaggtctgtcctcatagtctaccttgagccaccacttttgtgttcctatctgcccacttctgcccattgagccttccagaaaccctctcccgtcccctataaa

SEQ ID NO: 437620 - DNA, 10114 bp, Homo sapiens
gcgggaagggtcctgggccccgggcggcggtcgccaggtctcagggccgggggtacccgagtctcgtttcctctcagtccatccacccttcatggggccagagccctctctccagaatctgagcagcaatgccgtttgctgaagacaagacctataagtatatctgccgcaatttcagcaatttttgcaatgtggatgttgtagagattctgccttacctgccctgcctcacagcaagagaccaggatcgactgcgggccacctgcacactctcagggaaccgggacaccctctggcatctcttcaatacccttcagcggcggcccggctgggtggagtacttcattgcggcactgaggggctgtgagctagttgatctcgcggacgaagtggcctctgtctaccagagctaccagcctcggacctcggaccgtcccccagacccactggagccaccgtcacttcctgctgagaggccagggccccccacacctgctgcggcccacagcatcccctacaacagctgcagagagaaggagccaagttaccccatgcctgtccaggagacccaggcgccagagtccccaggagagaattcagagcaagccctgcagacgctcagccccagagccatcccaaggaatccagatggtggccccctggagtcctcctctgacctggcagccctcagccctctgacctccagcgggcatcaggagcaggacacagaactgggcagtacccacacagcaggtgcgacctccagcctcacaccatcccgtgggcctgtgtctccatctgtctccttccagcccctggcccgttccacccccagggcaagccgcttgcctggacccacagggtcagttgtatctactggcacctccttctcctcctcatcccctggcttggcctctgcaggggctgcagagggtaaacagggtgcagagagtgaccaggccgagcctatcatctgctccagtggggcagaggcacctgccaactctctgccctccaaagtgcctaccaccttgatgcctgtgaacacagtggccctgaaagtgcctgccaacccagcatctgtcagcacagtgccctccaagttgccaactagctcaaagccccctggtgcagtgccttctaatgcgctcaccaatccagcaccatccaaattgcccatcaactcaacccgtgctggcatggtgccatccaaagtgcctactagcatggtgctcaccaaggtgtctgccagcacagtccccactgacgggagcagcagaaatgaggagaccccagcagctccaacacccgccggcgccactggaggcagctcagcctggctagacagcagctctgagaataggggccttgggtcggagctgagtaagcctggcgtgctggcatcccaggtagacagcccgttctcgggctgcttcgaggatcttgccatcagtgccagcacctccttgggcatggggccctgccatggcccagaggagaatgagtataagtccgagggcacctttgggatccacgtggctgagaaccccagcatccagctcctggagggcaaccctgggccacctgcggacccggatggcggccccaggccacaagccgaccggaagttccaggagagggaggtgccatgccacaggccctcacctggggctctgtggctccaggtggctgtgacaggggtgctggtagtcacactcctggtggtgctgtaccggcggcgtctgcactagtgaagccctgggctcttcccaccacccatctgttccgttcctgcagtatacctggcccctctccgaagccccttgtccctttcttggggattgtggaggctgggtcagaggggagttaagggactgcaggcctggcagcaggacatgccttggctgaaccaagtcctgagagcagcatctctgtccccacggtgccttgtgtgggtccccgtccttggctttctgggtcctgggctgcccccagtgctccagaccttccccactggcaatccaggttatcatccatgtcctccagaggagcttcctcctccaggcctcagccctgttggcccaggtggagcaggagggaccactggaacatgtggtgcttgggaatgcctctcctgttgcattggtccctgaaggcctcagggcaggtatgtggtgtgtgggcgactccacaagacctgcctcccatcctggcagcccagcctgagaccgttgcattgaggcaggcaggagcggcagggtggctgctctccaggagcccaactgccttgagttcctgccccactgggccccctcccctgctgggcaatcctgggaaggtctggaggttcctgtggacctcagggaagccaggggcagctgtcaggcctgaggaagacctgtggagctcctctccagcctcctctttccctcccctctggtctccattctcttcagctccctacatgggctggggaggagacacctggtgggcagagctcaggcagaggtttggatttcagctccctcacttccggggctgtgtggctttggcagatgtcagacttctggtcttgcttctccacgtggacagtgagtatctggctcattcttcactgggttcttctgagattgaacctacaggtgtttgccaagtgcctggcccagagcaagtggccactgcttctcccatctctctcctgcccaacctggtagagctgagggcatgagaggcagagtgcacagtggtcaagggtgcagctctgcagcacaggcagcctaggcctgcgtcccaacctgcctctcaccagctctgtgaccttgggcaagggatttatctgtctgtcccttagttttctcacctgtaaaaggaggataagtatatatatatatttcccagtgttgtgaagattaaaggagtttatcgatgtaggtcttaggatgagtcctggcatttaccaagggttggatatatgttattatcactattaagtgttgagggtccaggcatgctgggcaacagggaccccatctctacaaaaaagtttaaaaaattagccaggcgtggtggtgcacctgtcgtcttagctacttgggaggctgaggtgggaggatcacttgagcccagaagcttgaagctgcagtgagctaggatcgtgccactgcactccaacctgggtgagagagcgagaccctgtctcaagaaaaagaaaaatgcagagaaacaggagtcttggctactcctttagaggcagactcagaccctcctgcctcacagctttatctttgtatttgccccttactttatcttgtgccttgagaaattgctggggagagaggtatgtccactgggcagctgtacaggatggaggatatagggcgtttccactcccagcagccaggttccctcaccccaagctcacccactgttggggagattatctacaataacaccagaaacacattggggtggattgggggtatccttatgggttcttttcagggaaccattgctggacaaggcacaggagccacctccatttctgagctctgcaagggacaagaactagagccatcaggggctgggctcactgtggccccaccccaagccgtcagcctccagggatctacaccctgccttggctgctacagctttttcactccactgccctaggggagttcagcaacctaatgatctctatctctgaacatctcttcatcccatgctccaagtccagcaacctgcaccctggaaccaggagtggaccctacccgagctgtctgtattaatccccatcccccaccaccaatcttaaaaagccctctgtccccctaccctaaaccccagttaggtacccatgctgggcaggtcagttaacaatttatgcacaggtactagttttattgtattaccgttccagggtagctttgaaaaaagtatctcaaaaaggcaacaccaccgcgcccagccaaattaaattttttatagagatgaggtcatgctgttatgttgcccaggttggcctcatgagatcttgccttagcctcccaaagtgctgggattacagatgtgagacactgcacccaaaccccaccacttttttttttcctttttctttttttgagacagtcttactccgttgcccaggctggagtgtagtggcatgatctcagctcactgcaacctccgcctcccgggttcaagcaattctcctgcctcagcctcccgagtagctgggattacagaggcctgccaccacacccgactaattttcgtatttttagtagagacggggtttctccatgttggccaggctgttcttgaactcctgacctcaagtgctccacctgcgttggcttcccaaagtgctgggatacaggagtgagccactgcgcctggctgatcccagcacttttcaaatgatgccgctcaaagccgtgacttggcctactttgaacagcaaacttgttgctgctgttgtcaacctgaaggcctctcaaatgccagcttcaagcagggtgtgaattggccagtgtcagatctcaggagtcctgtgttgagagtgtggctttcagctgcggggagctgcacttggtggggaaagccaggcaggtcaccctcacagccagataatgtggaggtcagaacccaaggaagggagtgagacctccactcccagtgggggacctggccacccatccttggggacctgagaaagcgtacttcaccttggggtgaaggctgggtggggccagagggaccagtgccctcctcagtgcttaggggcagagccacctgcagcaatggtatctgcatattagcccctctccaccttctttctcccgctgaatcatttccctcaaagcccaagagctgtcactgcttctttctccctgggaagaatgcgtggactctgcctggtgatagactgaagccagaacagtgccacaccctcgccttaattccttgctaggtgttctcagatttatgagacttcttagtcaaatatgagggaggttggatgtggtggcttgtgcctgtaatcccagcattttgggaggccgaggtgggaggatcccttgaagccaggagtttgagacaagcctgggcaacaaagcaagaccctatctctaaaaaaaaaaaaaaaaaaaaatctaggagatgctctttaccctgcctggcctcaaactattaatagcttcctttgagcaacattatttattatgaactttcaaacacaaaaaagtagagagagtagaataacaaatccccatgagcccatcacccaacttcagtaattatcaattcatggccatcttgttcacccctgcctgcttccctgcttcccctcattctgcagaggttcttttcttttgagacagagtgttgctctgttgcccaggctggagtgcagtggtgcaacttcggctcactgcaacctccgcctcccaggttcaagtgattctcctgcttcagcctctcaagtagctgggattacagatgcccgccaccacacctggctaattttcgtatttttgttagagatggggtttcaccatgttggccaggctggtctcgaactcctgacctcaagtgatccgcccgccttggcctcccaaaatgctgggattacaggtgtgaaccacggtgcctggccactgtacaggttatttatagaagttggagagtgaagggttgagaaagccaaggggcagatgcgggtctggaggattttgtgcctaaggccctctctttgctcccagacagcatgaagtaacaatgaggcatccacctcttggttttgtggcctctgtggatgacgtctctcaccttgaaccagttcagagttggagtagcgcaggatcctgtcttcagaggaggggccgaagcgggttcctctgttgtcaagctctttggaggtgcctggctgctactactgtcccagagaggtgatgatgaatgatgggtgtgtccagtggcagtttgccccactgaggcaggggcttccactaggccctgacagagcccttccagcaggcagaaatccctgtgctaggcaagattcaaactccgtagcatgtctcctgctcccatctcttaggaatggagtccttcaggccttgagtcccacattttccatgatgctccattaagcagctgatagcacccccacctccagggaaagtgagttcagagtccttggtctaatgcatctgtgttgaaattgaggccttcccctgtgttcacctttctgctctttttcttttagcccaaggctatgaaggcctcattcggtgctgggcatggtcactcctagcattcctcactctgttgctaacagcaacagcaataataataagggttacaacttactccataccttactgtctgccaggcattaagctaagtgctttacatatattaagtcatttaatcctcataatgaccctatgaaagagataccatctcaacccaattgacagctggtttgcaagattaggagggatgaaggacccaggggacaatgcgagggaaaactctgaccccggggccccaggctggatgttctttatgcctgtgaaccacagcttatcacatgtctggagttagggaccccacttaaagtgagattttggctggaggtggtggatcatacctataatcccagcactttgggagaccaaggcagaaggactgcttgaggccaggagttcaaaaccagtgtaggtaacagctagaccctatctctacaaaaaatttaaaaattagctgggtgtggtggtatgtgcctcaagttccagctactcaggaggctgaggtgggaggatcacttgagcacaggagtttgaagttacagtgagctatgatggcaccactgcacttcagcctaggcaacagagggagaccctgtctttaaagtacatagaggtttttcacaccaacacatctctgcccagtgtgccaacatctgccacctgctataatagtactataacactcaatatgtaattaatgtagtctcagggatgttatgacaatatgattacaactatcacgtgtgtgcccagccaggctcaatgccccaggctgggcgaggtggggcaggggacacagcctaaaatgccaggcctcaggaagccatttggtttagcagacattgtttattaaaggagttacctatgccagatcgaaggcctaagatgattaagacactatgagtgccttcaagtggttggggacgttcatgattgtggtacagacaaataggctttcacatcattcttttatgtaatcatacaacagatatttgcacctacatgtgcagagcactgtgataggcctcagtgacacagaataatacggcaaagaccccacccgatgagccccctcccaccacccaccagtacagtagggggtggtttaatggagtgttcctggaatatgaagtgggggcaggcattaggggtggcaaagggacaagtgtttatctgatcagttatgtactgtttataataagtaaatcagcagagggggaataatacttagaacctatagagagtaaatctgacaagatgaaatgctgatgaaaatatggaggaaatgaaactctcatgggttttgcagggaatctaagtcagtgctgtgttgtgaatgtaggtgtaccctttgaattcatatgttgaatcctaacccccaaagcaatggcattaagaggtggggcctttggggctgggtatggtggctcatgactgtaatcccagcactttgggatgctggcagggggcagatcacttgaagccaggagtctgagatcagcctggccaacatggtgaaaccccatctgtactaaaaatacaaaaattagccaggtgtgatggcgtacatctgtaatttcagccactcgggaggctgagacaggagaatagcttgaacccagtaggtggagatttcagtgagccgagatcgtgccactgcactccagcctgggtgacagagcgagactccatctcaaaaaaataataaagatgtggggcctgtgggaggtggttaggtcatgagggtggagatcatgaatggggttagcaccttataaaacaggcttgagggagcccttctgtcccttctaccatgtgtggatgcagtgagaaggcaccgtatctctgaagcagagagcccgccctggacactggatctgctggcaccttgatcttggacttcccagcctctagaactgtgagaaataattttttgttgtttacaaattacccaggctaaggtgtttcattgtaacctgaatggaccaagctggtgtgaccctgttggaaaactggcagtatctaccaaaagccgaacatacgtataaactgatccagcagttccactcctgggtatgtacaccacagaaagctatgtccaccgagacattggcaagaatgtttctaaccacacgctgactgtagccccaaacctgaaacaacccaaatgtccatccaccaacccaaatgtccatccacagttgaagctacagtgaagtcacagggtcgaatactactgcacagcaacgaatatgaatgaaaatatcgctatgcacagcaacatggataaatttcacagacatgaggtcaagcaaaagaggtcagagtcctcatcatcaagagagaattcattgtatgattctcttcctacaaaaagtacagaaataagcaaaactgatccatggtgttagaagccaggggaacagttaacaggggagggatactggggaggggcatcctggagtgctggtctacctcatctgggtgttgatttcacgagtattgtcagtttgtttccagactccctgttggagatgtggaaataaaaaccacctaaacaagagcagagaggccatttggtcaaagtttgcaaaggagtcagccatgattgcttgtatttggcaggggtcaaaggcaggcagggactgtgaaatgttatagtggaaaaaaagggaaggctctgggtgtgctgtgattggagattgttggcatggggacagagcggactaactggaggggcatctttggttggttgggggggtatatttggctttctctggttggtctggagttggaagagggggtgtggtggctggggattgggaagaagctggcagccactaagttcagactgttctgggtccgattgctgctgaggctgtggtttggcttccttggcttcccaggctggttatgggtttctggccagagtctattgtcatatgtggcctggccattgtccagttgtatgttcagtctcttggaaggaagggtattgactctgagaggggccaccatcgctggaatgggggacacacagtacttcctccagctgcctacacccccctagggtcagtggcgcctgcctgtgagggtgagcccaatggctagagggctctgctccaagtcattgcttactacacccacaaacattcttcgttctttaaggcctaacttaaagcccagatcctacaggaaaccttgattagacccctctctttattaagcttcctaagatcaaaccctgcttttgtgtaaatgctgacctccttgcctacattttaaaaacctagagctgggcatgatggccccagcctgtaatcccagtgattcaggagactgaggtgggaggattgctagaagccaggagttcgagaccagcctgggtaacatagctagaccacatctcttaaaataaaatagttaatttagccaggcatgatgatatatgcctgtagtcccaactacttggaaggctgaggtgtgaggatctttgagcccgggaggtcgaggctacagtaagctatgatctcaccactgtactccagcctgggtgacagagcgagacccagactcaaaaaataaaaataaaaaccctgaatatcttccttctgcaaaaaaaaaaaaaaaaaaaaaaaaaaaaaaaaaaaaaaatctaggagatgctctttaccctgcctggcctcaaactattaatagcttcctttgagcaacattatttattatgaactttcaaacacaaaaaagtagagatagaataacaaatccccatgactccatctacccatctggaccactat

SEQ ID NO: 437621 - DNA, 10171 bp, Homo sapiens
gcgggaagggtcctgggccccgggcggcggtcgccaggtctcagggccgggggtacccgagtctcgtttcctctcagtccatccacccttcatggggccagagccctctctccagaatctgagcagcaatgccgtttgctgaagacaagacctataagtatatctgccgcaatttcagcaatttttgcaatgtggatgttgtagagattctgccttacctgccctgcctcacagcaagagaccaggatcgactgcgggccacctgcacactctcagggaaccgggacaccctctggcatctcttcaatacccttcagcggcggcccggctgggtggagtacttcattgcggcactgaggggctgtgagctagttgatctcgcggacgaagtggcctctgtctaccagagctaccagcctcggacctcggaccgtcccccagacccactggagccaccgtcacttcctgctgagaggccagggccccccacacctgctgcggcccacagcatcccctacaacagctgcagagagaaggagccaagttaccccatgcctgtccaggagacccaggcgccagagtccccaggagagaattcagagcaagccctgcagacgctcagccccagagccatcccaaggaatccagatggtggccccctggagtcctcctctgacctggcagccctcagccctctgacctccagcgggcatcaggagcaggacacagaactgggcagtacccacacagcaggtgcgacctccagcctcacaccatcccgtgggcctgtgtctccatctgtctccttccagcccctggcccgttccacccccagggcaagccgcttgcctggacccacagggtcagttgtatctactggcacctccttctcctcctcatcccctggcttggcctctgcaggggctgcagagggtaaacagggtgcagagagtgaccaggccgagcctatcatctgctccagtggggcagaggcacctgccaactctctgccctccaaagtgcctaccaccttgatgcctgtgaacacagtggccctgaaagtgcctgccaacccagcatctgtcagcacagtgccctccaagttgccaactagctcaaagccccctggtgcagtgccttctaatgcgctcaccaatccagcaccatccaaattgcccatcaactcaacccgtgctggcatggtgccatccaaagtgcctactagcatggtgctcaccaaggtgtctgccagcacagtccccactgacgggagcagcagaaatgaggagaccccagcagctccaacacccgccggcgccactggaggcagctcagcctggctagacagcagctctgagaataggggccttgggtcggagctgagtaagcctggcgtgctggcatcccaggtagacagcccgttctcgggctgcttcgaggatcttgccatcagtgccagcacctccttgggcatggggccctgccatggcccagaggagaatgagtataagtccgagggcacctttgggatccacgtggctgagaaccccagcatccagctcctggagggcaaccctgggccacctgcggacccggatggcggccccaggccacaagccgaccggaagttccaggagagggaggtgccatgccacaggccctcacctggggctctgtggctccaggtggctgtgacaggggtgctggtagtcacactcctggtggtgctgtaccggcggcgtctgcactagtgaagccctgggctcttcccaccacccatctgttccgttcctgcagtatacctggcccctctccgaagccccttgtccctttcttggggattgtggaggctgggtcagaggggagttaagggactgcaggcctggcagcaggacatgccttggctgaaccaagtcctgagagcagcatctctgtccccacggtgccttgtgtgggtccccgtccttggctttctgggtcctgggctgcccccagtgctccagaccttccccactggcaatccaggttatcatccatgtcctccagaggagcttcctcctccaggcctcagccctgttggcccaggtggagcaggagggaccactggaacatgtggtgcttgggaatgcctctcctgttgcattggtccctgaaggcctcagggcaggtatgtggtgtgtgggcgactccacaagacctgcctcccatcctggcagcccagcctgagaccgttgcattgaggcaggcaggagcggcagggtggctgctctccaggagcccaactgccttgagttcctgccccactgggccccctcccctgctgggcaatcctgggaaggtctggaggttcctgtggacctcagggaagccaggggcagctgtcaggcctgaggaagacctgtggagctcctctccagcctcctctttccctcccctctggtctccattctcttcagctccctacatgggctggggaggagacacctggtgggcagagctcaggcagaggtttggatttcagctccctcacttccggggctgtgtggctttggcagatgtcagacttctggtcttgcttctccacgtggacagtgagtatctggctcattcttcactgggttcttctgagattgaacctacaggtgtttgccaagtgcctggcccagagcaagtggccactgcttctcccatctctctcctgcccaacctggtagagctgagggcatgagaggcagagtgcacagtggtcaagggtgcagctctgcagcacaggcagcctaggcctgcgtcccaacctgcctctcaccagctctgtgaccttgggcaagggatttatctgtctgtcccttagttttctcacctgtaaaaggaggataagtatatatatatatttcccagtgttgtgaagattaaaggagtttatcgatgtaggtcttaggatgagtcctggcatttaccaagggttggatatatgttattatcactattaagtgttgagggtccaggcatgctgggcaacagggaccccatctctacaaaaaagtttaaaaaattagccaggcgtggtggtgcacctgtcgtcttagctacttgggaggctgaggtgggaggatcacttgagcccagaagcttgaagctgcagtgagctaggatcgtgccactgcactccaacctgggtgagagagcgagaccctgtctcaagaaaaagaaaaatgcagagaaacaggagtcttggctactcctttagaggcagactcagaccctcctgcctcacagctttatctttgtatttgccccttactttatcttgtgccttgagaaattgctggggagagaggtatgtccactgggcagctgtacaggatggaggatatagggcgtttccactcccagcagccaggttccctcaccccaagctcacccactgttggggagattatctacaataacaccagaaacacattggggtggattgggggtatccttatgggttcttttcagggaaccattgctggacaaggcacaggagccacctccatttctgagctctgcaagggacaagaactagagccatcaggggctgggctcactgtggccccaccccaagccgtcagcctccagggatctacaccctgccttggctgctacagctttttcactccactgccctaggggagttcagcaacctaatgatctctatctctgaacatctcttcatcccatgctccaagtccagcaacctgcaccctggaaccaggagtggaccctacccgagctgtctgtattaatccccatcccccaccaccaatcttaaaaagccctctgtccccctaccctaaaccccagttaggtacccatgctgggcaggtcagttaacaatttatgcacaggtactagttttattgtattaccgttccagggtagctttgaaaaaagtatctcaaaaaggcaacaccaccgcgcccagccaaattaaattttttatagagatgaggtcatgctgttatgttgcccaggttggcctcatgagatcttgccttagcctcccaaagtgctgggattacagatgtgagacactgcacccaaaccccaccacttttttttttcctttttctttttttgagacagtcttactccgttgcccaggctggagtgtagtggcatgatctcagctcactgcaacctccgcctcccgggttcaagcaattctcctgcctcagcctcccgagtagctgggattacagaggcctgccaccacacccgactaattttcgtatttttagtagagacggggtttctccatgttggccaggctgttcttgaactcctgacctcaagtgctccacctgcgttggcttcccaaagtgctgggatacaggagtgagccactgcgcctggctgatcccagcacttttcaaatgatgccgctcaaagccgtgacttggcctactttgaacagcaaacttgttgctgctgttgtcaacctgaaggcctctcaaatgccagcttcaagcagggtgtgaattggccagtgtcagatctcaggagtcctgtgttgagagtgtggctttcagctgcggggagctgcacttggtggggaaagccaggcaggtcaccctcacagccagataatgtggaggtcagaacccaaggaagggagtgagacctccactcccagtgggggacctggccacccatccttggggacctgagaaagcgtacttcaccttggggtgaaggctgggtggggccagagggaccagtgccctcctcagtgcttaggggcagagccacctgcagcaatggtatctgcatattagcccctctccaccttctttctcccgctgaatcatttccctcaaagcccaagagctgtcactgcttctttctccctgggaagaatgcgtggactctgcctggtgatagactgaagccagaacagtgccacaccctcgccttaattccttgctaggtgttctcagatttatgagacttcttagtcaaatatgagggaggttggatgtggtggcttgtgcctgtaatcccagcattttgggaggccgaggtgggaggatcccttgaagccaggagtttgagacaagcctgggcaacaaagcaagaccctatctctaaaaaaaaaaaaaaaaaaaaatctaggagatgctctttaccctgcctggcctcaaactattaatagcttcctttgagcaacattatttattatgaactttcaaacacaaaaaagtagagagagtagaataacaaatccccatgagcccatcacccaacttcagtaattatcaattcatggccatcttgttcacccctgcctgcttccctgcttcccctcattctgcagaggttcttttcttttgagacagagtgttgctctgttgcccaggctggagtgcagtggtgcaacttcggctcactgcaacctccgcctcccaggttcaagtgattctcctgcttcagcctctcaagtagctgggattacagatgcccgccaccacacctggctaattttcgtatttttgttagagatggggtttcaccatgttggccaggctggtctcgaactcctgacctcaagtgatccgcccgccttggcctcccaaaatgctgggattacaggtgtgaaccacggtgcctggccactgtacaggttatttatagaagttggagagtgaagggttgagaaagccaaggggcagatgcgggtctggaggattttgtgcctaaggccctctctttgctcccagacagcatgaagtaacaatgaggcatccacctcttggttttgtggcctctgtggatgacgtctctcaccttgaaccagttcagagttggagtagcgcaggatcctgtcttcagaggaggggccgaagcgggttcctctgttgtcaagctctttggaggtgcctggctgctactactgtcccagagaggtgatgatgaatgatgggtgtgtccagtggcagtttgccccactgaggcaggggcttccactaggccctgacagagcccttccagcaggcagaaatccctgtgctaggcaagattcaaactccgtagcatgtctcctgctcccatctcttaggaatggagtccttcaggccttgagtcccacattttccatgatgctccattaagcagctgatagcacccccacctccagggaaagtgagttcagagtccttggtctaatgcatctgtgttgaaattgaggccttcccctgtgttcacctttctgctctttttcttttagcccaaggctatgaaggcctcattcggtgctgggcatggtcactcctagcattcctcactctgttgctaacagcaacagcaataataataagggttacaacttactccataccttactgtctgccaggcattaagctaagtgctttacatatattaagtcatttaatcctcataatgaccctatgaaagagataccatctcaacccaattgacagctggtttgcaagattaggagggatgaaggacccaggggacaatgcgagggaaaactctgaccccggggccccaggctggatgttctttatgcctgtgaaccacagcttatcacatgtctggagttagggaccccacttaaagtgagattttggctggaggtggtggatcatacctataatcccagcactttgggagaccaaggcagaaggactgcttgaggccaggagttcaaaaccagtgtaggtaacagctagaccctatctctacaaaaaatttaaaaattagctgggtgtggtggtatgtgcctcaagttccagctactcaggaggctgaggtgggaggatcacttgagcacaggagtttgaagttacagtgagctatgatggcaccactgcacttcagcctaggcaacagagggagaccctgtctttaaagtacatagaggtttttcacaccaacacatctctgcccagtgtgccaacatctgccacctgctataatagtactataacactcaatatgtaattaatgtagtctcagggatgttatgacaatatgattacaactatcacgtgtgtgcccagccaggctcaatgccccaggctgggcgaggtggggcaggggacacagcctaaaatgccaggcctcaggaagccatttggtttagcagacattgtttattaaaggagttacctatgccagatcgaaggcctaagatgattaagacactatgagtgccttcaagtggttggggacgttcatgattgtggtacagacaaataggctttcacatcattcttttatgtaatcatacaacagatatttgcacctacatgtgcagagcactgtgataggcctcagtgacacagaataatacggcaaagaccccacccgatgagccccctcccaccacccaccagtacagtagggggtggtttaatggagtgttcctggaatatgaagtgggggcaggcattaggggtggcaaagggacaagtgtttatctgatcagttatgtactgtttataataagtaaatcagcagagggggaataatacttagaacctatagagagtaaatctgacaagatgaaatgctgatgaaaatatggaggaaatgaaactctcatgggttttgcagggaatctaagtcagtgctgtgttgtgaatgtaggtgtaccctttgaattcatatgttgaatcctaacccccaaagcaatggcattaagaggtggggcctttggggctgggtatggtggctcatgactgtaatcccagcactttgggatgctggcagggggcagatcacttgaagccaggagtctgagatcagcctggccaacatggtgaaaccccatctgtactaaaaatacaaaaattagccaggtgtgatggcgtacatctgtaatttcagccactcgggaggctgagacaggagaatagcttgaacccagtaggtggagatttcagtgagccgagatcgtgccactgcactccagcctgggtgacagagcgagactccatctcaaaaaaataataaagatgtggggcctgtgggaggtggttaggtcatgagggtggagatcatgaatggggttagcaccttataaaacaggcttgagggagcccttctgtcccttctaccatgtgtggatgcagtgagaaggcaccgtatctctgaagcagagagcccgccctggacactggatctgctggcaccttgatcttggacttcccagcctctagaactgtgagaaataattttttgttgtttacaaattacccaggctaaggtgtttcattgtaacctgaatggaccaagctggtgtgaccctgttggaaaactggcagtatctaccaaaagccgaacatacgtataaactgatccagcagttccactcctgggtatgtacaccacagaaagctatgtccaccgagacattggcaagaatgtttctaaccacacgctgactgtagccccaaacctgaaacaacccaaatgtccatccaccaacccaaatgtccatccacagttgaagctacagtgaagtcacagggtcgaatactactgcacagcaacgaatatgaatgaaaatatcgctatgcacagcaacatggataaatttcacagacatgaggtcaagcaaaagaggtcagagtcctcatcatcaagagagaattcattgtatgattctcttcctacaaaaagtacagaaataagcaaaactgatccatggtgttagaagccaggggaacagttaacaggggagggatactggggaggggcatcctggagtgctggtctacctcatctgggtgttgatttcacgagtattgtcagtttgtttccagactccctgttggagatgtggaaataaaaaccacctaaacaagagcagagaggccatttggtcaaagtttgcaaaggagtcagccatgattgcttgtatttggcaggggtcaaaggcaggcagggactgtgaaatgttatagtggaaaaaaagggaaggctctgggtgtgctgtgattggagattgttggcatggggacagagcggactaactggaggggcatctttggttggttgggggggtatatttggctttctctggttggtctggagttggaagagggggtgtggtggctggggattgggaagaagctggcagccactaagttcagactgttctgggtccgattgctgctgaggctgtggtttggcttccttggcttcccaggctggttatgggtttctggccagagtctattgtcatatgtggcctggccattgtccagttgtatgttcagtctcttggaaggaagggtattgactctgagaggggccaccatcgctggaatgggggacacacagtacttcctccagctgcctacacccccctagggtcagtggcgcctgcctgtgagggtgagcccaatggctagagggctctgctccaagtcattgcttactacacccacaaacattcttcgttctttaaggcctaacttaaagcccagatcctacaggaaaccttgattagacccctctctttattaagcttcctaagatcaaaccctgcttttgtgtaaatgctgacctccttgcctacattttaaaaacctagagctgggcatgatggccccagcctgtaatcccagtgattcaggagactgaggtgggaggattgctagaagccaggagttcgagaccagcctgggtaacatagctagaccacatctcttaaaataaaatagttaatttagccaggcatgatgatatatgcctgtagtcccaactacttggaaggctgaggtgtgaggatctttgagcccgggaggtcgaggctacagtaagctatgatctcaccactgtactccagcctgggtgacagagcgagacccagactcaaaaaataaaaataaaaaccctgaatatcttccttctaaaaaaaaaatcagaaactggattttttttttcttaagcagggcttaatttgtgttttcaaatttgattcagaagtagtcccagctcataggtgttcatactgttacatccagaacattgtgtcaggctctctgtcagtttcatgtacatatggtatagaaaccatggagttaggcacttcctggatttttatgagaaattctgttttagctgttgaagtacacttttacacaagcggcctaag

SEQ ID NO: 437622 - DNA, 10094 bp, Homo sapiens
  misc_feature (4052)..(4052): n is a, c, g, or t
  misc_feature (4117)..(4118): n is a, c, g, or t
gcgggaagggtcctgggccccgggcggcggtcgccaggtctcagggccgggggtacccgagtctcgtttcctctcagtccatccacccttcatggggccagagccctctctccagaatctgagcagcaatgccgtttgctgaagacaagacctataagtatatctgccgcaatttcagcaatttttgcaatgtggatgttgtagagattctgccttacctgccctgcctcacagcaagagaccaggatcgactgcgggccacctgcacactctcagggaaccgggacaccctctggcatctcttcaatacccttcagcggcggcccggctgggtggagtacttcattgcggcactgaggggctgtgagctagttgatctcgcggacgaagtggcctctgtctaccagagctaccagcctcggacctcggaccgtcccccagacccactggagccaccgtcacttcctgctgagaggccagggccccccacacctgctgcggcccacagcatcccctacaacagctgcagagagaaggagccaagttaccccatgcctgtccaggagacccaggcgccagagtccccaggagagaattcagagcaagccctgcagacgctcagccccagagccatcccaaggaatccagatggtggccccctggagtcctcctctgacctggcagccctcagccctctgacctccagcgggcatcaggagcaggacacagaactgggcagtacccacacagcaggtgcgacctccagcctcacaccatcccgtgggcctgtgtctccatctgtctccttccagcccctggcccgttccacccccagggcaagccgcttgcctggacccacagggtcagttgtatctactggcacctccttctcctcctcatcccctggcttggcctctgcaggggctgcagagggtaaacagggtgcagagagtgaccaggccgagcctatcatctgctccagtggggcagaggcacctgccaactctctgccctccaaagtgcctaccaccttgatgcctgtgaacacagtggccctgaaagtgcctgccaacccagcatctgtcagcacagtgccctccaagttgccaactagctcaaagccccctggtgcagtgccttctaatgcgctcaccaatccagcaccatccaaattgcccatcaactcaacccgtgctggcatggtgccatccaaagtgcctactagcatggtgctcaccaaggtgtctgccagcacagtccccactgacgggagcagcagaaatgaggagaccccagcagctccaacacccgccggcgccactggaggcagctcagcctggctagacagcagctctgagaataggggccttgggtcggagctgagtaagcctggcgtgctggcatcccaggtagacagcccgttctcgggctgcttcgaggatcttgccatcagtgccagcacctccttgggcatggggccctgccatggcccagaggagaatgagtataagtccgagggcacctttgggatccacgtggctgagaaccccagcatccagctcctggagggcaaccctgggccacctgcggacccggatggcggccccaggccacaagccgaccggaagttccaggagagggaggtgccatgccacaggccctcacctggggctctgtggctccaggtggctgtgacaggggtgctggtagtcacactcctggtggtgctgtaccggcggcgtctgcactagtgaagccctgggctcttcccaccacccatctgttccgttcctgcagtatacctggcccctctccgaagccccttgtccctttcttggggattgtggaggctgggtcagaggggagttaagggactgcaggcctggcagcaggacatgccttggctgaaccaagtcctgagagcagcatctctgtccccacggtgccttgtgtgggtccccgtccttggctttctgggtcctgggctgcccccagtgctccagaccttccccactggcaatccaggttatcatccatgtcctccagaggagcttcctcctccaggcctcagccctgttggcccaggtggagcaggagggaccactggaacatgtggtgcttgggaatgcctctcctgttgcattggtccctgaaggcctcagggcaggtatgtggtgtgtgggcgactccacaagacctgcctcccatcctggcagcccagcctgagaccgttgcattgaggcaggcaggagcggcagggtggctgctctccaggagcccaactgccttgagttcctgccccactgggccccctcccctgctgggcaatcctgggaaggtctggaggttcctgtggacctcagggaagccaggggcagctgtcaggcctgaggaagacctgtggagctcctctccagcctcctctttccctcccctctggtctccattctcttcagctccctacatgggctggggaggagacacctggtgggcagagctcaggcagaggtttggatttcagctccctcacttccggggctgtgtggctttggcagatgtcagacttctggtcttgcttctccacgtggacagtgagtatctggctcattcttcactgggttcttctgagattgaacctacaggtgtttgccaagtgcctggcccagagcaagtggccactgcttctcccatctctctcctgcccaacctggtagagctgagggcatgagaggcagagtgcacagtggtcaagggtgcagctctgcagcacaggcagcctaggcctgcgtcccaacctgcctctcaccagctctgtgaccttgggcaagggatttatctgtctgtcccttagttttctcacctgtaaaaggaggataagtatatatatatatttcccagtgttgtgaagattaaaggagtttatcgatgtaggtcttaggatgagtcctggcatttaccaagggttggatatatgttattatcactattaagtgttgagggtccaggcatgctgggcaacagggaccccatctctacaaaaaagtttaaaaaattagccaggcgtggtggtgcacctgtcgtcttagctacttgggaggctgaggtgggaggatcacttgagcccagaagcttgaagctgcagtgagctaggatcgtgccactgcactccaacctgggtgagagagcgagaccctgtctcaagaaaaagaaaaatgcagagaaacaggagtcttggctactcctttagaggcagactcagaccctcctgcctcacagctttatctttgtatttgccccttactttatcttgtgccttgagaaattgctggggagagaggtatgtccactgggcagctgtacaggatggaggatatagggcgtttccactcccagcagccaggttccctcaccccaagctcacccactgttggggagattatctacaataacaccagaaacacattggggtggattgggggtatccttatgggttcttttcagggaaccattgctggacaaggcacaggagccacctccatttctgagctctgcaagggacaagaactagagccatcaggggctgggctcactgtggccccaccccaagccgtcagcctccagggatctacaccctgccttggctgctacagctttttcactccactgccctaggggagttcagcaacctaatgatctctatctctgaacatctcttcatcccatgctccaagtccagcaacctgcaccctggaaccaggagtggaccctacccgagctgtctgtattaatccccatcccccaccaccaatcttaaaaagccctctgtccccctaccctaaaccccagttaggtacccatgctgggcaggtcagttaacaatttatgcacaggtactagttttattgtattaccgttccagggtagctttgaaaaaagtatctcaaaaaggcaacatgggccgagcgcagtggctcgcgcctgtggtcccagcactttgggaggccaaggtgggcagatcgcctgaggtctggagttcaagaccagcctggccnacggggtgaaaccccgtctctacaaaaataagaaaattggccaggtgtggtggcagacgtctgtnntcccagctattcaggaggctgaggcacgagaattccatgaacaacctccgcctcccgggttcaagcaattctcctgcctcagcctcccgagtagctgggattacagaggcctgccaccacacccgactaattttcgtatttttagtagagacggggtttctccatgttggccaggctgttcttgaactcctgacctcaagtgctccacctgcgttggcttcccaaagtgctgggatacaggagtgagccactgcgcctggctgatcccagcacttttcaaatgatgccgctcaaagccgtgacttggcctactttgaacagcaaacttgttgctgctgttgtcaacctgaaggcctctcaaatgccagcttcaagcagggtgtgaattggccagtgtcagatctcaggagtcctgtgttgagagtgtggctttcagctgcggggagctgcacttggtggggaaagccaggcaggtcaccctcacagccagataatgtggaggtcagaacccaaggaagggagtgagacctccactcccagtgggggacctggccacccatccttggggacctgagaaagcgtacttcaccttggggtgaaggctgggtggggccagagggaccagtgccctcctcagtgcttaggggcagagccacctgcagcaatggtatctgcatattagcccctctccaccttctttctcccgctgaatcatttccctcaaagcccaagagctgtcactgcttctttctccctgggaagaatgcgtggactctgcctggtgatagactgaagccagaacagtgccacaccctcgccttaattccttgctaggtgttctcagatttatgagacttcttagtcaaatatgagggaggttggatgtggtggcttgtgcctgtaatcccagcattttgggaggccgaggtgggaggatcccttgaagccaggagtttgagacaagcctgggcaacaaagcaagaccctatctctaaaaaaaaaaaaaaaaaaaaatctaggagatgctctttaccctgcctggcctcaaactattaatagcttcctttgagcaacattatttattatgaactttcaaacacaaaaaagtagagagagtagaataacaaatccccatgagcccatcacccaacttcagtaattatcaattcatggccatcttgttcacccctgcctgcttccctgcttcccctcattctgcagaggttcttttcttttgagacagagtgttgctctgttgcccaggctggagtgcagtggtgcaacttcggctcactgcaacctccgcctcccaggttcaagtgattctcctgcttcagcctctcaagtagctgggattacagatgcccgccaccacacctggctaattttcgtatttttgttagagatggggtttcaccatgttggccaggctggtctcgaactcctgacctcaagtgatccgcccgccttggcctcccaaaatgctgggattacaggtgtgaaccacggtgcctggccactgtacaggttatttatagaagttggagagtgaagggttgagaaagccaaggggcagatgcgggtctggaggattttgtgcctaaggccctctctttgctcccagacagcatgaagtaacaatgaggcatccacctcttggttttgtggcctctgtggatgacgtctctcaccttgaaccagttcagagttggagtagcgcaggatcctgtcttcagaggaggggccgaagcgggttcctctgttgtcaagctctttggaggtgcctggctgctactactgtcccagagaggtgatgatgaatgatgggtgtgtccagtggcagtttgccccactgaggcaggggcttccactaggccctgacagagcccttccagcaggcagaaatccctgtgctaggcaagattcaaactccgtagcatgtctcctgctcccatctcttaggaatggagtccttcaggccttgagtcccacattttccatgatgctccattaagcagctgatagcacccccacctccagggaaagtgagttcagagtccttggtctaatgcatctgtgttgaaattgaggccttcccctgtgttcacctttctgctctttttcttttagcccaaggctatgaaggcctcattcggtgctgggcatggtcactcctagcattcctcactctgttgctaacagcaacagcaataataataagggttacaacttactccataccttactgtctgccaggcattaagctaagtgctttacatatattaagtcatttaatcctcataatgaccctatgaaagagataccatctcaacccaattgacagctggtttgcaagattaggagggatgaaggacccaggggacaatgcgagggaaaactctgaccccggggccccaggctggatgttctttatgcctgtgaaccacagcttatcacatgtctggagttagggaccccacttaaagtgagattttggctggaggtggtggatcatacctataatcccagcactttgggagaccaaggcagaaggactgcttgaggccaggagttcaaaaccagtgtaggtaacagctagaccctatctctacaaaaaatttaaaaattagctgggtgtggtggtatgtgcctcaagttccagctactcaggaggctgaggtgggaggatcacttgagcacaggagtttgaagttacagtgagctatgatggcaccactgcacttcagcctaggcaacagagggagaccctgtctttaaagtacatagaggtttttcacaccaacacatctctgcccagtgtgccaacatctgccacctgctataatagtactataacactcaatatgtaattaatgtagtctcagggatgttatgacaatatgattacaactatcacgtgtgtgcccagccaggctcaatgccccaggctgggcgaggtggggcaggggacacagcctaaaatgccaggcctcaggaagccatttggtttagcagacattgtttattaaaggagttacctatgccagatcgaaggcctaagatgattaagacactatgagtgccttcaagtggttggggacgttcatgattgtggtacagacaaataggctttcacatcattcttttatgtaatcatacaacagatatttgcacctacatgtgcagagcactgtgataggcctcagtgacacagaataatacggcaaagaccccacccgatgagccccctcccaccacccaccagtacagtagggggtggtttaatggagtgttcctggaatatgaagtgggggcaggcattaggggtggcaaagggacaagtgtttatctgatcagttatgtactgtttataataagtaaatcagcagagggggaataatacttagaacctatagagagtaaatctgacaagatgaaatgctgatgaaaatatggaggaaatgaaactctcatgggttttgcagggaatctaagtcagtgctgtgttgtgaatgtaggtgtaccctttgaattcatatgttgaatcctaacccccaaagcaatggcattaagaggtggggcctttggggctgggtatggtggctcatgactgtaatcccagcactttgggatgctggcagggggcagatcacttgaagccaggagtctgagatcagcctggccaacatggtgaaaccccatctgtactaaaaatacaaaaattagccaggtgtgatggcgtacatctgtaatttcagccactcgggaggctgagacaggagaatagcttgaacccagtaggtggagatttcagtgagccgagatcgtgccactgcactccagcctgggtgacagagcgagactccatctcaaaaaaataataaagatgtggggcctgtgggaggtggttaggtcatgagggtggagatcatgaatggggttagcaccttataaaacaggcttgagggagcccttctgtcccttctaccatgtgtggatgcagtgagaaggcaccgtatctctgaagcagagagcccgccctggacactggatctgctggcaccttgatcttggacttcccagcctctagaactgtgagaaataattttttgttgtttacaaattacccaggctaaggtgtttcattgtaacctgaatggaccaagctggtgtgaccctgttggaaaactggcagtatctaccaaaagccgaacatacgtataaactgatccagcagttccactcctgggtatgtacaccacagaaagctatgtccaccgagacattggcaagaatgtttctaaccacacgctgactgtagccccaaacctgaaacaacccaaatgtccatccaccaacccaaatgtccatccacagttgaagctacagtgaagtcacagggtcgaatactactgcacagcaacgaatatgaatgaaaatatcgctatgcacagcaacatggataaatttcacagacatgaggtcaagcaaaagaggtcagagtcctcatcatcaagagagaattcattgtatgattctcttcctacaaaaagtacagaaataagcaaaactgatccatggtgttagaagccaggggaacagttaacaggggagggatactggggaggggcatcctggagtgctggtctacctcatctgggtgttgatttcacgagtattgtcagtttgtttccagactccctgttggagatgtggaaataaaaaccacctaaacaagagcagagaggccatttggtcaaagtttgcaaaggagtcagccatgattgcttgtatttggcaggggtcaaaggcaggcagggactgtgaaatgttatagtggaaaaaaagggaaggctctgggtgtgctgtgattggagattgttggcatggggacagagcggactaactggaggggcatctttggttggttgggggggtatatttggctttctctggttggtctggagttggaagagggggtgtggtggctggggattgggaagaagctggcagccactaagttcagactgttctgggtccgattgctgctgaggctgtggtttggcttccttggcttcccaggctggttatgggtttctggccagagtctattgtcatatgtggcctggccattgtccagttgtatgttcagtctcttggaaggaagggtattgactctgagaggggccaccatcgctggaatgggggacacacagtacttcctccagctgcctacacccccctagggtcagtggcgcctgcctgtgagggtgagcccaatggctagagggctctgctccaagtcattgcttactacacccacaaacattcttcgttctttaaggcctaacttaaagcccagatcctacaggaaaccttgattagacccctctctttattaagcttcctaagatcaaaccctgcttttgtgtaaatgctgacctccttgcctacattttaaaaacctagagctgggcatgatggccccagcctgtaatcccagtgattcaggagactgaggtgggaggattgctagaagccaggagttcgagaccagcctgggtaacatagctagaccacatctcttaaaataaaatagttaatttagccaggcatgatgatatatgcctgtagtcccaactacttggaaggctgaggtgtgaggatctttgagcccgggaggtcgaggctacagtaagctatgatctcaccactgtactccagcctgggtgacagagcgagacccagactcaaaaaataaaaataaaaaccctgaatatcttccttctgcaaaaaaaaaaaaaaaaaaaaaaaaaaaaaaaaaaaaaaatctaggagatgctctttaccctgcctggcctcaaactattaatagcttcctttgagcaacattatttattatgaactttcaaacacaaaaaagtagagatagaataacaaatccccatgactccatctacccatctggaccactat

SEQ ID NO: 437623 - DNA, 10179 bp, Homo sapiens
gcgggaagggtcctgggccccgggcggcggtcgccaggtctcagggccgggggtacccgagtctcgtttcctctcagtccatccacccttcatggggccagagccctctctccagaatctgagcagcaatgccgtttgctgaagacaagacctataagtatatctgccgcaatttcagcaatttttgcaatgtggatgttgtagagattctgccttacctgccctgcctcacagcaagagaccaggatcgactgcgggccacctgcacactctcagggaaccgggacaccctctggcatctcttcaatacccttcagcggcggcccggctgggtggagtacttcattgcggcactgaggggctgtgagctagttgatctcgcggacgaagtggcctctgtctaccagagctaccagcctcggacctcggaccgtcccccagacccactggagccaccgtcacttcctgctgagaggccagggccccccacacctgctgcggcccacagcatcccctacaacagctgcagagagaaggagccaagttaccccatgcctgtccaggagacccaggcgccagagtccccaggagagaattcagagcaagccctgcagacgctcagccccagagccatcccaaggaatccagatggtggccccctggagtcctcctctgacctggcagccctcagccctctgacctccagcgggcatcaggagcaggacacagaactgggcagtacccacacagcaggtgcgacctccagcctcacaccatcccgtgggcctgtgtctccatctgtctccttccagcccctggcccgttccacccccagggcaagccgcttgcctggacccacagggtcagttgtatctactggcacctccttctcctcctcatcccctggcttggcctctgcaggggctgcagagggtaaacagggtgcagagagtgaccaggccgagcctatcatctgctccagtggggcagaggcacctgccaactctctgccctccaaagtgcctaccaccttgatgcctgtgaacacagtggccctgaaagtgcctgccaacccagcatctgtcagcacagtgccctccaagttgccaactagctcaaagccccctggtgcagtgccttctaatgcgctcaccaatccagcaccatccaaattgcccatcaactcaacccgtgctggcatggtgccatccaaagtgcctactagcatggtgctcaccaaggtgtctgccagcacagtccccactgacgggagcagcagaaatgaggagaccccagcagctccaacacccgccggcgccactggaggcagctcagcctggctagacagcagctctgagaataggggccttgggtcggagctgagtaagcctggcgtgctggcatcccaggtagacagcccgttctcgggctgcttcgaggatcttgccatcagtgccagcacctccttgggcatggggccctgccatggcccagaggagaatgagtataagtccgagggcacctttgggatccacgtggctgagaaccccagcatccagctcctggagggcaaccctgggccacctgcggacccggatggcggccccaggccacaagccgaccggaagttccaggagagggaggtgccatgccacaggccctcacctggggctctgtggctccaggtggctgtgacaggggtgctggtagtcacactcctggtggtgctgtaccggcggcgtctgcactagtgaagccctgggctcttcccaccacccatctgttccgttcctgcagtatacctggcccctctccgaagccccttgtccctttcttggggattgtggaggctgggtcagaggggagttaagggactgcaggcctggcagcaggacatgccttggctgaaccaagtcctgagagcagcatctctgtccccacggtgccttgtgtgggtccccgtccttggctttctgggtcctgggctgcccccagtgctccagaccttccccactggcaatccaggttatcatccatgtcctccagaggagcttcctcctccaggcctcagccctgttggcccaggtggagcaggagggaccactggaacatgtggtgcttgggaatgcctctcctgttgcattggtccctgaaggcctcagggcaggtatgtggtgtgtgggcgactccacaagacctgcctcccatcctggcagcccagcctgagaccgttgcattgaggcaggcaggagcggcagggtggctgctctccaggagcccaactgccttgagttcctgccccactgggccccctcccctgctgggcaatcctgggaaggtctggaggttcctgtggacctcagggaagccaggggcagctgtcaggcctgaggaagacctgtggagctcctctccagcctcctctttccctcccctctggtctccattctcttcagctccctacatgggctggggaggagacacctggtgggcagagctcaggcagaggtttggatttcagctccctcacttccggggctgtgtggctttggcagatgtcagacttctggtcttgcttctccacgtggacagtgagtatctggctcattcttcactgggttcttctgagattgaacctacaggtgtttgccaagtgcctggcccagagcaagtggccactgcttctcccatctctctcctgcccaacctggtagagctgagggcatgagaggcagagtgcacagtggtcaagggtgcagctctgcagcacaggcagcctaggcctgcgtcccaacctgcctctcaccagctctgtgaccttgggcaagggatttatctgtctgtcccttagttttctcacctgtaaaaggaggataagtatatatatatatttcccagtgttgtgaagattaaaggagtttatcgatgtaggtcttaggatgagtcctggcatttaccaagggttggatatatgttattatcactattaagtgttgagggtccaggcatgctgggcaacagggaccccatctctacaaaaaagtttaaaaaattagccaggcgtggtggtgcacctgtcgtcttagctacttgggaggctgaggtgggaggatcacttgagcccagaagcttgaagctgcagtgagctaggatcgtgccactgcactccaacctgggtgagagagcgagaccctgtctcaagaaaaagaaaaatgcagagaaacaggagtcttggctactcctttagaggcagactcagaccctcctgcctcacagctttatctttgtatttgccccttactttatcttgtgccttgagaaattgctggggagagaggtatgtccactgggcagctgtacaggatggaggatatagggcgtttccactcccagcagccaggttccctcaccccaagctcacccactgttggggagattatctacaataacaccagaaacacattggggtggattgggggtatccttatgggttcttttcagggaaccattgctggacaaggcacaggagccacctccatttctgagctctgcaagggacaagaactagagccatcaggggctgggctcactgtggccccaccccaagccgtcagcctccagggatctacaccctgccttggctgctacagctttttcactccactgccctaggggagttcagcaacctaatgatctctatctctgaacatctcttcatcccatgctccaagtccagcaacctgcaccctggaaccaggagtggaccctacccgagctgtctgtattaatccccatcccccaccaccaatcttaaaaagccctctgtccccctaccctaaaccccagttaggtacccatgctgggcaggtcagttaacaatttatgcacaggtactagttttattgtattaccgttccagggtagctttgaaaaaagtatctcaaaaaggcaacaccaccgcgcccagccaaattaaattttttatagagatgaggtcatgctgttatgttgcccaggttggcctcatgagatcttgccttagcctcccaaagtgctgggattacagatgtgagacactgcacccaaaccccaccacttttttttttcctttttctttttttgagacagtcttactccgttgcccaggctggagtgtagtggcatgatctcagctcactgcaacctccgcctcccgggttcaagcaattctcctgcctcagcctcccgagtagctgggattacagaggcctgccaccacacccgactaattttcgtatttttagtagagacggggtttctccatgttggccaggctgttcttgaactcctgacctcaagtgctccacctgcgttggcttcccaaagtgctgggatacaggagtgagccactgcgcctggctgatcccagcacttttcaaatgatgccgctcaaagccgtgacttggcctactttgaacagcaaacttgttgctgctgttgtcaacctgaaggcctctcaaatgccagcttcaagcagggtgtgaattggccagtgtcagatctcaggagtcctgtgttgagagtgtggctttcagctgcggggagctgcacttggtggggaaagccaggcaggtcaccctcacagccagataatgtggaggtcagaacccaaggaagggagtgagacctccactcccagtgggggacctggccacccatccttggggacctgagaaagcgtacttcaccttggggtgaaggctgggtggggccagagggaccagtgccctcctcagtgcttaggggcagagccacctgcagcaatggtatctgcatattagcccctctccaccttctttctcccgctgaatcatttccctcaaagcccaagagctgtcactgcttctttctccctgggaagaatgcgtggactctgcctggtgatagactgaagccagaacagtgccacaccctcgccttaattccttgctaggtgttctcagatttatgagacttcttagtcaaatatgagggaggttggatgtggtggcttgtgcctgtaatcccagcattttgggaggccgaggtgggaggatcccttgaagccaggagtttgagacaagcctgggcaacaaagcaagaccctatctctaaaaaaaaaaaaaaaaaaaaatctaggagatgctctttaccctgcctggcctcaaactattaatagcttcctttgagcaacattatttattatgaactttcaaacacaaaaaagtagagagagtagaataacaaatccccatgagcccatcacccaacttcagtaattatcaattcatggccatcttgttcacccctgcctgcttccctgcttcccctcattctgcagaggttcttttcttttgagacagagtgttgctctgttgcccaggctggagtgcagtggtgcaacttcggctcactgcaacctccgcctcccaggttcaagtgattctcctgcttcagcctctcaagtagctgggattacagatgcccgccaccacacctggctaattttcgtatttttgttagagatggggtttcaccatgttggccaggctggtctcgaactcctgacctcaagtgatccgcccgccttggcctcccaaaatgctgggattacaggtgtgaaccacggtgcctggccactgtacaggttatttatagaagttggagagtgaagggttgagaaagccaaggggcagatgcgggtctggaggattttgtgcctaaggccctctctttgctcccagacagcatgaagtaacaatgaggcatccacctcttggttttgtggcctctgtggatgacgtctctcaccttgaaccagttcagagttggagtagcgcaggatcctgtcttcagaggaggggccgaagcgggttcctctgttgtcaagctctttggaggtgcctggctgctactactgtcccagagaggtgatgatgaatgatgggtgtgtccagtggcagtttgccccactgaggcaggggcttccactaggccctgacagagcccttccagcaggcagaaatccctgtgctaggcaagattcaaactccgtagcatgtctcctgctcccatctcttaggaatggagtccttcaggccttgagtcccacattttccatgatgctccattaagcagctgatagcacccccacctccagggaaagtgagttcagagtccttggtctaatgcatctgtgttgaaattgaggccttcccctgtgttcacctttctgctctttttcttttagcccaaggctatgaaggcctcattcggtgctgggcatggtcactcctagcattcctcactctgttgctaacagcaacagcaataataataagggttacaacttactccataccttactgtctgccaggcattaagctaagtgctttacatatattaagtcatttaatcctcataatgaccctatgaaagagataccatctcaacccaattgacagctggtttgcaagattaggagggatgaaggacccaggggacaatgcgagggaaaactctgaccccggggccccaggctggatgttctttatgcctgtgaaccacagcttatcacatgtctggagttagggaccccacttaaagtgagattttggctggaggtggtggatcatacctataatcccagcactttgggagaccaaggcagaaggactgcttgaggccaggagttcaaaaccagtgtaggtaacagctagaccctatctctacaaaaaatttaaaaattagctgggtgtggtggtatgtgcctcaagttccagctactcaggaggctgaggtgggaggatcacttgagcacaggagtttgaagttacagtgagctatgatggcaccactgcacttcagcctaggcaacagagggagaccctgtctttaaagtacatagaggtttttcacaccaacacatctctgcccagtgtgccaacatctgccacctgctataatagtactataacactcaatatgtaattaatgtagtctcagggatgttatgacaatatgattacaactatcacgtgtgtgcccagccaggctcaatgccccaggctgggcgaggtggggcaggggacacagcctaaaatgccaggcctcaggaagccatttggtttagcagacattgtttattaaaggagttacctatgccagatcgaaggcctaagatgattaagacactatgagtgccttcaagtggttggggacgttcatgattgtggtacagacaaataggctttcacatcattcttttatgtaatcatacaacagatatttgcacctacatgtgcagagcactgtgataggcctcagtgacacagaataatacggcaaagaccccacccgatgagccccctcccaccacccaccagtacagtagggggtggtttaatggagtgttcctggaatatgaagtgggggcaggcattaggggtggcaaagggacaagtgtttatctgatcagttatgtactgtttataataagtaaatcagcagagggggaataatacttagaacctatagagagtaaatctgacaagatgaaatgctgatgaaaatatggaggaaatgaaactctcatgggttttgcagggaatctaagtcagtgctgtgttgtgaatgtaggtgtaccctttgaattcatatgttgaatcctaacccccaaagcaatggcattaagaggtggggcctttggggctgggtatggtggctcatgactgtaatcccagcactttgggatgctggcagggggcagatcacttgaagccaggagtctgagatcagcctggccaacatggtgaaaccccatctgtactaaaaatacaaaaattagccaggtgtgatggcgtacatctgtaatttcagccactcgggaggctgagacaggagaatagcttgaacccagtaggtggagatttcagtgagccgagatcgtgccactgcactccagcctgggtgacagagcgagactccatctcaaaaaaataataaagatgtggggcctgtgggaggtggttaggtcatgagggtggagatcatgaatggggttagcaccttataaaacaggcttgagggagcccttctgtcccttctaccatgtgtggatgcagtgagaaggcaccgtatctctgaagcagagagcccgccctggacactggatctgctggcaccttgatcttggacttcccagcctctagaactgtgagaaataattttttgttgtttacaaattacccaggctaaggtgtttcattgtaacctgaatggaccaagctggtgtgaccctgttggaaaactggcagtatctaccaaaagccgaacatacgtataaactgatccagcagttccactcctgggtatgtacaccacagaaagctatgtccaccgagacattggcaagaatgtttctaaccacacgctgactgtagccccaaacctgaaacaacccaaatgtccatccaccaacccaaatgtccatccacagttgaagctacagtgaagtcacagggtcgaatactactgcacagcaacgaatatgaatgaaaatatcgctatgcacagcaacatggataaatttcacagacatgaggtcaagcaaaagaggtcagagtcctcatcatcaagagagaattcattgtatgattctcttcctacaaaaagtacagaaataagcaaaactgatccatggtgttagaagccaggggaacagttaacaggggagggatactggggaggggcatcctggagtgctggtctacctcatctgggtgttgatttcacgagtattgtcagtttgtttccagactccctgttggagatgtggaaataaaaaccacctaaacaagagcagagaggccatttggtcaaagtttgcaaaggagtcagccatgattgcttgtatttggcaggggtcaaaggcaggcagggactgtgaaatgttatagtggaaaaaaagggaaggctctgggtgtgctgtgattggagattgttggcatggggacagagcggactaactggaggggcatctttggttggttgggggggtatatttggctttctctggttggtctggagttggaagagggggtgtggtggctggggattgggaagaagctggcagccactaagttcagactgttctgggtccgattgctgctgaggctgtggtttggcttccttggcttcccaggctggttatgggtttctggccagagtctattgtcatatgtggcctggccattgtccagttgtatgttcagtctcttggaaggaagggtattgactctgagaggggccaccatcgctggaatgggggacacacagtacttcctccagctgcctacacccccctagggtcagtggcgcctgcctgtgagggtgagcccaatggctagagggctctgctccaagtcattgcttactacacccacaaacattcttcgttctttaaggcctaacttaaagcccagatcctacaggaaaccttgattagacccctctctttattaagcttcctaagatcaaaccctgcttttgtgtaaatgctgacctccttgcctacattttaaaaacctagagctgggcatgatggccccagcctgtaatcccagtgattcaggagactgaggtgggaggattgctagaagccaggagttcgagaccagcctgggtaacatagctagaccacatctcttaaaataaaatagttaatttagccaggcatgatgatatatgcctgtagtcccaactacttggaaggctgaggtgtgaggatctttgagcccgggaggtcgaggctacagtaagctatgatctcaccactgtactccagcctgggtgacagagcgagacccagactggagtacagtggtgagatcatagcttactgtactccagcctgggtgacagagcgagacccagactcaaaaaataaaaataaaaaccctgaatatcttccttctgcaaaaaaaaaaaaaaaaaaaaaaaaaaaaaaaaaaaaaaatctaggagatgctctttaccctgcctggcctcaaactattaatagcttcctttgagcaacattatttattatgaactttcaaacacaaaaaagtagagatagaataacaaatccccatgactccatctacccatctggaccactat

SEQ ID NO: 437624 - DNA, 9682 bp, Homo sapiens
gcgggaagggtcctgggccccgggcggcggtcgccaggtctcagggccgggggtacccgagtctcgtttcctctcagtccatccacccttcatggggccagagccctctctccagaatctgagcagcaatgccgtttgctgaagacaagacctataagtatatctgccgcaatttcagcaatttttgcaatgtggatgttgtagagattctgccttacctgccctgcctcacagcaagagaccaggatcgactgcgggccacctgcacactctcagggaaccgggacaccctctggcatctcttcaatacccttcagcggcggcccggctgggtggagtacttcattgcggcactgaggggctgtgagctagttgatctcgcggacgaagtggcctctgtctaccagagctaccagcctcggacctcggaccgtcccccagacccactggagccaccgtcacttcctgctgagaggccagggccccccacacctgctgcggcccacagcatcccctacaacagctgcagagagaaggagccaagttaccccatgcctgtccaggagacccaggcgccagagtccccaggagagaattcagagcaagccctgcagacgctcagccccagagccatcccaaggaatccagatggtggccccctggagtcctcctctgacctggcagccctcagccctctgacctccagcgggcatcaggagcaggacacagaactgggcagtacccacacagcaggtgcgacctccagcctcacaccatcccgtgggcctgtgtctccatctgtctccttccagcccctggcccgttccacccccagggcaagccgcttgcctggacccacagggtcagttgtatctactggcacctccttctcctcctcatcccctggcttggcctctgcaggggctgcagagggtaaacagggtgcagagagtgaccaggccgagcctatcatctgctccagtggggcagaggcacctgccaactctctgccctccaaagtgcctaccaccttgatgcctgtgaacacagtggccctgaaagtgcctgccaacccagcatctgtcagcacagtgccctccaagttgccaactagctcaaagccccctggtgcagtgccttctaatgcgctcaccaatccagcaccatccaaattgcccatcaactcaacccgtgctggcatggtgccatccaaagtgcctactagcatggtgctcaccaaggtgtctgccagcacagtccccactgacgggagcagcagaaatgaggagaccccagcagctccaacacccgccggcgccactggaggcagctcagcctggctagacagcagctctgagaataggggccttgggtcggagctgagtaagcctggcgtgctggcatcccaggtagacagcccgttctcgggctgcttcgaggatcttgccatcagtgccagcacctccttgggcatggggccctgccatggcccagaggagaatgagtataagtccgagggcacctttgggatccacgtggctgagaaccccagcatccagctcctggagggcaaccctgggccacctgcggacccggatggcggccccaggccacaagccgaccggaagttccaggagagggaggtgccatgccacaggccctcacctggggctctgtggctccaggtggctgtgacaggggtgctggtagtcacactcctggtggtgctgtaccggcggcgtctgcactagtgaagccctgggctcttcccaccacccatctgttccgttcctgcagtatacctggcccctctccgaagccccttgtccctttcttggggattgtggaggctgggtcagaggggagttaagggactgcaggcctggcagcaggacatgccttggctgaaccaagtcctgagagcagcatctctgtccccacggtgccttgtgtgggtccccgtccttggctttctgggtcctgggctgcccccagtgctccagaccttccccactggcaatccaggttatcatccatgtcctccagaggagcttcctcctccaggcctcagccctgttggcccaggtggagcaggagggaccactggaacatgtggtgcttgggaatgcctctcctgttgcattggtccctgaaggcctcagggcaggtatgtggtgtgtgggcgactccacaagacctgcctcccatcctggcagcccagcctgagaccgttgcattgaggcaggcaggagcggcagggtggctgctctccaggagcccaactgccttgagttcctgccccactgggccccctcccctgctgggcaatcctgggaaggtctggaggttcctgtggacctcagggaagccaggggcagctgtcaggcctgaggaagacctgtggagctcctctccagcctcctctttccctcccctctggtctccattctcttcagctccctacatgggctggggaggagacacctggtgggcagagctcaggcagaggtttggatttcagctccctcacttccggggctgtgtggctttggcagatgtcagacttctggtcttgcttctccacgtggacagtgagtatctggctcattcttcactgggttcttctgagattgaacctacaggtgtttgccaagtgcctggcccagagcaagtggccactgcttctcccatctctctcctgcccaacctggtagagctgagggcatgagaggcagagtgcacagtggtcaagggtgcagctctgcagcacaggcagcctaggcctgcgtcccaacctgcctctcaccagctctgtgaccttgggcaagggatttatctgtctgtcccttagttttctcacctgtaaaaggaggataagtatatatatatatttcccagtgttgtgaagattaaaggagtttatcgatgtaggtcttaggatgagtcctggcatttaccaagggttggatatatgttattatcactattaagtgttgagggtccaggcatgctgggcaacagggaccccatctctacaaaaaagtttaaaaaattagccaggcgtggtggtgcacctgtcgtcttagctacttgggaggctgaggtgggaggatcacttgagcccagaagcttgaagctgcagtgagctaggatcgtgccactgcactccaacctgggtgagagagcgagaccctgtctcaagaaaaagaaaaatgcagagaaacaggagtcttggctactcctttagaggcagactcagaccctcctgcctcacagctttatctttgtatttgccccttactttatcttgtgccttgagaaattgctggggagagaggtatgtccactgggcagctgtacaggatggaggatatagggcgtttccactcccagcagccaggttccctcaccccaagctcacccactgttggggagattatctacaataacaccagaaacacattggggtggattgggggtatccttatgggttcttttcagggaaccattgctggacaaggcacaggagccacctccatttctgagctctgcaagggacaagaactagagccatcaggggctgggctcactgtggccccaccccaagccgtcagcctccagggatctacaccctgccttggctgctacagctttttcactccactgccctaggggagttcagcaacctaatgatctctatctctgaacatctcttcatcccatgctccaagtccagcaacctgcaccctggaaccaggagtggaccctacccgagctgtctgtattaatccccatcccccaccaccaatcttaaaaagccctctgtccccctaccctaaaccccagttaggtacccatgctgggcaggtcagttaacaatttatgcacaggtactagttttattgtattaccgttccagggtagctttgaaaaaagtatctcaaaaaggcaacacactgcgcctggctgatcccagcacttttcaaatgatgccgctcaaagccgtgacttggcctactttgaacagcaaacttgttgctgctgttgtcaacctgaaggcctctcaaatgccagcttcaagcagggtgtgaattggccagtgtcagatctcaggagtcctgtgttgagagtgtggctttcagctgcggggagctgcacttggtggggaaagccaggcaggtcaccctcacagccagataatgtggaggtcagaacccaaggaagggagtgagacctccactcccagtgggggacctggccacccatccttggggacctgagaaagcgtacttcaccttggggtgaaggctgggtggggccagagggaccagtgccctcctcagtgcttaggggcagagccacctgcagcaatggtatctgcatattagcccctctccaccttctttctcccgctgaatcatttccctcaaagcccaagagctgtcactgcttctttctccctgggaagaatgcgtggactctgcctggtgatagactgaagccagaacagtgccacaccctcgccttaattccttgctaggtgttctcagatttatgagacttcttagtcaaatatgagggaggttggatgtggtggcttgtgcctgtaatcccagcattttgggaggccgaggtgggaggatcccttgaagccaggagtttgagacaagcctgggcaacaaagcaagaccctatctctaaaaaaaaaaaaaaaaaaaaatctaggagatgctctttaccctgcctggcctcaaactattaatagcttcctttgagcaacattatttattatgaactttcaaacacaaaaaagtagagagagtagaataacaaatccccatgagcccatcacccaacttcagtaattatcaattcatggccatcttgttcacccctgcctgcttccctgcttcccctcattctgcagaggttcttttcttttgagacagagtgttgctctgttgcccaggctggagtgcagtggtgcaacttcggctcactgcaacctccgcctcccaggttcaagtgattctcctgcttcagcctctcaagtagctgggattacagatgcccgccaccacacctggctaattttcgtatttttgttagagatggggtttcaccatgttggccaggctggtctcgaactcctgacctcaagtgatccgcccgccttggcctcccaaaatgctgggattacaggtgtgaaccacggtgcctggccactgtacaggttatttatagaagttggagagtgaagggttgagaaagccaaggggcagatgcgggtctggaggattttgtgcctaaggccctctctttgctcccagacagcatgaagtaacaatgaggcatccacctcttggttttgtggcctctgtggatgacgtctctcaccttgaaccagttcagagttggagtagcgcaggatcctgtcttcagaggaggggccgaagcgggttcctctgttgtcaagctctttggaggtgcctggctgctactactgtcccagagaggtgatgatgaatgatgggtgtgtccagtggcagtttgccccactgaggcaggggcttccactaggccctgacagagcccttccagcaggcagaaatccctgtgctaggcaagattcaaactccgtagcatgtctcctgctcccatctcttaggaatggagtccttcaggccttgagtcccacattttccatgatgctccattaagcagctgatagcacccccacctccagggaaagtgagttcagagtccttggtctaatgcatctgtgttgaaattgaggccttcccctgtgttcacctttctgctctttttcttttagcccaaggctatgaaggcctcattcggtgctgggcatggtcactcctagcattcctcactctgttgctaacagcaacagcaataataataagggttacaacttactccataccttactgtctgccaggcattaagctaagtgctttacatatattaagtcatttaatcctcataatgaccctatgaaagagataccatctcaacccaattgacagctggtttgcaagattaggagggatgaaggacccaggggacaatgcgagggaaaactctgaccccggggccccaggctggatgttctttatgcctgtgaaccacagcttatcacatgtctggagttagggaccccacttaaagtgagattttggctggaggtggtggatcatacctataatcccagcactttgggagaccaaggcagaaggactgcttgaggccaggagttcaaaaccagtgtaggtaacagctagaccctatctctacaaaaaatttaaaaattagctgggtgtggtggtatgtgcctcaagttccagctactcaggaggctgaggtgggaggatcacttgagcacaggagtttgaagttacagtgagctatgatggcaccactgcacttcagcctaggcaacagagggagaccctgtctttaaagtacatagaggtttttcacaccaacacatctctgcccagtgtgccaacatctgccacctgctataatagtactataacactcaatatgtaattaatgtagtctcagggatgttatgacaatatgattacaactatcacgtgtgtgcccagccaggctcaatgccccaggctgggcgaggtggggcaggggacacagcctaaaatgccaggcctcaggaagccatttggtttagcagacattgtttattaaaggagttacctatgccagatcgaaggcctaagatgattaagacactatgagtgccttcaagtggttggggacgttcatgattgtggtacagacaaataggctttcacatcattcttttatgtaatcatacaacagatatttgcacctacatgtgcagagcactgtgataggcctcagtgacacagaataatacggcaaagaccccacccgatgagccccctcccaccacccaccagtacagtagggggtggtttaatggagtgttcctggaatatgaagtgggggcaggcattaggggtggcaaagggacaagtgtttatctgatcagttatgtactgtttataataagtaaatcagcagagggggaataatacttagaacctatagagagtaaatctgacaagatgaaatgctgatgaaaatatggaggaaatgaaactctcatgggttttgcagggaatctaagtcagtgctgtgttgtgaatgtaggtgtaccctttgaattcatatgttgaatcctaacccccaaagcaatggcattaagaggtggggcctttggggctgggtatggtggctcatgactgtaatcccagcactttgggatgctggcagggggcagatcacttgaagccaggagtctgagatcagcctggccaacatggtgaaaccccatctgtactaaaaatacaaaaattagccaggtgtgatggcgtacatctgtaatttcagccactcgggaggctgagacaggagaatagcttgaacccagtaggtggagatttcagtgagccgagatcgtgccactgcactccagcctgggtgacagagcgagactccatctcaaaaaaataataaagatgtggggcctgtgggaggtggttaggtcatgagggtggagatcatgaatggggttagcaccttataaaacaggcttgagggagcccttctgtcccttctaccatgtgtggatgcagtgagaaggcaccgtatctctgaagcagagagcccgccctggacactggatctgctggcaccttgatcttggacttcccagcctctagaactgtgagaaataattttttgttgtttacaaattacccaggctaaggtgtttcattgtaacctgaatggaccaagctggtgtgaccctgttggaaaactggcagtatctaccaaaagccgaacatacgtataaactgatccagcagttccactcctgggtatgtacaccacagaaagctatgtccaccgagacattggcaagaatgtttctaaccacacgctgactgtagccccaaacctgaaacaacccaaatgtccatccaccaacccaaatgtccatccacagttgaagctacagtgaagtcacagggtcgaatactactgcacagcaacgaatatgaatgaaaatatcgctatgcacagcaacatggataaatttcacagacatgaggtcaagcaaaagaggtcagagtcctcatcatcaagagagaattcattgtatgattctcttcctacaaaaagtacagaaataagcaaaactgatccatggtgttagaagccaggggaacagttaacaggggagggatactggggaggggcatcctggagtgctggtctacctcatctgggtgttgatttcacgagtattgtcagtttgtttccagactccctgttggagatgtggaaataaaaaccacctaaacaagagcagagaggccatttggtcaaagtttgcaaaggagtcagccatgattgcttgtatttggcaggggtcaaaggcaggcagggactgtgaaatgttatagtggaaaaaaagggaaggctctgggtgtgctgtgattggagattgttggcatggggacagagcggactaactggaggggcatctttggttggttgggggggtatatttggctttctctggttggtctggagttggaagagggggtgtggtggctggggattgggaagaagctggcagccactaagttcagactgttctgggtccgattgctgctgaggctgtggtttggcttccttggcttcccaggctggttatgggtttctggccagagtctattgtcatatgtggcctggccattgtccagttgtatgttcagtctcttggaaggaagggtattgactctgagaggggccaccatcgctggaatgggggacacacagtacttcctccagctgcctacacccccctagggtcagtggcgcctgcctgtgagggtgagcccaatggctagagggctctgctccaagtcattgcttactacacccacaaacattcttcgttctttaaggcctaacttaaagcccagatcctacaggaaaccttgattagacccctctctttattaagcttcctaagatcaaaccctgcttttgtgtaaatgctgacctccttgcctacattttaaaaacctagagctgggcatgatggccccagcctgtaatcccagtgattcaggagactgaggtgggaggattgctagaagccaggagttcgagaccagcctgggtaacatagctagaccacatctcttaaaataaaatagttaatttagccaggcatgatgatatatgcctgtagtcccaactacttggaaggctgaggtgtgaggatctttgagcccgggaggtcgaggctacagtaagctatgatctcaccactgtactccagcctgggtgacagagcgagacccagactcaaaaaataaaaataaaaaccctgaatatcttccttctgcaaaaaaaaaaaaaaaaaaaaaaaaaaaaaaaaaaaaaaatctaggagatgctctttaccctgcctggcctcaaactattaatagcttcctttgagcaacattatttattatgaactttcaaacacaaaaaagtagagatagaataacaaatccccatgactccatctacccatctggaccactat

SEQ ID NO: 437625 - DNA, 9887 bp, Homo sapiens
gcgggaagggtcctgggccccgggcggcggtcgccaggtctcagggccgggggtacccgagtctcgtttcctctcagtccatccacccttcatggggccagagccctctctccagaatctgagcagcaatgccgtttgctgaagacaagacctataagtatatctgccgcaatttcagcaatttttgcaatgtggatgttgtagagattctgccttacctgccctgcctcacagcaagagaccaggatcgactgcgggccacctgcacactctcagggaaccgggacaccctctggcatctcttcaatacccttcagcggcggcccggctgggtggagtacttcattgcggcactgaggggctgtgagctagttgatctcgcggacgaagtggcctctgtctaccagagctaccagcctcggacctcggaccgtcccccagacccactggagccaccgtcacttcctgctgagaggccagggccccccacacctgctgcggcccacagcatcccctacaacagctgcagagagaaggagccaagttaccccatgcctgtccaggagacccaggcgccagagtccccaggagagaattcagagcaagccctgcagacgctcagccccagagccatcccaaggaatccagatggtggccccctggagtcctcctctgacctggcagccctcagccctctgacctccagcgggcatcaggagcaggacacagaactgggcagtacccacacagcaggtgcgacctccagcctcacaccatcccgtgggcctgtgtctccatctgtctccttccagcccctggcccgttccacccccagggcaagccgcttgcctggacccacagggtcagttgtatctactggcacctccttctcctcctcatcccctggcttggcctctgcaggggctgcagagggtaaacagggtgcagagagtgaccaggccgagcctatcatctgctccagtggggcagaggcacctgccaactctctgccctccaaagtgcctaccaccttgatgcctgtgaacacagtggccctgaaagtgcctgccaacccagcatctgtcagcacagtgccctccaagttgccaactagctcaaagccccctggtgcagtgccttctaatgcgctcaccaatccagcaccatccaaattgcccatcaactcaacccgtgctggcatggtgccatccaaagtgcctactagcatggtgctcaccaaggtgtctgccagcacagtccccactgacgggagcagcagaaatgaggagaccccagcagctccaacacccgccggcgccactggaggcagctcagcctggctagacagcagctctgagaataggggccttgggtcggagctgagtaagcctggcgtgctggcatcccaggtagacagcccgttctcgggctgcttcgaggatcttgccatcagtgccagcacctccttgggcatggggccctgccatggcccagaggagaatgagtataagtccgagggcacctttgggatccacgtggctgagaaccccagcatccagctcctggagggcaaccctgggccacctgcggacccggatggcggccccaggccacaagccgaccggaagttccaggagagggaggtgccatgccacaggccctcacctggggctctgtggctccaggtggctgtgacaggggtgctggtagtcacactcctggtggtgctgtaccggcggcgtctgcactagtgaagccctgggctcttcccaccacccatctgttccgttcctgcagtatacctggcccctctccgaagccccttgtccctttcttggggattgtggaggctgggtcagaggggagttaagggactgcaggcctggcagcaggacatgccttggctgaaccaagtcctgagagcagcatctctgtccccacggtgccttgtgtgggtccccgtccttggctttctgggtcctgggctgcccccagtgctccagaccttccccactggcaatccaggttatcatccatgtcctccagaggagcttcctcctccaggcctcagccctgttggcccaggtggagcaggagggaccactggaacatgtggtgcttgggaatgcctctcctgttgcattggtccctgaaggcctcagggcaggtatgtggtgtgtgggcgactccacaagacctgcctcccatcctggcagcccagcctgagaccgttgcattgaggcaggcaggagcggcagggtggctgctctccaggagcccaactgccttgagttcctgccccactgggccccctcccctgctgggcaatcctgggaaggtctggaggttcctgtggacctcagggaagccaggggcagctgtcaggcctgaggaagacctgtggagctcctctccagcctcctctttccctcccctctggtctccattctcttcagctccctacatgggctggggaggagacacctggtgggcagagctcaggcagaggtttggatttcagctccctcacttccggggctgtgtggctttggcagatgtcagacttctggtcttgcttctccacgtggacagtgagtatctggctcattcttcactgggttcttctgagattgaacctacaggtgtttgccaagtgcctggcccagagcaagtggccactgcttctcccatctctctcctgcccaacctggtagagctgagggcatgagaggcagagtgcacagtggtcaagggtgcagctctgcagcacaggcagcctaggcctgcgtcccaacctgcctctcaccagctctgtgaccttgggcaagggatttatctgtctgtcccttagttttctcacctgtaaaaggaggataagtatatatatatatttcccagtgttgtgaagattaaaggagtttatcgatgtaggtcttaggatgagtcctggcatttaccaagggttggatatatgttattatcactattaagtgttgagggtccaggcatgctgggcaacagggaccccatctctacaaaaaagtttaaaaaattagccaggcgtggtggtgcacctgtcgtcttagctacttgggaggctgaggtgggaggatcacttgagcccagaagcttgaagctgcagtgagctaggatcgtgccactgcactccaacctgggtgagagagcgagaccctgtctcaagaaaaagaaaaatgcagagaaacaggagtcttggctactcctttagaggcagactcagaccctcctgcctcacagctttatctttgtatttgccccttactttatcttgtgccttgagaaattgctggggagagaggtatgtccactgggcagctgtacaggatggaggatatagggcgtttccactcccagcagccaggttccctcaccccaagctcacccactgttggggagattatctacaataacaccagaaacacattggggtggattgggggtatccttatgggttcttttcagggaaccattgctggacaaggcacaggagccacctccatttctgagctctgcaagggacaagaactagagccatcaggggctgggctcactgtggccccaccccaagccgtcagcctccagggatctacaccctgccttggctgctacagctttttcactccactgccctaggggagttcagcaacctaatgatctctatctctgaacatctcttcatcccatgctccaagtccagcaacctgcaccctggaaccaggagtggaccctacccgagctgtctgtattaatccccatcccccaccaccaatcttaaaaagccctctgtccccctaccctaaaccccagttaggtacccatgctgggcaggtcagttaacaatttatgcacaggtactagttttattgtattaccgttccagggtagctttgaaaaaagtatctcaaaaaggcaacaccaccgcgcccagccaaattaaattttttatagagatgaggtcatgctgttatgttgcccaggttggcctcatgagatcttgccttagcctcccaaagtgctgggattacagatgtgagacactgcacccaaaccccaccacttttttttttcctttttctttttttgagacagtcttactccgttgcccaggctggagtgtagtggcatgatctcagctcactgcaacctccgcctcccgggttcaagcaattctcctgcctcagcctcccgagtagctgggattacagaggcctgccaccacacccgactaattttcgtatttttagtagagacggggtttctccatgttggccaggctgttcttgaactcctgacctcaagtgctccacctgcgttggcttcccaaagtgctgggatacaggagtgagccactgcgcctggctgatcccagcacttttcaaatgatgccgctcaaagccgtgacttggcctactttgaacagcaaacttgttgctgctgttgtcaacctgaaggcctctcaaatgccagcttcaagcagggtgtgaattggccagtgtcagatctcaggagtcctgtgttgagagtgtggctttcagctgcggggagctgcacttggtggggaaagccaggcaggtcaccctcacagccagataatgtggaggtcagaacccaaggaagggagtgagacctccactcccagtgggggacctggccacccatccttggggacctgagaaagcgtacttcaccttggggtgaaggctgggtggggccagagggaccagtgccctcctcagtgcttaggggcagagccacctgcagcaatggtatctgcatattagcccctctccaccttctttctcccgctgaatcatttccctcaaagcccaagagctgtcactgcttctttctccctgggaagaatgcgtggactctgcctggtgatagactgaagccagaacagtgccacaccctcgccttaattccttgctaggtgttctcagatttatgagacttcttagtcaaatatgagggaggttggatgtggtggcttgtgcctgtaatcccagcattttgggaggccgaggtgggaggatcccttgaagccaggagtttgagacaagcctgggcaacaaagcaagaccctatctctaaaaaaaaaaaaaaaaaaaaatctaggagatgctctttaccctgcctggcctcaaactattaatagcttcctttgagcaacattatttattatgaactttcaaacacaaaaaagtagagagagtagaataacaaatccccatgagcccatcacccaacttcagtaattatcaattcatggccatcttgttcacccctgcctgcttccctgcttcccctcattctgcagaggttcttttcttttgagacagagtgttgctctgttgcccaggctggagtgcagtggtgcaacttcggctcactgcaacctccgcctcccaggttcaagtgattctcctgcttcagcctctcaagtagctgggattacagatgcccgccaccacacctggctaattttcgtatttttgttagagatggggtttcaccatgttggccaggctggtctcgaactcctgacctcaagtgatccgcccgccttggcctcccaaaatgctgggattacaggtgtgaaccacggtgcctggccactgtacaggttatttatagaagttggagagtgaagggttgagaaagccaaggggcagatgcgggtctggaggattttgtgcctaaggccctctctttgctcccagacagcatgaagtaacaatgaggcatccacctcttggttttgtggcctctgtggatgacgtctctcaccttgaaccagttcagagttggagtagcgcaggatcctgtcttcagaggaggggccgaagcgggttcctctgttgtcaagctctttggaggtgcctggctgctactactgtcccagagaggtgatgatgaatgatgggtgtgtccagtggcagtttgccccactgaggcaggggcttccactaggccctgacagagcccttccagcaggcagaaatccctgtgctaggcaagattcaaactccgtagcatgtctcctgctcccatctcttaggaatggagtccttcaggccttgagtcccacattttccatgatgctccattaagcagctgatagcacccccacctccagggaaagtgagttcagagtccttggtctaatgcatctgtgttgaaattgaggccttcccctgtgttcacctttctgctctttttcttttagcccaaggctatgaaggcctcattcggtgctgggcatggtcactcctagcattcctcactctgttgctaacagcaacagcaataataataagggttacaacttactccataccttactgtctgccaggcattaagctaagtgctttacatatattaagtcatttaatcctcataatgaccctatgaaagagataccatctcaacccaattgacagctggtttgcaagattaggagggatgaaggacccaggggacaatgcgagggaaaactctgaccccggggccccaggctggatgttctttatgcctgtgaaccacagcttatcacatgtctggagttagggaccccacttaaagtgagattttggctggaggtggtggatcatacctataatcccagcactttgggagaccaaggcagaaggactgcttgaggccaggagttcaaaaccagtgtaggtaacagctagaccctatctctacaaaaaatttaaaaattagctgggtgtggtggtatgtgcctcaagttccagctactcaggaggctgaggtgggaggatcacttgagcacaggagtttgaagttacagtgagctatgatggcaccactgcacttcagcctaggcaacagagggagaccctgtctttaaagtacatagaggtttttcacaccaacacatctctgcccagtgtgccaacatctgccacctgctataatagtactataacactcaatatgtaattaatgtagtctcagggatgttatgacaatatgattacaactatcacgtgtgtgcccagccaggctcaatgccccaggctgggcgaggtggggcaggggacacagcctaaaatgccaggcctcaggaagccatttggtttagcagacattgtttattaaaggagttacctatgccagatcgaaggcctaagatgattaagacactatgagtgccttcaagtggttggggacgttcatgattgtggtacagacaaataggctttcacatcattcttttatgtaatcatacaacagatatttgcacctacatgtgcagagcactgtgataggcctcagtgacacagaataatacggcaaagaccccacccgatgagccccctcccaccacccaccagtacagtagggggtggtttaatggagtgttcctggaatatgaagtgggggcaggcattaggggtggcaaagggacaagtgtttatctgatcagttatgtactgtttataataagtaaatcagcagagggggaataatacttagaacctatagagagtaaatctgacaagatgaaatgctgatgaaaatatggaggaaatgaaactctcatgggttttgcagggaatctaagtcagtgctgtgttgtgaatgtaggtgtaccctttgaattcatatgttgaatcctaacccccaaagcaatggcattaagaggtggggcctttggggctgggtatggtggctcatgactgtaatcccagcactttgggatgctggcagggggcagatcacttgaagccaggagtctgagatcagcctggccaacatggtgaaaccccatctgtactaaaaatacaaaaattagccaggtgtgatggcgtacatctgtaatttcagccactcgggaggctgagacaggagaatagcttgaacccagtaggtggagatttcagtgagccgagatcgtgccactgcactccagcctgggtgacagagcgagactccatctcaaaaaaataataaagatgtggggcctgtgggaggtggttaggtcatgagggtggagatcatgaatggggttagcaccttataaaacaggcttgagggagcccttctgtcccttctaccatgtgtggatgcagtgagaaggcaccgtatctctgaagcagagagcccgccctggacactggatctgctggcaccttgatcttggacttcccagcctctagaactgtgagaaataattttttgttgtttacaaattacccaggctaaggtgtttcattgtaacctgaatggaccaagctggtgtgaccctgttggaaaactggcagtatctaccaaaagccgaacatacgtataaactgatccagcagttccactcctgggtatgtacaccacagaaagctatgtccaccgagacattggcaagaatgtttctaaccacacgctgactgtagccccaaacctgaaacaacccaaatgtccatccaccaacccaaatgtccatccacagttgaagctacagtgaagtcacagggtcgaatactactgcacagcaacgaatatgaatgaaaatatcgctatgcacagcaacatggataaatttcacagacatgaggtcaagcaaaagaggtcagagtcctcatcatcaagagagaattcattgtatgattctcttcctacaaaaagtacagaaataagcaaaactgatccatggtgttagaagccaggggaacagttaacaggggagggatactggggaggggcatcctggagtgctggtctacctcatctgggtgttgatttcacgagtattgtcagtttgtttccagactccctgttggagatgtggaaataaaaaccacctaaacaagagcagagaggccatttggtcaaagtttgcaaaggagtcagccatgattgcttgtatttggcaggggtcaaaggcaggcagggactgtgaaatgttatagtggaaaaaaagggaaggctctgggtgtgggtttctggccagagtctattgtcatatgtggcctggccattgtccagttgtatgttcagtctcttggaaggaagggtattgactctgagaggggccaccatcgctggaatgggggacacacagtacttcctccagctgcctacacccccctagggtcagtggcgcctgcctgtgagggtgagcccaatggctagagggctctgctccaagtcattgcttactacacccacaaacattcttcgttctttaaggcctaacttaaagcccagatcctacaggaaaccttgattagacccctctctttattaagcttcctaagatcaaaccctgcttttgtgtaaatgctgacctccttgcctacattttaaaaacctagagctgggcatgatggccccagcctgtaatcccagtgattcaggagactgaggtgggaggattgctagaagccaggagttcgagaccagcctgggtaacatagctagaccacatctcttaaaataaaatagttaatttagccaggcatgatgatatatgcctgtagtcccaactacttggaaggctgaggtgtgaggatctttgagcccgggaggtcgaggctacagtaagctatgatctcaccactgtactccagcctgggtgacagagcgagacccagactcaaaaaataaaaataaaaaccctgaatatcttccttctgcaaaaaaaaaaaaaaaaaaaaaaaaaaaaaaaaaaaaaaatctaggagatgctctttaccctgcctggcctcaaactattaatagcttcctttgagcaacattatttattatgaactttcaaacacaaaaaagtagagatagaataacaaatccccatgactccatctacccatctggaccactat

SEQ ID NO: 437626 - DNA, 8877 bp, Homo sapiens
gcgggaagggtcctgggccccgggcggcggtcgccaggtctcagggccgggggtacccgagtctcgtttcctctcagtccatccacccttcatggggccagagccctctctccagaatctgagcagcaatgccgtttgctgaagacaagacctataagtatatctgccgcaatttcagcaatttttgcaatgtggatgttgtagagattctgccttacctgccctgcctcacagcaagagaccaggatcgactgcgggccacctgcacactctcagggaaccgggacaccctctggcatctcttcaatacccttcagcggcggcccggctgggtggagtacttcattgcggcactgaggggctgtgagctagttgatctcgcggacgaagtggcctctgtctaccagagctaccagcctcggacctcggaccgtcccccagacccactggagccaccgtcacttcctgctgagaggccagggccccccacacctgctgcggcccacagcatcccctacaacagctgcagagagaaggagccaagttaccccatgcctgtccaggagacccaggcgccagagtccccaggagagaattcagagcaagccctgcagacgctcagccccagagccatcccaaggaatccagatggtggccccctggagtcctcctctgacctggcagccctcagccctctgacctccagcgggcatcaggagcaggacacagaactgggcagtacccacacagcaggtgcgacctccagcctcacaccatcccgtgggcctgtgtctccatctgtctccttccagcccctggcccgttccacccccagggcaagccgcttgcctggacccacagggtcagttgtatctactggcacctccttctcctcctcatcccctggcttggcctctgcaggggctgcagagggtaaacagggtgcagagagtgaccaggccgagcctatcatctgctccagtggggcagaggcacctgccaactctctgccctccaaagtgcctaccaccttgatgcctgtgaacacagtggccctgaaagtgcctgccaacccagcatctgtcagcacagtgccctccaagttgccaactagctcaaagccccctggtgcagtgccttctaatgcgctcaccaatccagcaccatccaaattgcccatcaactcaacccgtgctggcatggtgccatccaaagtgcctactagcatggtgctcaccaaggtgtctgccagcacagtccccactgacgggagcagcagaaatgaggagaccccagcagctccaacacccgccggcgccactggaggcagctcagcctggctagacagcagctctgagaataggggccttgggtcggagctgagtaagcctggcgtgctggcatcccaggtagacagcccgttctcgggctgcttcgaggatcttgccatcagtgccagcacctccttgggcatggggccctgccatggcccagaggagaatgagtataagtccgagggcacctttgggatccacgtggctgagaaccccagcatccagctcctggagggcaaccctgggccacctgcggacccggatggcggccccaggccacaagccgaccggaagttccaggagagggaggtgccatgccacaggccctcacctggggctctgtggctccaggtggctgtgacaggggtgctggtagtcacactcctggtggtgctgtaccggcggcgtctgcactagtgaagccctgggctcttcccaccacccatctgttccgttcctgcagtatacctggcccctctccgaagccccttgtccctttcttggggattgtggaggctgggtcagaggggagttaagggactgcaggcctggcagcaggacatgccttggctgaaccaagtcctgagagcagcatctctgtccccacggtgccttgtgtgggtccccgtccttggctttctgggtcctgggctgcccccagtgctccagaccttccccactggcaatccaggttatcatccatgtcctccagaggagcttcctcctccaggcctcagccctgttggcccaggtggagcaggagggaccactggaacatgtggtgcttgggaatgcctctcctgttgcattggtccctgaaggcctcagggcaggtatgtggtgtgtgggcgactccacaagacctgcctcccatcctggcagcccagcctgagaccgttgcattgaggcaggcaggagcggcagggtggctgctctccaggagcccaactgccttgagttcctgccccactgggccccctcccctgctgggcaatcctgggaaggtctggaggttcctgtggacctcagggaagccaggggcagctgtcaggcctgaggaagacctgtggagctcctctccagcctcctctttccctcccctctggtctccattctcttcagctccctacatgggctggggaggagacacctggtgggcagagctcaggcagaggtttggatttcagctccctcacttccggggctgtgtggctttggcagatgtcagacttctggtcttgcttctccacgtggacagtgagtatctggctcattcttcactgggttcttctgagattgaacctacaggtgtttgccaagtgcctggcccagagcaagtggccactgcttctcccatctctctcctgcccaacctggtagagctgagggcatgagaggcagagtgcacagtggtcaagggtgcagctctgcagcacaggcagcctaggcctgcgtcccaacctgcctctcaccagctctgtgaccttgggcaagggatttatctgtctgtcccttagttttctcacctgtaaaaggaggataagtatatatatatatttcccagtgttgtgaagattaaaggagtttatcgatgtaggtcttaggatgagtcctggcatttaccaagggttggatatatgttattatcactattaagtgttgagggtccaggcatgctgggcaacagggaccccatctctacaaaaaagtttaaaaaattagccaggcgtggtggtgcacctgtcgtcttagctacttgggaggctgaggtgggaggatcacttgagcccagaagcttgaagctgcagtgagctaggatcgtgccactgcactccaacctgggtgagagagcgagaccctgtctcaagaaaaagaaaaatgcagagaaacaggagtcttggctactcctttagaggcagactcagaccctcctgcctcacagctttatctttgtatttgccccttactttatcttgtgccttgagaaattgctggggagagaggtatgtccactgggcagctgtacaggatggaggatatagggcgtttccactcccagcagccaggttccctcaccccaagctcacccactgttggggagattatctacaataacaccagaaacacattggggtggattgggggtatccttatgggttcttttcagggaaccattgctggacaaggcacaggagccacctccatttctgagctctgcaagggacaagaactagagccatcaggggctgggctcactgtggccccaccccaagccgtcagcctccagggatctacaccctgccttggctgctacagctttttcactccactgccctaggggagttcagcaacctaatgatctctatctctgaacatctcttcatcccatgctccaagtccagcaacctgcaccctggaaccaggagtggaccctacccgagctgtctgtattaatccccatcccccaccaccaatcttaaaaagccctctgtccccctaccctaaaccccagttaggtacccatgctgggcaggtcagttaacaatttatgcacaggtactagttttattgtattaccgttccagggtagctttgaaaaaagtatctcaaaaaggcaacaccaccgcgcccagccaaattaaattttttatagagatgaggtcatgctgttatgttgcccaggttggcctcatgagatcttgccttagcctcccaaagtgctgggattacagatgtgagacactgcacccaaaccccaccacttttttttttcctttttctttttttgagacagtcttactccgttgcccaggctggagtgtagtggcatgatctcagctcactgcaacctccgcctcccgggttcaagcaattctcctgcctcagcctcccgagtagctgggattacagaggcctgccaccacacccgactaattttcgtatttttagtagagacggggtttctccatgttggccaggctgttcttgaactcctgacctcaagtgctccacctgcgttggcttcccaaagtgctgggatacaggagtgagccactgcgcctggctgatcccagcacttttcaaatgatgccgctcaaagccgtgacttggcctactttgaacagcaaacttgttgctgctgttgtcaacctgaaggcctctcaaatgccagcttcaagcagggtgtgaattggccagtgtcagatctcaggagtcctgtgttgagagtgtggctttcagctgcggggagctgcacttggtggggaaagccaggcaggtcaccctcacagccagataatgtggaggtcagaacccaaggaagggagtgagacctccactcccagtgggggacctggccacccatccttggggacctgagaaagcgtacttcaccttggggtgaaggctgggtggggccagagggaccagtgccctcctcagtgcttaggggcagagccacctgcagcaatggtatctgcatattagcccctctccaccttctttctcccgctgaatcatttccctcaaagcccaagagctgtcactgcttctttctccctgggaagaatgcgtggactctgcctggtgatagactgaagccagaacagtgccacaccctcgccttaattccttgctaggtgttctcagatttatgagacttcttagtcaaatatgagggaggttggatgtggtggcttgtgcctgtaatcccagcattttgggaggccgaggtgggaggatcccttgaagccaggagtttgagacaagcctgggcaacaaagcaagaccctatctctaaaaaaaaaaaaaaaaaaaaatctaggagatgctctttaccctgcctggcctcaaactattaatagcttcctttgagcaacattatttattatgaactttcaaacacaaaaaagtagagagagtagaataacaaatccccatgagcccatcacccaacttcagtaattatcaattcatggccatcttgttcacccctgcctgcttccctgcttcccctcattctgcagaggttcttttcttttgagacagagtgttgctctgttgcccaggctggagtgcagtggtgcaacttcggctcactgcaacctccgcctcccaggttcaagtgattctcctgcttcagcctctcaagtagctgggattacagatgcccgccaccacacctggctaattttcgtatttttgttagagatggggtttcaccatgttggccaggctggtctcgaactcctgacctcaagtgatccgcccgccttggcctcccaaaatgctgggattacaggtgtgaaccacggtgcctggccactgtacaggttatttatagaagttggagagtgaagggttgagaaagccaaggggcagatgcgggtctggaggattttgtgcctaaggccctctctttgctcccagacagcatgaagtaacaatgaggcatccacctcttggttttgtggcctctgtggatgacgtctctcaccttgaaccagttcagagttggagtagcgcaggatcctgtcttcagaggaggggccgaagcgggttcctctgttgtcaagctctttggaggtgcctggctgctactactgtcccagagaggtgatgatgaatgatgggtgtgtccagtggcagtttgccccactgaggcaggggcttccactaggccctgacagagcccttccagcaggcagaaatccctgtgctaggcaagattcaaactccgtagcatgtctcctgctcccatctcttaggaatggagtccttcaggccttgagtcccacattttccatgatgctccattaagcagctgatagcacccccacctccagggaaagtgagttcagagtccttggtctaatgcatctgtgttgaaattgaggccttcccctgtgttcacctttctgctctttttcttttagcccaaggctatgaaggcctcattcggtgctgggcatggtcactcctagcattcctcactctgttgctaacagcaacagcaataataataagggttacaacttactccataccttactgtctgccaggcattaagctaagtgctttacatatattaagtcatttaatcctcataatgaccctatgaaagagataccatctcaacccaattgacagctggtttgcaagattaggagggatgaaggacccaggggacaatgcgagggaaaactctgaccccggggccccaggctggatgttctttatgcctgtgaaccacagcttatcacatgtctggagttagggaccccacttaaagtgagattttggctggaggtggtggatcatacctataatcccagcactttgggagaccaaggcagaaggactgcttgaggccaggagttcaaaaccagtgtaggtaacagctagaccctatctctacaaaaaatttaaaaattagctgggtgtggtggtatgtgcctcaagttccagctactcaggaggctgaggtgggaggatcacttgagcacaggagtttgaagttacagtgagctatgatggcaccactgcacttcagcctaggcaacagagggagaccctgtctttaaagtacatagaggtttttcacaccaacacatctctgcccagtgtgccaacatctgccacctgctataatagtactataacactcaatatgtaattaatgtagtctcagggatgttatgacaatatgattacaactatcacgtgtgtgcccagccaggctcaatgccccaggctgggcgaggtggggcaggggacacagcctaaaatgccaggcctcaggaagccatttggtttagcagacattgtttattaaaggagttacctatgccagatcgaaggcctaagatgattaagacactatgagtgccttcaagtggttggggacgttcatgattgtggtacagacaaataggctttcacatcattcttttatgtaatcatacaacagatatttgcacctacatgtgcagagcactgtgataggcctcagtgacacagaataatacggcaaagaccccacccgatgagccccctcccaccacccaccagtacagtagggggtggtttaatggagtgttcctggaatatgaagtgggggcaggcattaggggtggcaaagggacaagtgtttatctgatcagttatgtactgtttataataagtaaatcagcagagggggaataatacttagaacctatagagagtaaatctgacaagatgaaatgctgatgaaaatatggaggaaatgaaactctcatgggttttgcagggaatctaagtcagtgctgtgttgtgaatgtaggtgtaccctttgaattcatatgttgaatcctaacccccaaagcaatggcattaagaggtggggcctttggggctgggtatggtggctcatgactgtaatcccagcactttgggatgctggcagggggcagatcacttgaagccaggagtctgagatcagcctggccaacatggtgaaaccccatctgtactaaaaatacaaaaattagccaggtgtgatggcgtacatctgtaatttcagccactcgggaggctgagacaggagaatagcttgaacccagtaggtggagatttcagtgagccgagatcgtgccactgcactccagcctgggtgacagagcgagactccatctcaaaaaaataataaagatgtggggcctgtgggaggtggttaggtcatgagggtggagatcatgaatggggttagcaccttataaaacaggcttgagggagcccttctgtcccttctaccatgtgtggatgcagtgagaaggcaccgtatctctgaagcagagagcccgccctggacactggatctgctggcaccttgatcttggacttcccagcctctagaactgtgagaaataattttttgttgtttacaaattacccaggctaaggtgtttcattgtaacctgaatggaccaagctggtgtgaccctgttggaaaactggcagtatctaccaaaagccgaacatacgtataaactgatccagcagttccactcctgggtatgtacaccacagaaagctatgtccaccgagacattggcaagaatgtttctaaccacacgctgactgtagccccaaacctgaaacaacccaaatgtccatccaccaacccaaatgtccatccacagttgaagctacagtgaagtcacagggtcgaatactactgcacagcaacgaatatgaatgaaaatatcgctatgcacagcaacatggataaatttcacagacatgaggtcaagcaaaagaggtcagagtcctcatcatcaagagagaattcattgtatgattctcttcctacaaaaagtacagaaataagcaaaactgatccatggtgttagaagccaggggaacagttaacaggggagggatactggggaggggcatcctggagtgctggtctacctcatctgggtgttgatttcacgagtattgtcagtttgtttccagactccctgttggagatgtggaaataaaaaccacctaaacaaga

SEQ ID NO: 437627 - DNA, 9560 bp, Homo sapiens
gcgggaagggtcctgggccccgggcggcggtcgccaggtctcagggccgggggtacccgagtctcgtttcctctcagtccatccacccttcatggggccagagccctctctccagaatctgagcagcaatgccgtttgctgaagacaagacctataagtatatctgccgcaatttcagcaatttttgcaatgtggatgttgtagagattctgccttacctgccctgcctcacagcaagagaccaggatcgactgcgggccacctgcacactctcagggaaccgggacaccctctggcatctcttcaatacccttcagcggcggcccggctgggtggagtacttcattgcggcactgaggggctgtgagctagttgatctcgcggacgaagtggcctctgtctaccagagctaccagcctcggacctcggaccgtcccccagacccactggagccaccgtcacttcctgctgagaggccagggccccccacacctgctgcggcccacagcatcccctacaacagctgcagagagaaggagccaagttaccccatgcctgtccaggagacccaggcgccagagtccccaggagagaattcagagcaagccctgcagacgctcagccccagagccatcccaaggaatccagatggtggccccctggagtcctcctctgacctggcagccctcagccctctgacctccagcgggcatcaggagcaggacacagaactgggcagtacccacacagcaggtgcgacctccagcctcacaccatcccgtgggcctgtgtctccatctgtctccttccagcccctggcccgttccacccccagggcaagccgcttgcctggacccacagggtcagttgtatctactggcacctccttctcctcctcatcccctggcttggcctctgcaggggctgcagagggtaaacagggtgcagagagtgaccaggccgagcctatcatctgctccagtggggcagaggcacctgccaactctctgccctccaaagtgcctaccaccttgatgcctgtgaacacagtggccctgaaagtgcctgccaacccagcatctgtcagcacagtgccctccaagttgccaactagctcaaagccccctggtgcagtgccttctaatgcgctcaccaatccagcaccatccaaattgcccatcaactcaacccgtgctggcatggtgccatccaaagtgcctactagcatggtgctcaccaaggtgtctgccagcacagtccccactgacgggagcagcagaaatgaggagaccccagcagctccaacacccgccggcgccactggaggcagctcagcctggctagacagcagctctgagaataggggccttgggtcggagctgagtaagcctggcgtgctggcatcccaggtagacagcccgttctcgggctgcttcgaggatcttgccatcagtgccagcacctccttgggcatggggccctgccatggcccagaggagaatgagtataagtccgagggcacctttgggatccacgtggctgagaaccccagcatccagctcctggagggcaaccctgggccacctgcggacccggatggcggccccaggccacaagccgaccggaagttccaggagagggaggtgccatgccacaggccctcacctggggctctgtggctccaggtggctgtgacaggggtgctggtagtcacactcctggtggtgctgtaccggcggcgtctgcactagtgaagccctgggctcttcccaccacccatctgttccgttcctgcagtatacctggcccctctccgaagccccttgtccctttcttggggattgtggaggctgggtcagaggggagttaagggactgcaggcctggcagcaggacatgccttggctgaaccaagtcctgagagcagcatctctgtccccacggtgccttgtgtgggtccccgtccttggctttctgggtcctgggctgcccccagtgctccagaccttccccactggcaatccaggttatcatccatgtcctccagaggagcttcctcctccaggcctcagccctgttggcccaggtggagcaggagggaccactggaacatgtggtgcttgggaatgcctctcctgttgcattggtccctgaaggcctcagggcaggtatgtggtgtgtgggcgactccacaagacctgcctcccatcctggcagcccagcctgagaccgttgcattgaggcaggcaggagcggcagggtggctgctctccaggagcccaactgccttgagttcctgccccactgggccccctcccctgctgggcaatcctgggaaggtctggaggttcctgtggacctcagggaagccaggggcagctgtcaggcctgaggaagacctgtggagctcctctccagcctcctctttccctcccctctggtctccattctcttcagctccctacatgggctggggaggagacacctggtgggcagagctcaggcagaggtttggatttcagctccctcacttccggggctgtgtggctttggcagatgtcagacttctggtcttgcttctccacgtggacagtgagtatctggctcattcttcactgggttcttctgagattgaacctacaggtgtttgccaagtgcctggcccagagcaagtggccactgcttctcccatctctctcctgcccaacctggtagagctgagggcatgagaggcagagtgcacagtggtcaagggtgcagctctgcagcacaggcagcctaggcctgcgtcccaacctgcctctcaccagctctgtgaccttgggcaagggatttatctgtctgtcccttagttttctcacctgtaaaaggaggataagtatatatatatatttcccagtgttgtgaagattaaaggagtttatcgatgtaggtcttaggatgagtcctggcatttaccaagggttggatatatgttattatcactattaagtgttgagggtccaggcatgctgggcaacagggaccccatctctacaaaaaagtttaaaaaattagccaggcgtggtggtgcacctgtcgtcttagctacttgggaggctgaggtgggaggatcacttgagcccagaagcttgaagctgcagtgagctaggatcgtgccactgcactccaacctgggtgagagagcgagaccctgtctcaagaaaaagaaaaatgcagagaaacaggagtcttggctactcctttagaggcagactcagaccctcctgcctcacagctttatctttgtatttgccccttactttatcttgtgccttgagaaattgctggggagagaggtatgtccactgggcagctgtacaggatggaggatatagggcgtttccactcccagcagccaggttccctcaccccaagctcacccactgttggggagattatctacaataacaccagaaacacattggggtggattgggggtatccttatgggttcttttcagggaaccattgctggacaaggcacaggagccacctccatttctgagctctgcaagggacaagaactagagccatcaggggctgggctcactgtggccccaccccaagccgtcagcctccagggatctacaccctgccttggctgctacagctttttcactccactgccctaggggagttcagcaacctaatgatctctatctctgaacatctcttcatcccatgctccaagtccagcaacctgcaccctggaaccaggagtggaccctacccgagctgtctgtattaatccccatcccccaccaccaatcttaaaaagccctctgtccccctaccctaaaccccagttaggtacccatgctgggcaggtcagttaacaatttatgcacaggtactagttttattgtattaccgttccagggtagctttgaaaaaagtatctcaaaaaggcaacaccaccgcgcccagccaaattaaattttttatagagatgaggtcatgctgttatgttgcccaggttggcctcatgagatcttgccttagcctcccaaagtgctgggattacagatgtgagacactgcacccaaaccccaccacttttttttttcctttttctttttttgagacagtcttactccgttgcccaggctggagtgtagtggcatgatctcagctcactgcaacctccgcctcccgggttcaagcaattctcctgcctcagcctcccgagtagctgggattacagaggcctgccaccacacccgactaattttcgtatttttagtagagacggggtttctccatgttggccaggctgttcttgaactcctgacctcaagtgctccacctgcgttggcttcccaaagtgctgggatacaggagtgagccactgcgcctggctgatcccagcacttttcaaatgatgccgctcaaagccgtgacttggcctactttgaacagcaaacttgttgctgctgttgtcaacctgaaggcctctcaaatgccagcttcaagcagggtgtgaattggccagtgtcagatctcaggagtcctgtgttgagagtgtggctttcagctgcggggagctgcacttggtggggaaagccaggcaggtcaccctcacagccagataatgtggaggtcagaacccaaggaagggagtgagacctccactcccagtgggggacctggccacccatccttggggacctgagaaagcgtacttcaccttggggtgaaggctgggtggggccagagggaccagtgccctcctcagtgcttaggggcagagccacctgcagcaatggtatctgcatattagcccctctccaccttctttctcccgctgaatcatttccctcaaagcccaagagctgtcactgcttctttctccctgggaagaatgcgtggactctgcctggtgatagactgaagccagaacagtgccacaccctcgccttaattccttgctaggtgttctcagatttatgagacttcttagtcaaatatgagggaggttggatgtggtggcttgtgcctgtaatcccagcattttgggaggccgaggtgggaggatcccttgaagccaggagtttgagacaagcctgggcaacaaagcaagaccctatctctaaaaaaaaaaaaaaaaaaaaatctaggagatgctctttaccctgcctggcctcaaactattaatagcttcctttgagcaacattatttattatgaactttcaaacacaaaaaagtagagagagtagaataacaaatccccatgagcccatcacccaacttcagtaattatcaattcatggccatcttgttcacccctgcctgcttccctgcttcccctcattctgcagaggttcttttcttttgagacagagtgttgctctgttgcccaggctggagtgcagtggtgcaacttcggctcactgcaacctccgcctcccaggttcaagtgattctcctgcttcagcctctcaagtagctgggattacagatgcccgccaccacacctggctaattttcgtatttttgttagagatggggtttcaccatgttggccaggctggtctcgaactcctgacctcaagtgatccgcccgccttggcctcccaaaatgctgggattacaggtgtgaaccacggtgcctggccactgtacaggttatttatagaagttggagagtgaagggttgagaaagccaaggggcagatgcgggtctggaggattttgtgcctaaggccctctctttgctcccagacagcatgaagtaacaatgaggcatccacctcttggttttgtggcctctgtggatgacgtctctcaccttgaaccagttcagagttggagtagcgcaggatcctgtcttcagaggaggggccgaagcgggttcctctgttgtcaagctctttggaggtgcctggctgctactactgtcccagagaggtgatgatgaatgatgggtgtgtccagtggcagtttgccccactgaggcaggggcttccactaggccctgacagagcccttccagcaggcagaaatccctgtgctaggcaagattcaaactccgtagcatgtctcctgctcccatctcttaggaatggagtccttcaggccttgagtcccacattttccatgatgctccattaagcagctgatagcacccccacctccagggaaagtgagttcagagtccttggtctaatgcatctgtgttgaaattgaggccttcccctgtgttcacctttctgctctttttcttttagcccaaggctatgaaggcctcattcggtgctgggcatggtcactcctagcattcctcactctgttgctaacagcaacagcaataataataagggttacaacttactccataccttactgtctgccaggcattaagctaagtgctttacatatattaagtcatttaatcctcataatgaccctatgaaagagataccatctcaacccaattgacagctggtttgcaagattaggagggatgaaggacccaggggacaatgcgagggaaaactctgaccccggggccccaggctggatgttctttatgcctgtgaaccacagcttatcacatgtctggagttagggaccccacttaaagtgagattttggctggaggtggtggatcatacctataatcccagcactttgggagaccaaggcagaaggactgcttgaggccaggagttcaaaaccagtgtaggtaacagctagaccctatctctacaaaaaatttaaaaattagctgggtgtggtggtatgtgcctcaagttccagctactcaggaggctgaggtgggaggatcacttgagcacaggagtttgaagttacagtgagctatgatggcaccactgcacttcagcctaggcaacagagggagaccctgtctttaaagtacatagaggtttttcacaccaacacatctctgcccagtgtgccaacatctgccacctgctataatagtactataacactcaatatgtaattaatgtagtctcagggatgttatgacaatatgattacaactatcacgtgtgtgcccagccaggctcaatgccccaggctgggcgaggtggggcaggggacacagcctaaaatgccaggcctcaggaagccatttggtttagcagacattgtttattaaaggagttacctatgccagatcgaaggcctaagatgattaagacactatgagtgccttcaagtggttggggacgttcatgattgtggtacagacaaataggctttcacatcattcttttatgtaatcatacaacagatatttgcacctacatgtgcagagcactgtgataggcctcagtgacacagaataatacggcaaagaccccacccgatgagccccctcccaccacccaccagtacagtagggggtggtttaatggagtgttctgacagagcgagactccatctcaaaaaaataataaagatgtggggcctgtgggaggtggttaggtcatgagggtggagatcatgaatggggttagcaccttataaaacaggcttgagggagcccttctgtcccttctaccatgtgtggatgcagtgagaaggcaccgtatctctgaagcagagagcccgccctggacactggatctgctggcaccttgatcttggacttcccagcctctagaactgtgagaaataattttttgttgtttacaaattacccaggctaaggtgtttcattgtaacctgaatggaccaagctggtgtgaccctgttggaaaactggcagtatctaccaaaagccgaacatacgtataaactgatccagcagttccactcctgggtatgtacaccacagaaagctatgtccaccgagacattggcaagaatgtttctaaccacacgctgactgtagccccaaacctgaaacaacccaaatgtccatccaccaacccaaatgtccatccacagttgaagctacagtgaagtcacagggtcgaatactactgcacagcaacgaatatgaatgaaaatatcgctatgcacagcaacatggataaatttcacagacatgaggtcaagcaaaagaggtcagagtcctcatcatcaagagagaattcattgtatgattctcttcctacaaaaagtacagaaataagcaaaactgatccatggtgttagaagccaggggaacagttaacaggggagggatactggggaggggcatcctggagtgctggtctacctcatctgggtgttgatttcacgagtattgtcagtttgtttccagactccctgttggagatgtggaaataaaaaccacctaaacaagagcagagaggccatttggtcaaagtttgcaaaggagtcagccatgattgcttgtatttggcaggggtcaaaggcaggcagggactgtgaaatgttatagtggaaaaaaagggaaggctctgggtgtgctgtgattggagattgttggcatggggacagagcggactaactggaggggcatctttggttggttgggggggtatatttggctttctctggttggtctggagttggaagagggggtgtggtggctggggattgggaagaagctggcagccactaagttcagactgttctgggtccgattgctgctgaggctgtggtttggcttccttggcttcccaggctggttatgggtttctggccagagtctattgtcatatgtggcctggccattgtccagttgtatgttcagtctcttggaaggaagggtattgactctgagaggggccaccatcgctggaatgggggacacacagtacttcctccagctgcctacacccccctagggtcagtggcgcctgcctgtgagggtgagcccaatggctagagggctctgctccaagtcattgcttactacacccacaaacattcttcgttctttaaggcctaacttaaagcccagatcctacaggaaaccttgattagacccctctctttattaagcttcctaagatcaaaccctgcttttgtgtaaatgctgacctccttgcctacattttaaaaacctagagctgggcatgatggccccagcctgtaatcccagtgattcaggagactgaggtgggaggattgctagaagccaggagttcgagaccagcctgggtaacatagctagaccacatctcttaaaataaaatagttaatttagccaggcatgatgatatatgcctgtagtcccaactacttggaaggctgaggtgtgaggatctttgagcccgggaggtcgaggctacagtaagctatgatctcaccactgtactccagcctgggtgacagagcgagacccagactcaaaaaataaaaataaaaaccctgaatatcttccttctgcaaaaaaaaaaaaaaaaaaaaaaaaaaaaaaaaaaaaaaatctaggagatgctctttaccctgcctggcctcaaactattaatagcttcctttgagcaacattatttattatgaactttcaaacacaaaaaagtagagatagaataacaaatccccatgactccatctacccatctggaccactat

SEQ ID NO: 437628 - DNA, 10978 bp, Homo sapiens
gcggccgccggggtcggcagcctggggctccgctgatctagggcaacgagcgggggacgcttcgagcccgcagcgagagtgaccagcatggtccctgccggcagctcggggccggagggttttgactgcaaggccagcccacgccgagggtccaagcatcgggatatgccgccagcacctggctgctgcagcaccgcgctggacatgagcgctccgcccaacccgacggcgtcagctggcgcgcgcgcccgcgaccgacgtgcgcaggcgcccacgggccgcgcagccgccattgctctcctgccacggaggggagcgcttggtggcagtccgcgggcccggacggaaggctgaggcgacgcctcgacgacagcggaccggagctgcaggggcaacacattcagggcggggtgccccatttaggcctggctgaccggagtaagaaactacaacccccgaagtgccttgcgcctcaaggttacggaggcagtgacgtaagctgtcttgaccgctaccatttctctagtagaggcgggacgcggcggcgcggagtgatgacgcgctctgctggcggctggagggttgcggagcacccaccctggagccatggtccacgccttcctcattcacaccttgagggccccgaatactgaggacacgggcctttgccgagtgctgtactcctgcgtcttcggtgctgagaagtcacctgatgacccacggccgcatggtgccgagagggacaggcttctccggaaggaacagattttagctgtggccagcggcaggtgacgagccacacagtgtcctgaggcctgatgaaagggctatgccaaccacagtcccagaggaggagctggctgtagcagcgactgacccaggagctgaagtgagccaagccccctcctcctgagacccctgagagtctcgtttcctctcagtccatccacccttcatggggccagagccctctctccagaatctgagcagcaatgccgtttgctgaagacaagacctataagtatatctgccgcaatttcagcaatttttgcaatgtggatgttgtagagattctgccttacctgccctgcctcacagcaagagaccaggatcgactgcgggccacctgcacactctcagggaaccgggacaccctctggcatctcttcaatacccttcagcggcggcccggctgggtggagtacttcattgcggcactgaggggctgtgagctagttgatctcgcggacgaagtggcctctgtctaccagagctaccagcctcggacctcggaccgtcccccagacccactggagccaccgtcacttcctgctgagaggccagggccccccacacctgctgcggcccacagcatcccctacaacagctgcagagagaaggagccaagttaccccatgcctgtccaggagacccaggcgccagagtccccaggagagaattcagagcaagccctgcagacgctcagccccagagccatcccaaggaatccagatggtggccccctggagtcctcctctgacctggcagccctcagccctctgacctccagcgggcatcaggagcaggacacagaactgggcagtacccacacagcaggtgcgacctccagcctcacaccatcccgtgggcctgtgtctccatctgtctccttccagcccctggcccgttccacccccagggcaagccgcttgcctggacccacagggtcagttgtatctactggcacctccttctcctcctcatcccctggcttggcctctgcaggggctgcagagggtaaacagggtgcagagagtgaccaggccgagcctatcatctgctccagtggggcagaggcacctgccaactctctgccctccaaagtgcctaccaccttgatgcctgtgaacacagtggccctgaaagtgcctgccaacccagcatctgtcagcacagtgccctccaagttgccaactagctcaaagccccctggtgcagtgccttctaatgcgctcaccaatccagcaccatccaaattgcccatcaactcaacccgtgctggcatggtgccatccaaagtgcctactagcatggtgctcaccaaggtgtctgccagcacagtccccactgacgggagcagcagaaatgaggagaccccagcagctccaacacccgccggcgccactggaggcagctcagcctggctagacagcagctctgagaataggggccttgggtcggagctgagtaagcctggcgtgctggcatcccaggtagacagcccgttctcgggctgcttcgaggatcttgccatcagtgccagcacctccttgggcatggggccctgccatggcccagaggagaatgagtataagtccgagggcacctttgggatccacgtggctgagaaccccagcatccagctcctggagggcaaccctgggccacctgcggacccggatggcggccccaggccacaagccgaccggaagttccaggagagggaggtgccatgccacaggccctcacctggggctctgtggctccaggtggctgtgacaggggtgctggtagtcacactcctggtggtgctgtaccggcggcgtctgcactagtgaagccctgggctcttcccaccacccatctgttccgttcctgcagtatacctggcccctctccgaagccccttgtccctttcttggggattgtggaggctgggtcagaggggagttaagggactgcaggcctggcagcaggacatgccttggctgaaccaagtcctgagagcagcatctctgtccccacggtgccttgtgtgggtccccgtccttggctttctgggtcctgggctgcccccagtgctccagaccttccccactggcaatccaggttatcatccatgtcctccagaggagcttcctcctccaggcctcagccctgttggcccaggtggagcaggagggaccactggaacatgtggtgcttgggaatgcctctcctgttgcattggtccctgaaggcctcagggcaggtatgtggtgtgtgggcgactccacaagacctgcctcccatcctggcagcccagcctgagaccgttgcattgaggcaggcaggagcggcagggtggctgctctccaggagcccaactgccttgagttcctgccccactgggccccctcccctgctgggcaatcctgggaaggtctggaggttcctgtggacctcagggaagccaggggcagctgtcaggcctgaggaagacctgtggagctcctctccagcctcctctttccctcccctctggtctccattctcttcagctccctacatgggctggggaggagacacctggtgggcagagctcaggcagaggtttggatttcagctccctcacttccggggctgtgtggctttggcagatgtcagacttctggtcttgcttctccacgtggacagtgagtatctggctcattcttcactgggttcttctgagattgaacctacaggtgtttgccaagtgcctggcccagagcaagtggccactgcttctcccatctctctcctgcccaacctggtagagctgagggcatgagaggcagagtgcacagtggtcaagggtgcagctctgcagcacaggcagcctaggcctgcgtcccaacctgcctctcaccagctctgtgaccttgggcaagggatttatctgtctgtcccttagttttctcacctgtaaaaggaggataagtatatatatatatttcccagtgttgtgaagattaaaggagtttatcgatgtaggtcttaggatgagtcctggcatttaccaagggttggatatatgttattatcactattaagtgttgagggtccaggcatgctgggcaacagggaccccatctctacaaaaaagtttaaaaaattagccaggcgtggtggtgcacctgtcgtcttagctacttgggaggctgaggtgggaggatcacttgagcccagaagcttgaagctgcagtgagctaggatcgtgccactgcactccaacctgggtgagagagcgagaccctgtctcaagaaaaagaaaaatgcagagaaacaggagtcttggctactcctttagaggcagactcagaccctcctgcctcacagctttatctttgtatttgccccttactttatcttgtgccttgagaaattgctggggagagaggtatgtccactgggcagctgtacaggatggaggatatagggcgtttccactcccagcagccaggttccctcaccccaagctcacccactgttggggagattatctacaataacaccagaaacacattggggtggattgggggtatccttatgggttcttttcagggaaccattgctggacaaggcacaggagccacctccatttctgagctctgcaagggacaagaactagagccatcaggggctgggctcactgtggccccaccccaagccgtcagcctccagggatctacaccctgccttggctgctacagctttttcactccactgccctaggggagttcagcaacctaatgatctctatctctgaacatctcttcatcccatgctccaagtccagcaacctgcaccctggaaccaggagtggaccctacccgagctgtctgtattaatccccatcccccaccaccaatcttaaaaagccctctgtccccctaccctaaaccccagttaggtacccatgctgggcaggtcagttaacaatttatgcacaggtactagttttattgtattaccgttccagggtagctttgaaaaaagtatctcaaaaaggcaacaccaccgcgcccagccaaattaaattttttatagagatgaggtcatgctgttatgttgcccaggttggcctcatgagatcttgccttagcctcccaaagtgctgggattacagatgtgagacactgcacccaaaccccaccacttttttttttcctttttctttttttgagacagtcttactccgttgcccaggctggagtgtagtggcatgatctcagctcactgcaacctccgcctcccgggttcaagcaattctcctgcctcagcctcccgagtagctgggattacagaggcctgccaccacacccgactaattttcgtatttttagtagagacggggtttctccatgttggccaggctgttcttgaactcctgacctcaagtgctccacctgcgttggcttcccaaagtgctgggatacaggagtgagccactgcgcctggctgatcccagcacttttcaaatgatgccgctcaaagccgtgacttggcctactttgaacagcaaacttgttgctgctgttgtcaacctgaaggcctctcaaatgccagcttcaagcagggtgtgaattggccagtgtcagatctcaggagtcctgtgttgagagtgtggctttcagctgcggggagctgcacttggtggggaaagccaggcaggtcaccctcacagccagataatgtggaggtcagaacccaaggaagggagtgagacctccactcccagtgggggacctggccacccatccttggggacctgagaaagcgtacttcaccttggggtgaaggctgggtggggccagagggaccagtgccctcctcagtgcttaggggcagagccacctgcagcaatggtatctgcatattagcccctctccaccttctttctcccgctgaatcatttccctcaaagcccaagagctgtcactgcttctttctccctgggaagaatgcgtggactctgcctggtgatagactgaagccagaacagtgccacaccctcgccttaattccttgctaggtgttctcagatttatgagacttcttagtcaaatatgagggaggttggatgtggtggcttgtgcctgtaatcccagcattttgggaggccgaggtgggaggatcccttgaagccaggagtttgagacaagcctgggcaacaaagcaagaccctatctctaaaaaaaaaaaaaaaaaaaaatctaggagatgctctttaccctgcctggcctcaaactattaatagcttcctttgagcaacattatttattatgaactttcaaacacaaaaaagtagagagagtagaataacaaatccccatgagcccatcacccaacttcagtaattatcaattcatggccatcttgttcacccctgcctgcttccctgcttcccctcattctgcagaggttcttttcttttgagacagagtgttgctctgttgcccaggctggagtgcagtggtgcaacttcggctcactgcaacctccgcctcccaggttcaagtgattctcctgcttcagcctctcaagtagctgggattacagatgcccgccaccacacctggctaattttcgtatttttgttagagatggggtttcaccatgttggccaggctggtctcgaactcctgacctcaagtgatccgcccgccttggcctcccaaaatgctgggattacaggtgtgaaccacggtgcctggccactgtacaggttatttatagaagttggagagtgaagggttgagaaagccaaggggcagatgcgggtctggaggattttgtgcctaaggccctctctttgctcccagacagcatgaagtaacaatgaggcatccacctcttggttttgtggcctctgtggatgacgtctctcaccttgaaccagttcagagttggagtagcgcaggatcctgtcttcagaggaggggccgaagcgggttcctctgttgtcaagctctttggaggtgcctggctgctactactgtcccagagaggtgatgatgaatgatgggtgtgtccagtggcagtttgccccactgaggcaggggcttccactaggccctgacagagcccttccagcaggcagaaatccctgtgctaggcaagattcaaactccgtagcatgtctcctgctcccatctcttaggaatggagtccttcaggccttgagtcccacattttccatgatgctccattaagcagctgatagcacccccacctccagggaaagtgagttcagagtccttggtctaatgcatctgtgttgaaattgaggccttcccctgtgttcacctttctgctctttttcttttagcccaaggctatgaaggcctcattcggtgctgggcatggtcactcctagcattcctcactctgttgctaacagcaacagcaataataataagggttacaacttactccataccttactgtctgccaggcattaagctaagtgctttacatatattaagtcatttaatcctcataatgaccctatgaaagagataccatctcaacccaattgacagctggtttgcaagattaggagggatgaaggacccaggggacaatgcgagggaaaactctgaccccggggccccaggctggatgttctttatgcctgtgaaccacagcttatcacatgtctggagttagggaccccacttaaagtgagattttggctggaggtggtggatcatacctataatcccagcactttgggagaccaaggcagaaggactgcttgaggccaggagttcaaaaccagtgtaggtaacagctagaccctatctctacaaaaaatttaaaaattagctgggtgtggtggtatgtgcctcaagttccagctactcaggaggctgaggtgggaggatcacttgagcacaggagtttgaagttacagtgagctatgatggcaccactgcacttcagcctaggcaacagagggagaccctgtctttaaagtacatagaggtttttcacaccaacacatctctgcccagtgtgccaacatctgccacctgctataatagtactataacactcaatatgtaattaatgtagtctcagggatgttatgacaatatgattacaactatcacgtgtgtgcccagccaggctcaatgccccaggctgggcgaggtggggcaggggacacagcctaaaatgccaggcctcaggaagccatttggtttagcagacattgtttattaaaggagttacctatgccagatcgaaggcctaagatgattaagacactatgagtgccttcaagtggttggggacgttcatgattgtggtacagacaaataggctttcacatcattcttttatgtaatcatacaacagatatttgcacctacatgtgcagagcactgtgataggcctcagtgacacagaataatacggcaaagaccccacccgatgagccccctcccaccacccaccagtacagtagggggtggtttaatggagtgttcctggaatatgaagtgggggcaggcattaggggtggcaaagggacaagtgtttatctgatcagttatgtactgtttataataagtaaatcagcagagggggaataatacttagaacctatagagagtaaatctgacaagatgaaatgctgatgaaaatatggaggaaatgaaactctcatgggttttgcagggaatctaagtcagtgctgtgttgtgaatgtaggtgtaccctttgaattcatatgttgaatcctaacccccaaagcaatggcattaagaggtggggcctttggggctgggtatggtggctcatgactgtaatcccagcactttgggatgctggcagggggcagatcacttgaagccaggagtctgagatcagcctggccaacatggtgaaaccccatctgtactaaaaatacaaaaattagccaggtgtgatggcgtacatctgtaatttcagccactcgggaggctgagacaggagaatagcttgaacccagtaggtggagatttcagtgagccgagatcgtgccactgcactccagcctgggtgacagagcgagactccatctcaaaaaaataataaagatgtggggcctgtgggaggtggttaggtcatgagggtggagatcatgaatggggttagcaccttataaaacaggcttgagggagcccttctgtcccttctaccatgtgtggatgcagtgagaaggcaccgtatctctgaagcagagagcccgccctggacactggatctgctggcaccttgatcttggacttcccagcctctagaactgtgagaaataattttttgttgtttacaaattacccaggctaaggtgtttcattgtaacctgaatggaccaagctggtgtgaccctgttggaaaactggcagtatctaccaaaagccgaacatacgtataaactgatccagcagttccactcctgggtatgtacaccacagaaagctatgtccaccgagacattggcaagaatgtttctaaccacacgctgactgtagccccaaacctgaaacaacccaaatgtccatccaccaacccaaatgtccatccacagttgaagctacagtgaagtcacagggtcgaatactactgcacagcaacgaatatgaatgaaaatatcgctatgcacagcaacatggataaatttcacagacatgaggtcaagcaaaagaggtcagagtcctcatcatcaagagagaattcattgtatgattctcttcctacaaaaagtacagaaataagcaaaactgatccatggtgttagaagccaggggaacagttaacaggggagggatactggggaggggcatcctggagtgctggtctacctcatctgggtgttgatttcacgagtattgtcagtttgtttccagactccctgttggagatgtggaaataaaaaccacctaaacaagagcagagaggccatttggtcaaagtttgcaaaggagtcagccatgattgcttgtatttggcaggggtcaaaggcaggcagggactgtgaaatgttatagtggaaaaaaagggaaggctctgggtgtgctgtgattggagattgttggcatggggacagagcggactaactggaggggcatctttggttggttgggggggtatatttggctttctctggttggtctggagttggaagagggggtgtggtggctggggattgggaagaagctggcagccactaagttcagactgttctgggtccgattgctgctgaggctgtggtttggcttccttggcttcccaggctggttatgggtttctggccagagtctattgtcatatgtggcctggccattgtccagttgtatgttcagtctcttggaaggaagggtattgactctgagaggggccaccatcgctggaatgggggacacacagtacttcctccagctgcctacacccccctagggtcagtggcgcctgcctgtgagggtgagcccaatggctagagggctctgctccaagtcattgcttactacacccacaaacattcttcgttctttaaggcctaacttaaagcccagatcctacaggaaaccttgattagacccctctctttattaagcttcctaagatcaaaccctgcttttgtgtaaatgctgacctccttgcctacattttaaaaacctagagctgggcatgatggccccagcctgtaatcccagtgattcaggagactgaggtgggaggattgctagaagccaggagttcgagaccagcctgggtaacatagctagaccacatctcttaaaataaaatagttaatttagccaggcatgatgatatatgcctgtagtcccaactacttggaaggctgaggtgtgaggatctttgagcccgggaggtcgaggctacagtaagctatgatctcaccactgtactccagcctgggtgacagagcgagacccagactcaaaaaataaaaataaaaaccctgaatatcttccttctgcaaaaaaaaaaaaaaaaaaaaaaaaaaaaaaaaaaaaaaatctaggagatgctctttaccctgcctggcctcaaactattaatagcttcctttgagcaacattatttattatgaactttcaaacacaaaaaagtagagatagaataacaaatccccatgactccatctacccatctggaccactat

SEQ ID NO: 437629 - DNA, 10882 bp, Homo sapiens
gcggccgccggggtcggcagcctggggctccgctgatctagggcaacgagcgggggacgcttcgagcccgcagcgagagtgaccagcatggtccctgccggcagctcggggccggagggttttgactgcaaggccagcccacgccgagggtccaagcatcgggatatgccgccagcacctggctgctgcagcaccgcgctggacatgagcgctccgcccaacccgacggcgtcagctggcgcgcgcgcccgcgaccgacgtgcgcaggcgcccacgggccgcgcagccgccattgctctcctgccacggaggggagcgcttggtggcagtccgcgggcccggacggaaggctgaggcgacgcctcgacgacagcggaccggagctgcaggggcaacacattcagggcggggtgccccatttaggcctggctgaccggagtaagaaactacaacccccgaagtgccttgcgcctcaaggttacggaggcagtgaccacccaccctggagccatggtccacgccttcctcattcacaccttgagggccccgaatactgaggacacgggcctttgccgagtgctgtactcctgcgtcttcggtgctgagaagtcacctgatgacccacggccgcatggtgccgagagggacaggcttctccggaaggaacagattttagctgtggccagcggcaggtgacgagccacacagtgtcctgaggcctgatgaaagggctatgccaaccacagtcccagaggaggagctggctgtagcagcgactgacccaggagctgaagtgagccaagccccctcctcctgagacccctgagagtctcgtttcctctcagtccatccacccttcatggggccagagccctctctccagaatctgagcagcaatgccgtttgctgaagacaagacctataagtatatctgccgcaatttcagcaatttttgcaatgtggatgttgtagagattctgccttacctgccctgcctcacagcaagagaccaggatcgactgcgggccacctgcacactctcagggaaccgggacaccctctggcatctcttcaatacccttcagcggcggcccggctgggtggagtacttcattgcggcactgaggggctgtgagctagttgatctcgcggacgaagtggcctctgtctaccagagctaccagcctcggacctcggaccgtcccccagacccactggagccaccgtcacttcctgctgagaggccagggccccccacacctgctgcggcccacagcatcccctacaacagctgcagagagaaggagccaagttaccccatgcctgtccaggagacccaggcgccagagtccccaggagagaattcagagcaagccctgcagacgctcagccccagagccatcccaaggaatccagatggtggccccctggagtcctcctctgacctggcagccctcagccctctgacctccagcgggcatcaggagcaggacacagaactgggcagtacccacacagcaggtgcgacctccagcctcacaccatcccgtgggcctgtgtctccatctgtctccttccagcccctggcccgttccacccccagggcaagccgcttgcctggacccacagggtcagttgtatctactggcacctccttctcctcctcatcccctggcttggcctctgcaggggctgcagagggtaaacagggtgcagagagtgaccaggccgagcctatcatctgctccagtggggcagaggcacctgccaactctctgccctccaaagtgcctaccaccttgatgcctgtgaacacagtggccctgaaagtgcctgccaacccagcatctgtcagcacagtgccctccaagttgccaactagctcaaagccccctggtgcagtgccttctaatgcgctcaccaatccagcaccatccaaattgcccatcaactcaacccgtgctggcatggtgccatccaaagtgcctactagcatggtgctcaccaaggtgtctgccagcacagtccccactgacgggagcagcagaaatgaggagaccccagcagctccaacacccgccggcgccactggaggcagctcagcctggctagacagcagctctgagaataggggccttgggtcggagctgagtaagcctggcgtgctggcatcccaggtagacagcccgttctcgggctgcttcgaggatcttgccatcagtgccagcacctccttgggcatggggccctgccatggcccagaggagaatgagtataagtccgagggcacctttgggatccacgtggctgagaaccccagcatccagctcctggagggcaaccctgggccacctgcggacccggatggcggccccaggccacaagccgaccggaagttccaggagagggaggtgccatgccacaggccctcacctggggctctgtggctccaggtggctgtgacaggggtgctggtagtcacactcctggtggtgctgtaccggcggcgtctgcactagtgaagccctgggctcttcccaccacccatctgttccgttcctgcagtatacctggcccctctccgaagccccttgtccctttcttggggattgtggaggctgggtcagaggggagttaagggactgcaggcctggcagcaggacatgccttggctgaaccaagtcctgagagcagcatctctgtccccacggtgccttgtgtgggtccccgtccttggctttctgggtcctgggctgcccccagtgctccagaccttccccactggcaatccaggttatcatccatgtcctccagaggagcttcctcctccaggcctcagccctgttggcccaggtggagcaggagggaccactggaacatgtggtgcttgggaatgcctctcctgttgcattggtccctgaaggcctcagggcaggtatgtggtgtgtgggcgactccacaagacctgcctcccatcctggcagcccagcctgagaccgttgcattgaggcaggcaggagcggcagggtggctgctctccaggagcccaactgccttgagttcctgccccactgggccccctcccctgctgggcaatcctgggaaggtctggaggttcctgtggacctcagggaagccaggggcagctgtcaggcctgaggaagacctgtggagctcctctccagcctcctctttccctcccctctggtctccattctcttcagctccctacatgggctggggaggagacacctggtgggcagagctcaggcagaggtttggatttcagctccctcacttccggggctgtgtggctttggcagatgtcagacttctggtcttgcttctccacgtggacagtgagtatctggctcattcttcactgggttcttctgagattgaacctacaggtgtttgccaagtgcctggcccagagcaagtggccactgcttctcccatctctctcctgcccaacctggtagagctgagggcatgagaggcagagtgcacagtggtcaagggtgcagctctgcagcacaggcagcctaggcctgcgtcccaacctgcctctcaccagctctgtgaccttgggcaagggatttatctgtctgtcccttagttttctcacctgtaaaaggaggataagtatatatatatatttcccagtgttgtgaagattaaaggagtttatcgatgtaggtcttaggatgagtcctggcatttaccaagggttggatatatgttattatcactattaagtgttgagggtccaggcatgctgggcaacagggaccccatctctacaaaaaagtttaaaaaattagccaggcgtggtggtgcacctgtcgtcttagctacttgggaggctgaggtgggaggatcacttgagcccagaagcttgaagctgcagtgagctaggatcgtgccactgcactccaacctgggtgagagagcgagaccctgtctcaagaaaaagaaaaatgcagagaaacaggagtcttggctactcctttagaggcagactcagaccctcctgcctcacagctttatctttgtatttgccccttactttatcttgtgccttgagaaattgctggggagagaggtatgtccactgggcagctgtacaggatggaggatatagggcgtttccactcccagcagccaggttccctcaccccaagctcacccactgttggggagattatctacaataacaccagaaacacattggggtggattgggggtatccttatgggttcttttcagggaaccattgctggacaaggcacaggagccacctccatttctgagctctgcaagggacaagaactagagccatcaggggctgggctcactgtggccccaccccaagccgtcagcctccagggatctacaccctgccttggctgctacagctttttcactccactgccctaggggagttcagcaacctaatgatctctatctctgaacatctcttcatcccatgctccaagtccagcaacctgcaccctggaaccaggagtggaccctacccgagctgtctgtattaatccccatcccccaccaccaatcttaaaaagccctctgtccccctaccctaaaccccagttaggtacccatgctgggcaggtcagttaacaatttatgcacaggtactagttttattgtattaccgttccagggtagctttgaaaaaagtatctcaaaaaggcaacaccaccgcgcccagccaaattaaattttttatagagatgaggtcatgctgttatgttgcccaggttggcctcatgagatcttgccttagcctcccaaagtgctgggattacagatgtgagacactgcacccaaaccccaccacttttttttttcctttttctttttttgagacagtcttactccgttgcccaggctggagtgtagtggcatgatctcagctcactgcaacctccgcctcccgggttcaagcaattctcctgcctcagcctcccgagtagctgggattacagaggcctgccaccacacccgactaattttcgtatttttagtagagacggggtttctccatgttggccaggctgttcttgaactcctgacctcaagtgctccacctgcgttggcttcccaaagtgctgggatacaggagtgagccactgcgcctggctgatcccagcacttttcaaatgatgccgctcaaagccgtgacttggcctactttgaacagcaaacttgttgctgctgttgtcaacctgaaggcctctcaaatgccagcttcaagcagggtgtgaattggccagtgtcagatctcaggagtcctgtgttgagagtgtggctttcagctgcggggagctgcacttggtggggaaagccaggcaggtcaccctcacagccagataatgtggaggtcagaacccaaggaagggagtgagacctccactcccagtgggggacctggccacccatccttggggacctgagaaagcgtacttcaccttggggtgaaggctgggtggggccagagggaccagtgccctcctcagtgcttaggggcagagccacctgcagcaatggtatctgcatattagcccctctccaccttctttctcccgctgaatcatttccctcaaagcccaagagctgtcactgcttctttctccctgggaagaatgcgtggactctgcctggtgatagactgaagccagaacagtgccacaccctcgccttaattccttgctaggtgttctcagatttatgagacttcttagtcaaatatgagggaggttggatgtggtggcttgtgcctgtaatcccagcattttgggaggccgaggtgggaggatcccttgaagccaggagtttgagacaagcctgggcaacaaagcaagaccctatctctaaaaaaaaaaaaaaaaaaaaatctaggagatgctctttaccctgcctggcctcaaactattaatagcttcctttgagcaacattatttattatgaactttcaaacacaaaaaagtagagagagtagaataacaaatccccatgagcccatcacccaacttcagtaattatcaattcatggccatcttgttcacccctgcctgcttccctgcttcccctcattctgcagaggttcttttcttttgagacagagtgttgctctgttgcccaggctggagtgcagtggtgcaacttcggctcactgcaacctccgcctcccaggttcaagtgattctcctgcttcagcctctcaagtagctgggattacagatgcccgccaccacacctggctaattttcgtatttttgttagagatggggtttcaccatgttggccaggctggtctcgaactcctgacctcaagtgatccgcccgccttggcctcccaaaatgctgggattacaggtgtgaaccacggtgcctggccactgtacaggttatttatagaagttggagagtgaagggttgagaaagccaaggggcagatgcgggtctggaggattttgtgcctaaggccctctctttgctcccagacagcatgaagtaacaatgaggcatccacctcttggttttgtggcctctgtggatgacgtctctcaccttgaaccagttcagagttggagtagcgcaggatcctgtcttcagaggaggggccgaagcgggttcctctgttgtcaagctctttggaggtgcctggctgctactactgtcccagagaggtgatgatgaatgatgggtgtgtccagtggcagtttgccccactgaggcaggggcttccactaggccctgacagagcccttccagcaggcagaaatccctgtgctaggcaagattcaaactccgtagcatgtctcctgctcccatctcttaggaatggagtccttcaggccttgagtcccacattttccatgatgctccattaagcagctgatagcacccccacctccagggaaagtgagttcagagtccttggtctaatgcatctgtgttgaaattgaggccttcccctgtgttcacctttctgctctttttcttttagcccaaggctatgaaggcctcattcggtgctgggcatggtcactcctagcattcctcactctgttgctaacagcaacagcaataataataagggttacaacttactccataccttactgtctgccaggcattaagctaagtgctttacatatattaagtcatttaatcctcataatgaccctatgaaagagataccatctcaacccaattgacagctggtttgcaagattaggagggatgaaggacccaggggacaatgcgagggaaaactctgaccccggggccccaggctggatgttctttatgcctgtgaaccacagcttatcacatgtctggagttagggaccccacttaaagtgagattttggctggaggtggtggatcatacctataatcccagcactttgggagaccaaggcagaaggactgcttgaggccaggagttcaaaaccagtgtaggtaacagctagaccctatctctacaaaaaatttaaaaattagctgggtgtggtggtatgtgcctcaagttccagctactcaggaggctgaggtgggaggatcacttgagcacaggagtttgaagttacagtgagctatgatggcaccactgcacttcagcctaggcaacagagggagaccctgtctttaaagtacatagaggtttttcacaccaacacatctctgcccagtgtgccaacatctgccacctgctataatagtactataacactcaatatgtaattaatgtagtctcagggatgttatgacaatatgattacaactatcacgtgtgtgcccagccaggctcaatgccccaggctgggcgaggtggggcaggggacacagcctaaaatgccaggcctcaggaagccatttggtttagcagacattgtttattaaaggagttacctatgccagatcgaaggcctaagatgattaagacactatgagtgccttcaagtggttggggacgttcatgattgtggtacagacaaataggctttcacatcattcttttatgtaatcatacaacagatatttgcacctacatgtgcagagcactgtgataggcctcagtgacacagaataatacggcaaagaccccacccgatgagccccctcccaccacccaccagtacagtagggggtggtttaatggagtgttcctggaatatgaagtgggggcaggcattaggggtggcaaagggacaagtgtttatctgatcagttatgtactgtttataataagtaaatcagcagagggggaataatacttagaacctatagagagtaaatctgacaagatgaaatgctgatgaaaatatggaggaaatgaaactctcatgggttttgcagggaatctaagtcagtgctgtgttgtgaatgtaggtgtaccctttgaattcatatgttgaatcctaacccccaaagcaatggcattaagaggtggggcctttggggctgggtatggtggctcatgactgtaatcccagcactttgggatgctggcagggggcagatcacttgaagccaggagtctgagatcagcctggccaacatggtgaaaccccatctgtactaaaaatacaaaaattagccaggtgtgatggcgtacatctgtaatttcagccactcgggaggctgagacaggagaatagcttgaacccagtaggtggagatttcagtgagccgagatcgtgccactgcactccagcctgggtgacagagcgagactccatctcaaaaaaataataaagatgtggggcctgtgggaggtggttaggtcatgagggtggagatcatgaatggggttagcaccttataaaacaggcttgagggagcccttctgtcccttctaccatgtgtggatgcagtgagaaggcaccgtatctctgaagcagagagcccgccctggacactggatctgctggcaccttgatcttggacttcccagcctctagaactgtgagaaataattttttgttgtttacaaattacccaggctaaggtgtttcattgtaacctgaatggaccaagctggtgtgaccctgttggaaaactggcagtatctaccaaaagccgaacatacgtataaactgatccagcagttccactcctgggtatgtacaccacagaaagctatgtccaccgagacattggcaagaatgtttctaaccacacgctgactgtagccccaaacctgaaacaacccaaatgtccatccaccaacccaaatgtccatccacagttgaagctacagtgaagtcacagggtcgaatactactgcacagcaacgaatatgaatgaaaatatcgctatgcacagcaacatggataaatttcacagacatgaggtcaagcaaaagaggtcagagtcctcatcatcaagagagaattcattgtatgattctcttcctacaaaaagtacagaaataagcaaaactgatccatggtgttagaagccaggggaacagttaacaggggagggatactggggaggggcatcctggagtgctggtctacctcatctgggtgttgatttcacgagtattgtcagtttgtttccagactccctgttggagatgtggaaataaaaaccacctaaacaagagcagagaggccatttggtcaaagtttgcaaaggagtcagccatgattgcttgtatttggcaggggtcaaaggcaggcagggactgtgaaatgttatagtggaaaaaaagggaaggctctgggtgtgctgtgattggagattgttggcatggggacagagcggactaactggaggggcatctttggttggttgggggggtatatttggctttctctggttggtctggagttggaagagggggtgtggtggctggggattgggaagaagctggcagccactaagttcagactgttctgggtccgattgctgctgaggctgtggtttggcttccttggcttcccaggctggttatgggtttctggccagagtctattgtcatatgtggcctggccattgtccagttgtatgttcagtctcttggaaggaagggtattgactctgagaggggccaccatcgctggaatgggggacacacagtacttcctccagctgcctacacccccctagggtcagtggcgcctgcctgtgagggtgagcccaatggctagagggctctgctccaagtcattgcttactacacccacaaacattcttcgttctttaaggcctaacttaaagcccagatcctacaggaaaccttgattagacccctctctttattaagcttcctaagatcaaaccctgcttttgtgtaaatgctgacctccttgcctacattttaaaaacctagagctgggcatgatggccccagcctgtaatcccagtgattcaggagactgaggtgggaggattgctagaagccaggagttcgagaccagcctgggtaacatagctagaccacatctcttaaaataaaatagttaatttagccaggcatgatgatatatgcctgtagtcccaactacttggaaggctgaggtgtgaggatctttgagcccgggaggtcgaggctacagtaagctatgatctcaccactgtactccagcctgggtgacagagcgagacccagactcaaaaaataaaaataaaaaccctgaatatcttccttctgcaaaaaaaaaaaaaaaaaaaaaaaaaaaaaaaaaaaaaaatctaggagatgctctttaccctgcctggcctcaaactattaatagcttcctttgagcaacattatttattatgaactttcaaacacaaaaaagtagagatagaataacaaatccccatgactccatctacccatctggaccactat

SEQ ID NO: 437630 - DNA, 10478 bp, Homo sapiens
gcggccgccggggtcggcagcctggggctccgctgatctagggcaacgagcgggggacgcttcgagcccgcagcgagagtgaccagcatggtccctgccggcagctcggggccggagggttttgactgcaaggccagcccacgccgagggtccaagcatcgggatatgccgccagcacctggctgctgcagcaccgcgctggacatgagcgctccgcccaacccgacggcgtcagctggcgcgcgcgcccgcgaccgacgtgcgcaggcgcccacgggccgcgcagccgccattgctctcctgccacggaggggagcgcttggtggcagtccgcgggcccggacggaaggctgaggcgacgcctcgacgacagcggaccggagctgcaggggcaacacattcagggcggggtgccccatttaggcctggctgaccggacacccaccctggagccatggtccacgccttcctcattcacaccttgagggccccgaatactgaggacacgggcctttgccgagtgctgtactcctgcgtcttcggtgctgagaagtcacctgatgacccacggccgcatggtgccgagagggacaggcttctccggaaggaacagattttagctgtggccagcggcaggtgacgagccacacagtgtcctgaggcctgatgaaagggctatgccaaccacagtcccagaggaggagctggctgtagcagcgactgacccaggagctgaagtgagccaagccccctcctcctgagacccctgagagtctcgtttcctctcagtccatccacccttcatggggccagagccctctctccagaatctgagcagcaatgccgtttgctgaagacaagacctataagtatatctgccgcaatttcagcaatttttgcaatgtggatgttgtagagattctgccttacctgccctgcctcacagcaagagaccagaattcagagcaagccctgcagacgctcagccccagagccatcccaaggaatccagatggtggccccctggagtcctcctctgacctggcagccctcagccctctgacctccagcgggcatcaggagcaggacacagaactgggcagtacccacacagcaggtgcgacctccagcctcacaccatcccgtgggcctgtgtctccatctgtctccttccagcccctggcccgttccacccccagggcaagccgcttgcctggacccacagggtcagttgtatctactggcacctccttctcctcctcatcccctggcttggcctctgcaggggctgcagagggtaaacagggtgcagagagtgaccaggccgagcctatcatctgctccagtggggcagaggcacctgccaactctctgccctccaaagtgcctaccaccttgatgcctgtgaacacagtggccctgaaagtgcctgccaacccagcatctgtcagcacagtgccctccaagttgccaactagctcaaagccccctggtgcagtgccttctaatgcgctcaccaatccagcaccatccaaattgcccatcaactcaacccgtgctggcatggtgccatccaaagtgcctactagcatggtgctcaccaaggtgtctgccagcacagtccccactgacgggagcagcagaaatgaggagaccccagcagctccaacacccgccggcgccactggaggcagctcagcctggctagacagcagctctgagaataggggccttgggtcggagctgagtaagcctggcgtgctggcatcccaggtagacagcccgttctcgggctgcttcgaggatcttgccatcagtgccagcacctccttgggcatggggccctgccatggcccagaggagaatgagtataagtccgagggcacctttgggatccacgtggctgagaaccccagcatccagctcctggagggcaaccctgggccacctgcggacccggatggcggccccaggccacaagccgaccggaagttccaggagagggaggtgccatgccacaggccctcacctggggctctgtggctccaggtggctgtgacaggggtgctggtagtcacactcctggtggtgctgtaccggcggcgtctgcactagtgaagccctgggctcttcccaccacccatctgttccgttcctgcagtatacctggcccctctccgaagccccttgtccctttcttggggattgtggaggctgggtcagaggggagttaagggactgcaggcctggcagcaggacatgccttggctgaaccaagtcctgagagcagcatctctgtccccacggtgccttgtgtgggtccccgtccttggctttctgggtcctgggctgcccccagtgctccagaccttccccactggcaatccaggttatcatccatgtcctccagaggagcttcctcctccaggcctcagccctgttggcccaggtggagcaggagggaccactggaacatgtggtgcttgggaatgcctctcctgttgcattggtccctgaaggcctcagggcaggtatgtggtgtgtgggcgactccacaagacctgcctcccatcctggcagcccagcctgagaccgttgcattgaggcaggcaggagcggcagggtggctgctctccaggagcccaactgccttgagttcctgccccactgggccccctcccctgctgggcaatcctgggaaggtctggaggttcctgtggacctcagggaagccaggggcagctgtcaggcctgaggaagacctgtggagctcctctccagcctcctctttccctcccctctggtctccattctcttcagctccctacatgggctggggaggagacacctggtgggcagagctcaggcagaggtttggatttcagctccctcacttccggggctgtgtggctttggcagatgtcagacttctggtcttgcttctccacgtggacagtgagtatctggctcattcttcactgggttcttctgagattgaacctacaggtgtttgccaagtgcctggcccagagcaagtggccactgcttctcccatctctctcctgcccaacctggtagagctgagggcatgagaggcagagtgcacagtggtcaagggtgcagctctgcagcacaggcagcctaggcctgcgtcccaacctgcctctcaccagctctgtgaccttgggcaagggatttatctgtctgtcccttagttttctcacctgtaaaaggaggataagtatatatatatatttcccagtgttgtgaagattaaaggagtttatcgatgtaggtcttaggatgagtcctggcatttaccaagggttggatatatgttattatcactattaagtgttgagggtccaggcatgctgggcaacagggaccccatctctacaaaaaagtttaaaaaattagccaggcgtggtggtgcacctgtcgtcttagctacttgggaggctgaggtgggaggatcacttgagcccagaagcttgaagctgcagtgagctaggatcgtgccactgcactccaacctgggtgagagagcgagaccctgtctcaagaaaaagaaaaatgcagagaaacaggagtcttggctactcctttagaggcagactcagaccctcctgcctcacagctttatctttgtatttgccccttactttatcttgtgccttgagaaattgctggggagagaggtatgtccactgggcagctgtacaggatggaggatatagggcgtttccactcccagcagccaggttccctcaccccaagctcacccactgttggggagattatctacaataacaccagaaacacattggggtggattgggggtatccttatgggttcttttcagggaaccattgctggacaaggcacaggagccacctccatttctgagctctgcaagggacaagaactagagccatcaggggctgggctcactgtggccccaccccaagccgtcagcctccagggatctacaccctgccttggctgctacagctttttcactccactgccctaggggagttcagcaacctaatgatctctatctctgaacatctcttcatcccatgctccaagtccagcaacctgcaccctggaaccaggagtggaccctacccgagctgtctgtattaatccccatcccccaccaccaatcttaaaaagccctctgtccccctaccctaaaccccagttaggtacccatgctgggcaggtcagttaacaatttatgcacaggtactagttttattgtattaccgttccagggtagctttgaaaaaagtatctcaaaaaggcaacaccaccgcgcccagccaaattaaattttttatagagatgaggtcatgctgttatgttgcccaggttggcctcatgagatcttgccttagcctcccaaagtgctgggattacagatgtgagacactgcacccaaaccccaccacttttttttttcctttttctttttttgagacagtcttactccgttgcccaggctggagtgtagtggcatgatctcagctcactgcaacctccgcctcccgggttcaagcaattctcctgcctcagcctcccgagtagctgggattacagaggcctgccaccacacccgactaattttcgtatttttagtagagacggggtttctccatgttggccaggctgttcttgaactcctgacctcaagtgctccacctgcgttggcttcccaaagtgctgggatacaggagtgagccactgcgcctggctgatcccagcacttttcaaatgatgccgctcaaagccgtgacttggcctactttgaacagcaaacttgttgctgctgttgtcaacctgaaggcctctcaaatgccagcttcaagcagggtgtgaattggccagtgtcagatctcaggagtcctgtgttgagagtgtggctttcagctgcggggagctgcacttggtggggaaagccaggcaggtcaccctcacagccagataatgtggaggtcagaacccaaggaagggagtgagacctccactcccagtgggggacctggccacccatccttggggacctgagaaagcgtacttcaccttggggtgaaggctgggtggggccagagggaccagtgccctcctcagtgcttaggggcagagccacctgcagcaatggtatctgcatattagcccctctccaccttctttctcccgctgaatcatttccctcaaagcccaagagctgtcactgcttctttctccctgggaagaatgcgtggactctgcctggtgatagactgaagccagaacagtgccacaccctcgccttaattccttgctaggtgttctcagatttatgagacttcttagtcaaatatgagggaggttggatgtggtggcttgtgcctgtaatcccagcattttgggaggccgaggtgggaggatcccttgaagccaggagtttgagacaagcctgggcaacaaagcaagaccctatctctaaaaaaaaaaaaaaaaaaaaatctaggagatgctctttaccctgcctggcctcaaactattaatagcttcctttgagcaacattatttattatgaactttcaaacacaaaaaagtagagagagtagaataacaaatccccatgagcccatcacccaacttcagtaattatcaattcatggccatcttgttcacccctgcctgcttccctgcttcccctcattctgcagaggttcttttcttttgagacagagtgttgctctgttgcccaggctggagtgcagtggtgcaacttcggctcactgcaacctccgcctcccaggttcaagtgattctcctgcttcagcctctcaagtagctgggattacagatgcccgccaccacacctggctaattttcgtatttttgttagagatggggtttcaccatgttggccaggctggtctcgaactcctgacctcaagtgatccgcccgccttggcctcccaaaatgctgggattacaggtgtgaaccacggtgcctggccactgtacaggttatttatagaagttggagagtgaagggttgagaaagccaaggggcagatgcgggtctggaggattttgtgcctaaggccctctctttgctcccagacagcatgaagtaacaatgaggcatccacctcttggttttgtggcctctgtggatgacgtctctcaccttgaaccagttcagagttggagtagcgcaggatcctgtcttcagaggaggggccgaagcgggttcctctgttgtcaagctctttggaggtgcctggctgctactactgtcccagagaggtgatgatgaatgatgggtgtgtccagtggcagtttgccccactgaggcaggggcttccactaggccctgacagagcccttccagcaggcagaaatccctgtgctaggcaagattcaaactccgtagcatgtctcctgctcccatctcttaggaatggagtccttcaggccttgagtcccacattttccatgatgctccattaagcagctgatagcacccccacctccagggaaagtgagttcagagtccttggtctaatgcatctgtgttgaaattgaggccttcccctgtgttcacctttctgctctttttcttttagcccaaggctatgaaggcctcattcggtgctgggcatggtcactcctagcattcctcactctgttgctaacagcaacagcaataataataagggttacaacttactccataccttactgtctgccaggcattaagctaagtgctttacatatattaagtcatttaatcctcataatgaccctatgaaagagataccatctcaacccaattgacagctggtttgcaagattaggagggatgaaggacccaggggacaatgcgagggaaaactctgaccccggggccccaggctggatgttctttatgcctgtgaaccacagcttatcacatgtctggagttagggaccccacttaaagtgagattttggctggaggtggtggatcatacctataatcccagcactttgggagaccaaggcagaaggactgcttgaggccaggagttcaaaaccagtgtaggtaacagctagaccctatctctacaaaaaatttaaaaattagctgggtgtggtggtatgtgcctcaagttccagctactcaggaggctgaggtgggaggatcacttgagcacaggagtttgaagttacagtgagctatgatggcaccactgcacttcagcctaggcaacagagggagaccctgtctttaaagtacatagaggtttttcacaccaacacatctctgcccagtgtgccaacatctgccacctgctataatagtactataacactcaatatgtaattaatgtagtctcagggatgttatgacaatatgattacaactatcacgtgtgtgcccagccaggctcaatgccccaggctgggcgaggtggggcaggggacacagcctaaaatgccaggcctcaggaagccatttggtttagcagacattgtttattaaaggagttacctatgccagatcgaaggcctaagatgattaagacactatgagtgccttcaagtggttggggacgttcatgattgtggtacagacaaataggctttcacatcattcttttatgtaatcatacaacagatatttgcacctacatgtgcagagcactgtgataggcctcagtgacacagaataatacggcaaagaccccacccgatgagccccctcccaccacccaccagtacagtagggggtggtttaatggagtgttcctggaatatgaagtgggggcaggcattaggggtggcaaagggacaagtgtttatctgatcagttatgtactgtttataataagtaaatcagcagagggggaataatacttagaacctatagagagtaaatctgacaagatgaaatgctgatgaaaatatggaggaaatgaaactctcatgggttttgcagggaatctaagtcagtgctgtgttgtgaatgtaggtgtaccctttgaattcatatgttgaatcctaacccccaaagcaatggcattaagaggtggggcctttggggctgggtatggtggctcatgactgtaatcccagcactttgggatgctggcagggggcagatcacttgaagccaggagtctgagatcagcctggccaacatggtgaaaccccatctgtactaaaaatacaaaaattagccaggtgtgatggcgtacatctgtaatttcagccactcgggaggctgagacaggagaatagcttgaacccagtaggtggagatttcagtgagccgagatcgtgccactgcactccagcctgggtgacagagcgagactccatctcaaaaaaataataaagatgtggggcctgtgggaggtggttaggtcatgagggtggagatcatgaatggggttagcaccttataaaacaggcttgagggagcccttctgtcccttctaccatgtgtggatgcagtgagaaggcaccgtatctctgaagcagagagcccgccctggacactggatctgctggcaccttgatcttggacttcccagcctctagaactgtgagaaataattttttgttgtttacaaattacccaggctaaggtgtttcattgtaacctgaatggaccaagctggtgtgaccctgttggaaaactggcagtatctaccaaaagccgaacatacgtataaactgatccagcagttccactcctgggtatgtacaccacagaaagctatgtccaccgagacattggcaagaatgtttctaaccacacgctgactgtagccccaaacctgaaacaacccaaatgtccatccaccaacccaaatgtccatccacagttgaagctacagtgaagtcacagggtcgaatactactgcacagcaacgaatatgaatgaaaatatcgctatgcacagcaacatggataaatttcacagacatgaggtcaagcaaaagaggtcagagtcctcatcatcaagagagaattcattgtatgattctcttcctacaaaaagtacagaaataagcaaaactgatccatggtgttagaagccaggggaacagttaacaggggagggatactggggaggggcatcctggagtgctggtctacctcatctgggtgttgatttcacgagtattgtcagtttgtttccagactccctgttggagatgtggaaataaaaaccacctaaacaagagcagagaggccatttggtcaaagtttgcaaaggagtcagccatgattgcttgtatttggcaggggtcaaaggcaggcagggactgtgaaatgttatagtggaaaaaaagggaaggctctgggtgtgctgtgattggagattgttggcatggggacagagcggactaactggaggggcatctttggttggttgggggggtatatttggctttctctggttggtctggagttggaagagggggtgtggtggctggggattgggaagaagctggcagccactaagttcagactgttctgggtccgattgctgctgaggctgtggtttggcttccttggcttcccaggctggttatgggtttctggccagagtctattgtcatatgtggcctggccattgtccagttgtatgttcagtctcttggaaggaagggtattgactctgagaggggccaccatcgctggaatgggggacacacagtacttcctccagctgcctacacccccctagggtcagtggcgcctgcctgtgagggtgagcccaatggctagagggctctgctccaagtcattgcttactacacccacaaacattcttcgttctttaaggcctaacttaaagcccagatcctacaggaaaccttgattagacccctctctttattaagcttcctaagatcaaaccctgcttttgtgtaaatgctgacctccttgcctacattttaaaaacctagagctgggcatgatggccccagcctgtaatcccagtgattcaggagactgaggtgggaggattgctagaagccaggagttcgagaccagcctgggtaacatagctagaccacatctcttaaaataaaatagttaatttagccaggcatgatgatatatgcctgtagtcccaactacttggaaggctgaggtgtgaggatctttgagcccgggaggtcgaggctacagtaagctatgatctcaccactgtactccagcctgggtgacagagcgagacccagactcaaaaaataaaaataaaaaccctgaatatcttccttctgcaaaaaaaaaaaaaaaaaaaaaaaaaaaaaaaaaaaaaaatctaggagatgctctttaccctgcctggcctcaaactattaatagcttcctttgagcaacattatttattatgaactttcaaacacaaaaaagtagagatagaataacaaatccccatgactccatctacccatctggaccactat

SEQ ID NO: 437631 - DNA, 9942 bp, Homo sapiens
gatcccccctgagcttgctcaggatctcctggagatatgctctggactacaggacattgccactaatttcccagattaatttaggggtatttgttgtagagatggggtttcactgtgttagccagggtggtctcgatctgacctcgtgatctgcctgccttggcctcccaaagtgctgagattacaggcatgagccactgtgcccagccctgattccttcttgatatcactacatctttgtcctctagggacctcggaccgtcccccagacccactggagccaccgtcacttcctgctgagaggccagggccccccacacctgctgcggcccacagcatcccctacaacagctgcagagagaaggagccaagttaccccatgcctgtccaggagacccaggcgccagagtccccaggagagaattcagagcaagccctgcagacgctcagccccagagccatcccaaggaatccagatggtggccccctggagtcctcctctgacctggcagccctcagccctctgacctccagcgggcatcaggagcaggacacagaactgggcagtacccacacagcaggtgcgacctccagcctcacaccatcccgtgggcctgtgtctccatctgtctccttccagcccctggcccgttccacccccagggcaagccgcttgcctggacccacagggtcagttgtatctactggcacctccttctcctcctcatcccctggcttggcctctgcaggggctgcagagggtaaacagggtgcagagagtgaccaggccgagcctatcatctgctccagtggggcagaggcacctgccaactctctgccctccaaagtgcctaccaccttgatgcctgtgaacacagtggccctgaaagtgcctgccaacccagcatctgtcagcacagtgccctccaagttgccaactagctcaaagccccctggtgcagtgccttctaatgcgctcaccaatccagcaccatccaaattgcccatcaactcaacccgtgctggcatggtgccatccaaagtgcctactagcatggtgctcaccaaggtgtctgccagcacagtccccactgacgggagcagcagaaatgaggagaccccagcagctccaacacccgccggcgccactggaggcagctcagcctggctagacagcagctctgagaataggggccttgggtcggagctgagtaagcctggcgtgctggcatcccaggtagacagcccgttctcgggctgcttcgaggatcttgccatcagtgccagcacctccttgggcatggggccctgccatggcccagaggagaatgagtataagtccgagggcacctttgggatccacgtggctgagaaccccagcatccagctcctggagggcaaccctgggccacctgcggacccggatggcggccccaggccacaagccgaccggaagttccaggagagggaggtgccatgccacaggccctcacctggggctctgtggctccaggtggctgtgacaggggtgctggtagtcacactcctggtggtgctgtaccggcggcgtctgcactagtgaagccctgggctcttcccaccacccatctgttccgttcctgcagtatacctggcccctctccgaagccccttgtccctttcttggggattgtggaggctgggtcagaggggagttaagggactgcaggcctggcagcaggacatgccttggctgaaccaagtcctgagagcagcatctctgtccccacggtgccttgtgtgggtccccgtccttggctttctgggtcctgggctgcccccagtgctccagaccttccccactggcaatccaggttatcatccatgtcctccagaggagcttcctcctccaggcctcagccctgttggcccaggtggagcaggagggaccactggaacatgtggtgcttgggaatgcctctcctgttgcattggtccctgaaggcctcagggcaggtatgtggtgtgtgggcgactccacaagacctgcctcccatcctggcagcccagcctgagaccgttgcattgaggcaggcaggagcggcagggtggctgctctccaggagcccaactgccttgagttcctgccccactgggccccctcccctgctgggcaatcctgggaaggtctggaggttcctgtggacctcagggaagccaggggcagctgtcaggcctgaggaagacctgtggagctcctctccagcctcctctttccctcccctctggtctccattctcttcagctccctacatgggctggggaggagacacctggtgggcagagctcaggcagaggtttggatttcagctccctcacttccggggctgtgtggctttggcagatgtcagacttctggtcttgcttctccacgtggacagtgagtatctggctcattcttcactgggttcttctgagattgaacctacaggtgtttgccaagtgcctggcccagagcaagtggccactgcttctcccatctctctcctgcccaacctggtagagctgagggcatgagaggcagagtgcacagtggtcaagggtgcagctctgcagcacaggcagcctaggcctgcgtcccaacctgcctctcaccagctctgtgaccttgggcaagggatttatctgtctgtcccttagttttctcacctgtaaaaggaggataagtatatatatatatttcccagtgttgtgaagattaaaggagtttatcgatgtaggtcttaggatgagtcctggcatttaccaagggttggatatatgttattatcactattaagtgttgagggtccaggcatgctgggcaacagggaccccatctctacaaaaaagtttaaaaaattagccaggcgtggtggtgcacctgtcgtcttagctacttgggaggctgaggtgggaggatcacttgagcccagaagcttgaagctgcagtgagctaggatcgtgccactgcactccaacctgggtgagagagcgagaccctgtctcaagaaaaagaaaaatgcagagaaacaggagtcttggctactcctttagaggcagactcagaccctcctgcctcacagctttatctttgtatttgccccttactttatcttgtgccttgagaaattgctggggagagaggtatgtccactgggcagctgtacaggatggaggatatagggcgtttccactcccagcagccaggttccctcaccccaagctcacccactgttggggagattatctacaataacaccagaaacacattggggtggattgggggtatccttatgggttcttttcagggaaccattgctggacaaggcacaggagccacctccatttctgagctctgcaagggacaagaactagagccatcaggggctgggctcactgtggccccaccccaagccgtcagcctccagggatctacaccctgccttggctgctacagctttttcactccactgccctaggggagttcagcaacctaatgatctctatctctgaacatctcttcatcccatgctccaagtccagcaacctgcaccctggaaccaggagtggaccctacccgagctgtctgtattaatccccatcccccaccaccaatcttaaaaagccctctgtccccctaccctaaaccccagttaggtacccatgctgggcaggtcagttaacaatttatgcacaggtactagttttattgtattaccgttccagggtagctttgaaaaaagtatctcaaaaaggcaacaccaccgcgcccagccaaattaaattttttatagagatgaggtcatgctgttatgttgcccaggttggcctcatgagatcttgccttagcctcccaaagtgctgggattacagatgtgagacactgcacccaaaccccaccacttttttttttcctttttctttttttgagacagtcttactccgttgcccaggctggagtgtagtggcatgatctcagctcactgcaacctccgcctcccgggttcaagcaattctcctgcctcagcctcccgagtagctgggattacagaggcctgccaccacacccgactaattttcgtatttttagtagagacggggtttctccatgttggccaggctgttcttgaactcctgacctcaagtgctccacctgcgttggcttcccaaagtgctgggatacaggagtgagccactgcgcctggctgatcccagcacttttcaaatgatgccgctcaaagccgtgacttggcctactttgaacagcaaacttgttgctgctgttgtcaacctgaaggcctctcaaatgccagcttcaagcagggtgtgaattggccagtgtcagatctcaggagtcctgtgttgagagtgtggctttcagctgcggggagctgcacttggtggggaaagccaggcaggtcaccctcacagccagataatgtggaggtcagaacccaaggaagggagtgagacctccactcccagtgggggacctggccacccatccttggggacctgagaaagcgtacttcaccttggggtgaaggctgggtggggccagagggaccagtgccctcctcagtgcttaggggcagagccacctgcagcaatggtatctgcatattagcccctctccaccttctttctcccgctgaatcatttccctcaaagcccaagagctgtcactgcttctttctccctgggaagaatgcgtggactctgcctggtgatagactgaagccagaacagtgccacaccctcgccttaattccttgctaggtgttctcagatttatgagacttcttagtcaaatatgagggaggttggatgtggtggcttgtgcctgtaatcccagcattttgggaggccgaggtgggaggatcccttgaagccaggagtttgagacaagcctgggcaacaaagcaagaccctatctctaaaaaaaaaaaaaaaaaaaaatctaggagatgctctttaccctgcctggcctcaaactattaatagcttcctttgagcaacattatttattatgaactttcaaacacaaaaaagtagagagagtagaataacaaatccccatgagcccatcacccaacttcagtaattatcaattcatggccatcttgttcacccctgcctgcttccctgcttcccctcattctgcagaggttcttttcttttgagacagagtgttgctctgttgcccaggctggagtgcagtggtgcaacttcggctcactgcaacctccgcctcccaggttcaagtgattctcctgcttcagcctctcaagtagctgggattacagatgcccgccaccacacctggctaattttcgtatttttgttagagatggggtttcaccatgttggccaggctggtctcgaactcctgacctcaagtgatccgcccgccttggcctcccaaaatgctgggattacaggtgtgaaccacggtgcctggccactgtacaggttatttatagaagttggagagtgaagggttgagaaagccaaggggcagatgcgggtctggaggattttgtgcctaaggccctctctttgctcccagacagcatgaagtaacaatgaggcatccacctcttggttttgtggcctctgtggatgacgtctctcaccttgaaccagttcagagttggagtagcgcaggatcctgtcttcagaggaggggccgaagcgggttcctctgttgtcaagctctttggaggtgcctggctgctactactgtcccagagaggtgatgatgaatgatgggtgtgtccagtggcagtttgccccactgaggcaggggcttccactaggccctgacagagcccttccagcaggcagaaatccctgtgctaggcaagattcaaactccgtagcatgtctcctgctcccatctcttaggaatggagtccttcaggccttgagtcccacattttccatgatgctccattaagcagctgatagcacccccacctccagggaaagtgagttcagagtccttggtctaatgcatctgtgttgaaattgaggccttcccctgtgttcacctttctgctctttttcttttagcccaaggctatgaaggcctcattcggtgctgggcatggtcactcctagcattcctcactctgttgctaacagcaacagcaataataataagggttacaacttactccataccttactgtctgccaggcattaagctaagtgctttacatatattaagtcatttaatcctcataatgaccctatgaaagagataccatctcaacccaattgacagctggtttgcaagattaggagggatgaaggacccaggggacaatgcgagggaaaactctgaccccggggccccaggctggatgttctttatgcctgtgaaccacagcttatcacatgtctggagttagggaccccacttaaagtgagattttggctggaggtggtggatcatacctataatcccagcactttgggagaccaaggcagaaggactgcttgaggccaggagttcaaaaccagtgtaggtaacagctagaccctatctctacaaaaaatttaaaaattagctgggtgtggtggtatgtgcctcaagttccagctactcaggaggctgaggtgggaggatcacttgagcacaggagtttgaagttacagtgagctatgatggcaccactgcacttcagcctaggcaacagagggagaccctgtctttaaagtacatagaggtttttcacaccaacacatctctgcccagtgtgccaacatctgccacctgctataatagtactataacactcaatatgtaattaatgtagtctcagggatgttatgacaatatgattacaactatcacgtgtgtgcccagccaggctcaatgccccaggctgggcgaggtggggcaggggacacagcctaaaatgccaggcctcaggaagccatttggtttagcagacattgtttattaaaggagttacctatgccagatcgaaggcctaagatgattaagacactatgagtgccttcaagtggttggggacgttcatgattgtggtacagacaaataggctttcacatcattcttttatgtaatcatacaacagatatttgcacctacatgtgcagagcactgtgataggcctcagtgacacagaataatacggcaaagaccccacccgatgagccccctcccaccacccaccagtacagtagggggtggtttaatggagtgttcctggaatatgaagtgggggcaggcattaggggtggcaaagggacaagtgtttatctgatcagttatgtactgtttataataagtaaatcagcagagggggaataatacttagaacctatagagagtaaatctgacaagatgaaatgctgatgaaaatatggaggaaatgaaactctcatgggttttgcagggaatctaagtcagtgctgtgttgtgaatgtaggtgtaccctttgaattcatatgttgaatcctaacccccaaagcaatggcattaagaggtggggcctttggggctgggtatggtggctcatgactgtaatcccagcactttgggatgctggcagggggcagatcacttgaagccaggagtctgagatcagcctggccaacatggtgaaaccccatctgtactaaaaatacaaaaattagccaggtgtgatggcgtacatctgtaatttcagccactcgggaggctgagacaggagaatagcttgaacccagtaggtggagatttcagtgagccgagatcgtgccactgcactccagcctgggtgacagagcgagactccatctcaaaaaaataataaagatgtggggcctgtgggaggtggttaggtcatgagggtggagatcatgaatggggttagcaccttataaaacaggcttgagggagcccttctgtcccttctaccatgtgtggatgcagtgagaaggcaccgtatctctgaagcagagagcccgccctggacactggatctgctggcaccttgatcttggacttcccagcctctagaactgtgagaaataattttttgttgtttacaaattacccaggctaaggtgtttcattgtaacctgaatggaccaagctggtgtgaccctgttggaaaactggcagtatctaccaaaagccgaacatacgtataaactgatccagcagttccactcctgggtatgtacaccacagaaagctatgtccaccgagacattggcaagaatgtttctaaccacacgctgactgtagccccaaacctgaaacaacccaaatgtccatccaccaacccaaatgtccatccacagttgaagctacagtgaagtcacagggtcgaatactactgcacagcaacgaatatgaatgaaaatatcgctatgcacagcaacatggataaatttcacagacatgaggtcaagcaaaagaggtcagagtcctcatcatcaagagagaattcattgtatgattctcttcctacaaaaagtacagaaataagcaaaactgatccatggtgttagaagccaggggaacagttaacaggggagggatactggggaggggcatcctggagtgctggtctacctcatctgggtgttgatttcacgagtattgtcagtttgtttccagactccctgttggagatgtggaaataaaaaccacctaaacaagagcagagaggccatttggtcaaagtttgcaaaggagtcagccatgattgcttgtatttggcaggggtcaaaggcaggcagggactgtgaaatgttatagtggaaaaaaagggaaggctctgggtgtgctgtgattggagattgttggcatggggacagagcggactaactggaggggcatctttggttggttgggggggtatatttggctttctctggttggtctggagttggaagagggggtgtggtggctggggattgggaagaagctggcagccactaagttcagactgttctgggtccgattgctgctgaggctgtggtttggcttccttggcttcccaggctggttatgggtttctggccagagtctattgtcatatgtggcctggccattgtccagttgtatgttcagtctcttggaaggaagggtattgactctgagaggggccaccatcgctggaatgggggacacacagtacttcctccagctgcctacacccccctagggtcagtggcgcctgcctgtgagggtgagcccaatggctagagggctctgctccaagtcattgcttactacacccacaaacattcttcgttctttaaggcctaacttaaagcccagatcctacaggaaaccttgattagacccctctctttattaagcttcctaagatcaaaccctgcttttgtgtaaatgctgacctccttgcctacattttaaaaacctagagctgggcatgatggccccagcctgtaatcccagtgattcaggagactgaggtgggaggattgctagaagccaggagttcgagaccagcctgggtaacatagctagaccacatctcttaaaataaaatagttaatttagccaggcatgatgatatatgcctgtagtcccaactacttggaaggctgaggtgtgaggatctttgagcccgggaggtcgaggctacagtaagctatgatctcaccactgtactccagcctgggtgacagagcgagacccagactcaaaaaataaaaataaaaaccctgaatatcttccttctgcaaaaaaaaaaaaaaaaaaaaaaaaaaaaaaaaaaaaaaatctaggagatgctctttaccctgcctggcctcaaactattaatagcttcctttgagcaacattatttattatgaactttcaaacacaaaaaagtagagatagaataacaaatccccatgactccatctacccatctggaccactat

SEQ ID NO: 437632 - DNA, 7793 bp, Homo sapiens
gcgggaagggtcctgggccccgggcggcggtcgccaggtctcagggccgggggtacccgagtctcgtttcctctcagtccatccacccttcatggggccagagccctctctccagaatctgagcagcaatgccgtttgctgaagacaagacctataagtatatctgccgcaatttcagcaatttttgcaatgtggatgttgtagagattctgccttacctgccctgcctcacagcaagagaccaggatcgactgcgggccacctgcacactctcagggaaccgggacaccctctggcatctcttcaatacccttcagcggcggcccggctgggtggagtacttcattgcggcactgaggggctgtgagctagttgatctcgcggacgaagtggcctctgtctaccagagctaccagcctcggacctcggaccgtcccccagacccactggagccaccgtcacttcctgctgagaggccagggccccccacacctgctgcggcccacagcatcccctacaacagctgcagagagaaggagccaagttaccccatgcctgtccaggagacccaggcgccagagtccccaggagagaattcagagcaagccctgcagacgctcagccccagagccatcccaaggaatccagatggtggccccctggagtcctcctctgacctggcagccctcagccctctgacctccagcgggcatcaggagcaggacacagaactgggcagtacccacacagcaggtgcgacctccagcctcacaccatcccgtgggcctgtgtctccatctgtctccttccagcccctggcccgttccacccccagggcaagccgcttgcctggacccacagggtcagttgtatctactggcacctccttctcctcctcatcccctggcttggcctctgcaggggctgcagagggtaaacagggtgcagagagtgaccaggccgagcctatcatctgctccagtggggcagaggcacctgccaactctctgccctccaaagtgcctaccaccttgatgcctgtgaacacagtggccctgaaagtgcctgccaacccagcatctgtcagcacagtgccctccaagttgccaactagctcaaagccccctggtgcagtgccttctaatgcgctcaccaatccagcaccatccaaattgcccatcaactcaacccgtgctggcatggtgccatccaaagtgcctactagcatggtgctcaccaaggtgtctgccagcacagtccccactgacgggagcagcagaaatgaggagaccccagcagctccaacacccgccggcgccactggaggcagctcagcctggctagacagcagctctgagaataggggccttgggtcggagctgagtaagcctggcgtgctggcatcccaggtagacagcccgttctcgggctgcttcgaggatcttgccatcagtgccagcacctccttgggcatggggccctgccatggcccagaggagaatgagtataagtccgagggcacctttgggatccacgtggctgagaaccccagcatccagctcctggagggcaaccctgggccacctgcggacccggatggcggccccaggccacaagccgaccggaagttccaggagagggaggtgccatgccacaggccctcacctggggctctgtggctccaggtggctgtgacaggggtgctggtagtcacactcctggtggtgctgtaccggcggcgtctgcactagtgaagccctgggctcttcccaccacccatctgttccgttcctgcagtatacctggcccctctccgaagccccttgtccctttcttggggattgtggaggctgggtcagaggggagttaagggactgcaggcctggcagcaggacatgccttggctgaaccaagtcctgagagcagcatctctgtccccacggtgccttgtgtgggtccccgtccttggctttctgggtcctgggctgcccccagtgctccagaccttccccactggcaatccaggttatcatccatgtcctccagaggagcttcctcctccaggcctcagccctgttggcccaggtggagcaggagggaccactggaacatgtggtgcttgggaatgcctctcctgttgcattggtccctgaaggcctcagggcaggtatgtggtgtgtgggcgactccacaagacctgcctcccatcctggcagcccagcctgagaccgttgcattgaggcaggcaggagcggcagggtggctgctctccaggagcccaactgccttgagttcctgccccactgggccccctcccctgctgggcaatcctgggaaggtctggaggttcctgtggacctcagggaagccaggggcagctgtcaggcctgaggaagacctgtggagctcctctccagcctcctctttccctcccctctggtctccattctcttcagctccctacatgggctggggaggagacacctggtgggcagagctcaggcagaggtttggatttcagctccctcacttccggggctgtgtggctttggcagatgtcagacttctggtcttgcttctccacgtggacagtgagtatctggctcattcttcactgggttcttctgagattgaacctacaggtgtttgccaagtgcctggcccagagcaagtggccactgcttctcccatctctctcctgcccaacctggtagagctgagggcatgagaggcagagtgcacagtggtcaagggtgcagctctgcagcacaggcagcctaggcctgcgtcccaacctgcctctcaccagctctgtgaccttgggcaagggatttatctgtctgtcccttagttttctcacctgtaaaaggaggataagtatatatatatatttcccagtgttgtgaagattaaaggagtttatcgatgtaggtcttaggatgagtcctggcatttaccaagggttggatatatgttattatcactattaagtgttgagggtccaggcatgctgggcaacagggaccccatctctacaaaaaagtttaaaaaattagccaggcgtggtggtgcacctgtcgtcttagctacttgggaggctgaggtgggaggatcacttgagcccagaagcttgaagctgcagtgagctaggatcgtgccactgcactccaacctgggtgagagagcgagaccctgtctcaagaaaaagaaaaatgcagagaaacaggagtcttggctactcctttagaggcagactcagaccctcctgcctcacagctttatctttgtatttgccccttactttatcttgtgccttgagaaattgctggggagagaggtatgtccactgggcagctgtacaggatggaggatatagggcgtttccactcccagcagccaggttccctcaccccaagctcacccactgttggggagattatctacaataacaccagaaacacattggggtggattgggggtatccttatgggttcttttcagggaaccattgctggacaaggcacaggagccacctccatttctgagctctgcaagggacaagaactagagccatcaggggctgggctcactgtggccccaccccaagccgtcagcctccagggatctacaccctgccttggctgctacagctttttcactccactgccctaggggagttcagcaacctaatgatctctatctctgaacatctcttcatcccatgctccaagtccagcaacctgcaccctggaaccaggagtggaccctacccgagctgtctgtattaatccccatcccccaccaccaatcttaaaaagccctctgtccccctaccctaaaccccagttaggtacccatgctgggcaggtcagttaacaatttatgcacaggtactagttttattgtattaccgttccagggtagctttgaaaaaagtatctcaaaaaggcaacaccaccgcgcccagccaaattaaattttttatagagatgaggtcatgctgttatgttgcccaggttggcctcatgagatcttgccttagcctcccaaagtgctgggattacagatgtgagacactgcacccaaaccccaccacttttttttttcctttttctttttttgagacagtcttactccgttgcccaggctggagtgtagtggcatgatctcagctcactgcaacctccgcctcccgggttcaagcaattctcctgcctcagcctcccgagtagctgggattacagaggcctgccaccacacccgactaattttcgtatttttagtagagacggggtttctccatgttggccaggctgttcttgaactcctgacctcaagtgctccacctgcgttggcttcccaaagtgctgggatacaggagtgagccactgcgcctggctgatcccagcacttttcaaatgatgccgctcaaagccgtgacttggcctactttgaacagcaaacttgttgctgctgttgtcaacctgaaggcctctcaaatgccagcttcaagcagggtgtgaattggccagtgtcagatctcaggagtcctgtgttgagagtgtggctttcagctgcggggagctgcacttggtggggaaagccaggcaggtcaccctcacagccagataatgtggaggtcagaacccaaggaagggagtgagacctccactcccagtgggggacctggccacccatccttggggacctgagaaagcgtacttcaccttggggtgaaggctgggtggggccagagggaccagtgccctcctcagtgcttaggggcagagccacctgcagcaatggtatctgcatattagcccctctccaccttctttctcccgctgaatcatttccctcaaagcccaagagctgtcactgcttctttctccctgggaagaatgcgtggactctgcctggtgatagactgaagccagaacagtgccacaccctcgccttaattccttgctaggtgttctcagatttatgagacttcttagtcaaatatgagggaggttggatgtggtggcttgtgcctgtaatcccagcattttgggaggccgaggtgggaggatcccttgaagccaggagtttgagacaagcctgggcaacaaagcaagaccctatctctaaaaaaaaaaaaaaaaaaaaatctaggagatgctctttaccctgcctggcctcaaactattaatagcttcctttgagcaacattatttattatgaactttcaaacacaaaaaagtagagagagtagaataacaaatccccatgagcccatcacccaacttcagtaattatcaattcatggccatcttgttcacccctgcctgcttccctgcttcccctcattctgcagaggttcttttcttttgagacagagtgttgctctgttgcccaggctggagtgcagtggtgcaacttcggctcactgcaacctccgcctcccaggttcaagtgattctcctgcttcagcctctcaagtagctgggattacagatgcccgccaccacacctggctaattttcgtatttttgttagagatggggtttcaccatgttggccaggctggtctcgaactcctgacctcaagtgatccgcccgccttggcctcccaaaatgctgggattacaggtgtgaaccacggtgcctggccactgtacaggttatttatagaagttggagagtgaagggttgagaaagccaaggggcagatgcgggtctggaggattttgtgcctaaggccctctctttgctcccagacagcatgaagtaacaatgaggcatccacctcttggttttgtggcctctgtggatgacgtctctcaccttgaaccagttcagagttggagtagcgcaggatcctgtcttcagaggaggggccgaagcgggttcctctgttgtcaagctctttggaggtgcctggctgctactactgtcccagagaggctaaggtgtttcattgtaacctgaatggaccaagctggtgtgaccctgttggaaaactggcagtatctaccaaaagccgaacatacgtataaactgatccagcagttccactcctgggtatgtacaccacagaaagctatgtccaccgagacattggcaagaatgtttctaaccacacgctgactgtagccccaaacctgaaacaacccaaatgtccatccaccaacccaaatgtccatccacagttgaagctacagtgaagtcacagggtcgaatactactgcacagcaacgaatatgaatgaaaatatcgctatgcacagcaacatggataaatttcacagacatgaggtcaagcaaaagaggtcagagtcctcatcatcaagagagaattcattgtatgattctcttcctacaaaaagtacagaaataagcaaaactgatccatggtgttagaagccaggggaacagttaacaggggagggatactggggaggggcatcctggagtgctggtctacctcatctgggtgttgatttcacgagtattgtcagtttgtttccagactccctgttggagatgtggaaataaaaaccacctaaacaagagcagagaggccatttggtcaaagtttgcaaaggagtcagccatgattgcttgtatttggcaggggtcaaaggcaggcagggactgtgaaatgttatagtggaaaaaaagggaaggctctgggtgtgctgtgattggagattgttggcatggggacagagcggactaactggaggggcatctttggttggttgggggggtatatttggctttctctggttggtctggagttggaagagggggtgtggtggctggggattgggaagaagctggcagccactaagttcagactgttctgggtccgattgctgctgaggctgtggtttggcttccttggcttcccaggctggttatgggtttctggccagagtctattgtcatatgtggcctggccattgtccagttgtatgttcagtctcttggaaggaagggtattgactctgagaggggccaccatcgctggaatgggggacacacagtacttcctccagctgcctacacccccctagggtcagtggcgcctgcctgtgagggtgagcccaatggctagagggctctgctccaagtcattgcttactacacccacaaacattcttcgttctttaaggcctaacttaaagcccagatcctacaggaaaccttgattagacccctctctttattaagcttcctaagatcaaaccctgcttttgtgtaaatgctgacctccttgcctacattttaaaaacctagagctgggcatgatggccccagcctgtaatcccagtgattcaggagactgaggtgggaggattgctagaagccaggagttcgagaccagcctgggtaacatagctagaccacatctcttaaaataaaatagttaatttagccaggcatgatgatatatgcctgtagtcccaactacttggaaggctgaggtgtgaggatctttgagcccgggaggtcgaggctacagtaagctatgatctcaccactgtactccagcctgggtgacagagcgagacccagactcaaaaaataaaaataaaaaccctgaatatcttccttctgcaaaaaaaaaaaaaaaaaaaaaaaaaaaaaaaaaaaaaaatctaggagatgctctttaccctgcctggcctcaaactattaatagcttcctttgagcaacattatttattatgaactttcaaacacaaaaaagtagagatagaataacaaatccccatgactccatctacccatctggaccactat

SEQ ID NO: 437633 - DNA, 7652 bp, Homo sapiens
gcgggaagggtcctgggccccgggcggcggtcgccaggtctcagggccgggggtacccgagtctcgtttcctctcagtccatccacccttcatggggccagagccctctctccagaatctgagcagcaatgccgtttgctgaagacaagacctataagtatatctgccgcaatttcagcaatttttgcaatgtggatgttgtagagattctgccttacctgccctgcctcacagcaagagaccaggatcgactgcgggccacctgcacactctcagggaaccgggacaccctctggcatctcttcaatacccttcagcggcggcccggctgggtggagtacttcattgcggcactgaggggctgtgagctagttgatctcgcggacgaagtggcctctgtctaccagagctaccagcctcggacctcggaccgtcccccagacccactggagccaccgtcacttcctgctgagaggccagggccccccacacctgctgcggcccacagcatcccctacaacagctgcagagagaaggagccaagttaccccatgcctgtccaggagacccaggcgccagagtccccaggagagaattcagagcaagccctgcagacgctcagccccagagccatcccaaggaatccagatggtggccccctggagtcctcctctgacctggcagccctcagccctctgacctccagcgggcatcaggagcaggacacagaactgggcagtacccacacagcaggtgcgacctccagcctcacaccatcccgtgggcctgtgtctccatctgtctccttccagcccctggcccgttccacccccagggcaagccgcttgcctggacccacagggtcagttgtatctactggcacctccttctcctcctcatcccctggcttggcctctgcaggggctgcagagggtaaacagggtgcagagagtgaccaggccgagcctatcatctgctccagtggggcagaggcacctgccaactctctgccctccaaagtgcctaccaccttgatgcctgtgaacacagtggccctgaaagtgcctgccaacccagcatctgtcagcacagtgccctccaagttgccaactagctcaaagccccctggtgcagtgccttctaatgcgctcaccaatccagcaccatccaaattgcccatcaactcaacccgtgctggcatggtgccatccaaagtgcctactagcatggtgctcaccaaggtgtctgccagcacagtccccactgacgggagcagcagaaatgaggagaccccagcagctccaacacccgccggcgccactggaggcagctcagcctggctagacagcagctctgagaataggggccttgggtcggagctgagtaagcctggcgtgctggcatcccaggtagacagcccgttctcgggctgcttcgaggatcttgccatcagtgccagcacctccttgggcatggggccctgccatggcccagaggagaatgagtataagtccgagggcacctttgggatccacgtggctgagaaccccagcatccagctcctggagggcaaccctgggccacctgcggacccggatggcggccccaggccacaagccgaccggaagttccaggagagggaggtgccatgccacaggccctcacctggggctctgtggctccaggtggctgtgacaggggtgctggtagtcacactcctggtggtgctgtaccggcggcgtctgcactagtgaagccctgggctcttcccaccacccatctgttccgttcctgcagtatacctggcccctctccgaagccccttgtccctttcttggggattgtggaggctgggtcagaggggagttaagggactgcaggcctggcagcaggacatgccttggctgaaccaagtcctgagagcagcatctctgtccccacggtgccttgtgtgggtccccgtccttggctttctgggtcctgggctgcccccagtgctccagaccttccccactggcaatccaggttatcatccatgtcctccagaggagcttcctcctccaggcctcagccctgttggcccaggtggagcaggagggaccactggaacatgtggtgcttgggaatgcctctcctgttgcattggtccctgaaggcctcagggcaggtatgtggtgtgtgggcgactccacaagacctgcctcccatcctggcagcccagcctgagaccgttgcattgaggcaggcaggagcggcagggtggctgctctccaggagcccaactgccttgagttcctgccccactgggccccctcccctgctgggcaatcctgggaaggtctggaggttcctgtggacctcagggaagccaggggcagctgtcaggcctgaggaagacctgtggagctcctctccagcctcctctttccctcccctctggtctccattctcttcagctccctacatgggctggggaggagacacctggtgggcagagctcaggcagaggtttggatttcagctccctcacttccggggctgtgtggctttggcagatgtcagacttctggtcttgcttctccacgtggacagtgagtatctggctcattcttcactgggttcttctgagattgaacctacaggtgtttgccaagtgcctggcccagagcaagtggccactgcttctcccatctctctcctgcccaacctggtagagctgagggcatgagaggcagagtgcacagtggtcaagggtgcagctctgcagcacaggcagcctaggcctgcgtcccaacctgcctctcaccagctctgtgaccttgggcaagggatttatctgtctgtcccttagttttctcacctgtaaaaggaggataagtatatatatatatttcccagtgttgtgaagattaaaggagtttatcgatgtaggtcttaggatgagtcctggcatttaccaagggttggatatatgttattatcactattaagtgttgagggtccaggcatgctgggcaacagggaccccatctctacaaaaaagtttaaaaaattagccaggcgtggtggtgcacctgtcgtcttagctacttgggaggctgaggtgggaggatcacttgagcccagaagcttgaagctgcagtgagctaggatcgtgccactgcactccaacctgggtgagagagcgagaccctgtctcaagaaaaagaaaaatgcagagaaacaggagtcttggctactcctttagaggcagactcagaccctcctgcctcacagctttatctttgtatttgccccttactttatcttgtgccttgagaaattgctggggagagaggtatgtccactgggcagctgtacaggatggaggatatagggcgtttccactcccagcagccaggttccctcaccccaagctcacccactgttggggagattatctacaataacaccagaaacacattggggtggattgggggtatccttatgggttcttttcagggaaccattgctggacaaggcacaggagccacctccatttctgagctctgcaagggacaagaactagagccatcaggggctgggctcactgtggccccaccccaagccgtcagcctccagggatctacaccctgccttggctgctacagctttttcactccactgccctaggggagttcagcaacctaatgatctctatctctgaacatctcttcatcccatgctccaagtccagcaacctgcaccctggaaccaggagtggaccctacccgagctgtctgtattaatccccatcccccaccaccaatcttaaaaagccctctgtccccctaccctaaaccccagttaggtacccatgctgggcaggtcagttaacaatttatgcacaggtactagttttattgtattaccgttccagggtagctttgaaaaaagtatctcaaaaaggcaacaccaccgcgcccagccaaattaaattttttatagagatgaggtcatgctgttatgttgcccaggttggcctcatgagatcttgccttagcctcccaaagtgctgggattacagatgtgagacactgcacccaaaccccaccacttttttttttcctttttctttttttgagacagtcttactccgttgcccaggctggagtgtagtggcatgatctcagctcactgcaacctccgcctcccgggttcaagcaattctcctgcctcagcctcccgagtagctgggattacagaggcctgccaccacacccgactaattttcgtatttttagtagagacggggtttctccatgttggccaggctgttcttgaactcctgacctcaagtgctccacctgcgttggcttcccaaagtgctgggatacaggagtgagccactgcgcctggctgatcccagcacttttcaaatgatgccgctcaaagccgtgacttggcctactttgaacagcaaacttgttgctgctgttgtcaacctgaaggcctctcaaatgccagcttcaagcagggtgtgaattggccagtgtcagatctcaggagtcctgtgttgagagtgtggctttcagctgcggggagctgcacttggtggggaaagccaggcaggtcaccctcacagccagataatgtggaggtcagaacccaaggaagggagtgagacctccactcccagtgggggacctggccacccatccttggggacctgagaaagcgtacttcaccttggggtgaaggctgggtggggccagagggaccagtgccctcctcagtgcttaggggcagagccacctgcagcaatggtatctgcatattagcccctctccaccttctttctcccgctgaatcatttccctcaaagcccaagagctgtcactgcttctttctccctgggaagaatgcgtggactctgcctggtgatagactgaagccagaacagtgccacaccctcgccttaattccttgctaggtgttctcagatttatgagacttcttagtcaaatatgagggaggttggatgtggtggcttgtgcctgtaatcccagcattttgggaggccgaggtgggaggatcccttgaagccaggagtttgagacaagcctgggcaacaaagcaagaccctatctctaaaaaaaaaaaaaaaaaaaaatctaggagatgctctttaccctgcctggcctcaaactattaatagcttcctttgagcaacattatttattatgaactttcaaacacaaaaaagtagagagagtagaataacaaatccccatgagcccatcacccaacttcagtaattatcaattcatggccatcttgttcacccctgcctgcttccctgcttcccctcattctgcagaggttcttttcttttgagacagagtgttgctctgttgcccaggctggagtgcagtggtgcaacttcggctcactgcaacctccgcctcccaggttcaagtgattctcctgcttcagcctctcaagtagctgggattacagatgcccgccaccacacctggctaattttcgtatttttgttagagatggggtttcaccatgttggccaggctggtctcgaactcctgacctcaagtgatccgcccgccttggcctcccaaaatgctgggattacaggtgtgaaccacggtgcctggccactgtacaggttatttatagaagttggagagtgaagggttgagaaagccaaggggcagatgcgggtctggaggattttgtgcctaaggccctctctttgctcccagacagcatgaagtaacaatgaggcatccacctcttggttttgtggcctctgtggatgacgtctctcaccttgaaccagttcagagttggagtagcgcaggatcctgtcttcagaggaggggccgaagcgggttcctctgttgtcaagctctttggaggtgcctggctgctactactgtcccagagaggtgatgatgaatgatgggtgtgtccagtggcagtttgccccactgaggcaggggcttccactaggccctgacagagcccttccagcaggcagaaatccctgtgctaggcaagattcaaactccgtagcatgtctcctgctcccatctcttaggaatggagtccttcaggccttgagtcccacattttccatgatgctccattaagcagctgatagcacccccacctccagggaaagtgagttcagagtccttggtctaatgcatctgtgttgaaattgaggccttcccctgtgttcacctttctgctctttttcttttagcccaaggctatgaaggcctcattcggtgctgggcatggtcactcctagcattcctcactctgttgctaacagcaacagcaataataataagggttacaacttactccataccttactgtctgccaggcattaagctaagtgctttacatatattaagtcatttaatcctcataatgaccctatgaaagagataccatctcaacccaattgacagctggtttgcaagattaggagggatgaaggacccaggggacaatgcgagggaaaactctgaccccggggccccaggctggatgttctttatgcctgtgaaccacagcttatcacatgtctggagttagggaccccacttaaagtgagattttggctggaggtggtggatcatacctataatcccagcactttgggaagaagctggcagccactaagttcagactgttctgggtccgattgctgctgaggctgtggtttggcttccttggcttcccaggctggttatgggtttctggccagagtctattgtcatatgtggcctggccattgtccagttgtatgttcagtctcttggaaggaagggtattgactctgagaggggccaccatcgctggaatgggggacacacagtacttcctccagctgcctacacccccctagggtcagtggcgcctgcctgtgagggtgagcccaatggctagagggctctgctccaagtcattgcttactacacccacaaacattcttcgttctttaaggcctaacttaaagcccagatcctacaggaaaccttgattagacccctctctttattaagcttcctaagatcaaaccctgcttttgtgtaaatgctgacctccttgcctacattttaaaaacctagagctgggcatgatggccccagcctgtaatcccagtgattcaggagactgaggtgggaggattgctagaagccaggagttcgagaccagcctgggtaacatagctagaccacatctcttaaaataaaatagttaatttagccaggcatgatgatatatgcctgtagtcccaactacttggaaggctgaggtgtgaggatctttgagcccgggaggtcgaggctacagtaagctatgatctcaccactgtactccagcctgggtgacagagcgagacccagactcaaaaaataaaaataaaaaccctgaatatcttccttctgcaaaaaaaaaaaaaaaaaaaaaaaaaaaaaaaaaaaaaaatctaggagatgctctttaccctgcctggcctcaaactattaatagcttcctttgagcaacattatttattatgaactttcaaacacaaaaaagtagagatagaataacaaatccccatgactccatctacccatctggaccactat

SEQ ID NO: 437634 - DNA, 7943 bp, Homo sapiens
gcggccgccggggtcggcagcctggggctccgctgatctagggcaacgagcgggggacgcttcgagcccgcagcgagagtgaccagcatggtccctgccggcagctcggggccggagggttttgactgcaaggccagcccacgccgagggtccaagcatcgggatatgccgccagcacctggctgctgcagcaccgcgctggacatgagcgctccgcccaacccgacggcgtcagctggcgcgcgcgcccgcgaccgacgtgcgcaggcgcccacgggccgcgcagccgccattgctctcctgccacggaggggagcgcttggtggcagtccgcgggcccggacggaaggctgaggcgacgcctcgacgacagcggaccggagctgcaggggcaacacattcagggcggggtgccccatttaggcctggctgaccggagtaagaaactacaacccccgaagtgccttgcgcctcaaggttacggaggcagtgaccacccaccctggagccatggtccacgccttcctcattcacaccttgagggccccgaatactgaggacacgggcctttgccgagtgctgtactcctgcgtcttcggtgctgagaagtcacctgatgacccacggccgcatggtgccgagagggacaggcttctccggaaggaacagattttagctgtggccaggcaggtagagtcaatgtgtcggctgcagcagcaggcatctggccggccccccatggacctgcagccgcaatcctcagatgagcaagtgccgctgcacgaggccccacgtggggctttccgcctggcagcagagaaccctttccaggagccacggacggtggtgtggctgggcgtgctctcgttaggctttgccctggtgctggatgcccatgagaacctgctactggctgagggcacgctccggctgctgacacgcctcctccttgaccacctccggctgctggcgcccagcaccagccttctgctgcgggctgaccgcattgagggcatcctcacccgcttcctgccacatggtcagctgcttttcctcaacgaccagtttgtccaaggcctggagaaggaattcagtgccgcttggccccgctgattcctcgttgggatggtgcttctgagggcaggcagagggtagacacacagccagatgaagcttggcatctccctcctacccagcagctctgatgtgctgctataccaggacaagtgggtgacacaagcctgcagaaagggggctgggcagagggtggaggaggtcctgcctgtcctcaggttagtggaaccacagaacttcctgagcctagagctgctgtgttacttagaccgctgccgtgcggcagccacgcttgtccttgaacccaccttcctccatccctgccagccgatagtgctagggtgaggagctgcctggagctcaccccgctcttcttccaaacccacagtcaaggccaggcgcggtggctcacgcctgtaatcccagcactttgcggggctgaggtggttggaccacctcaggtcgggagttcaagaccagcctggccaacatagtgaaaccccatctctactaaaaatacaaaaattagctgggtgtatggcgcccacctgtaatcctagctgctcagggggctgagtcatgggaatcacttgaacctgggaggcagagtttgcagtgagccgagagtgcgccacttcactccagcctgggtgaccgagtgatactctgtctcaaagaaaaaaaattataattttagcacagtaaccagccatgatgggagataccctgggtaaggcatgtagaaagggttgagggaccttcccagtcccctagccccgcctcccatcctcccatctttttcttttttcttttttttagagaatcacccagcctggagcgaagtggtgcaatcataactcactgtatccttaaactcccgggcttaagcgatcctcctgcctcagccttctgagtaactaggacttcaggtacctaacctccgcctcccgggttcaagcaattctcctgcctcagcctcccgagtagctgggattacagaggcctgccaccacacccgactaattttcgtatttttagtagagacggggtttctccatgttggccaggctgttcttgaactcctgacctcaagtgctccacctgcgttggcttcccaaagtgctgggatacaggagtgagccactgcgcctggctgatcccagcacttttcaaatgatgccgctcaaagccgtgacttggcctactttgaacagcaaacttgttgctgctgttgtcaacctgaaggcctctcaaatgccagcttcaagcagggtgtgaattggccagtgtcagatctcaggagtcctgtgttgagagtgtggctttcagctgcggggagctgcacttggtggggaaagccaggcaggtcaccctcacagccagataatgtggaggtcagaacccaaggaagggagtgagacctccactcccagtgggggacctggccacccatccttggggacctgagaaagcgtacttcaccttggggtgaaggctgggtggggccagagggaccagtgccctcctcagtgcttaggggcagagccacctgcagcaatggtatctgcatattagcccctctccaccttctttctcccgctgaatcatttccctcaaagcccaagagctgtcactgcttctttctccctgggaagaatgcgtggactctgcctggtgatagactgaagccagaacagtgccacaccctcgccttaattccttgctaggtgttctcagatttatgagacttcttagtcaaatatgagggaggttggatgtggtggcttgtgcctgtaatcccagcattttgggaggccgaggtgggaggatcccttgaagccaggagtttgagacaagcctgggcaacaaagcaagaccctatctctaaaaaaaaaaaaaaaaaaaaatctaggagatgctctttaccctgcctggcctcaaactattaatagcttcctttgagcaacattatttattatgaactttcaaacacaaaaaagtagagagagtagaataacaaatccccatgagcccatcacccaacttcagtaattatcaattcatggccatcttgttcacccctgcctgcttccctgcttcccctcattctgcagaggttcttttcttttgagacagagtgttgctctgttgcccaggctggagtgcagtggtgcaacttcggctcactgcaacctccgcctcccaggttcaagtgattctcctgcttcagcctctcaagtagctgggattacagatgcccgccaccacacctggctaattttcgtatttttgttagagatggggtttcaccatgttggccaggctggtctcgaactcctgacctcaagtgatccgcccgccttggcctcccaaaatgctgggattacaggtgtgaaccacggtgcctggccactgtacaggttatttatagaagttggagagtgaagggttgagaaagccaaggggcagatgcgggtctggaggattttgtgcctaaggccctctctttgctcccagacagcatgaagtaacaatgaggcatccacctcttggttttgtggcctctgtggatgacgtctctcaccttgaaccagttcagagttggagtagcgcaggatcctgtcttcagaggaggggccgaagcgggttcctctgttgtcaagctctttggaggtgcctggctgctactactgtcccagagaggtgatgatgaatgatgggtgtgtccagtggcagtttgccccactgaggcaggggcttccactaggccctgacagagcccttccagcaggcagaaatccctgtgctaggcaagattcaaactccgtagcatgtctcctgctcccatctcttaggaatggagtccttcaggccttgagtcccacattttccatgatgctccattaagcagctgatagcacccccacctccagggaaagtgagttcagagtccttggtctaatgcatctgtgttgaaattgaggccttcccctgtgttcacctttctgctctttttcttttagcccaaggctatgaaggcctcattcggtgctgggcatggtcactcctagcattcctcactctgttgctaacagcaacagcaataataataagggttacaacttactccataccttactgtctgccaggcattaagctaagtgctttacatatattaagtcatttaatcctcataatgaccctatgaaagagataccatctcaacccaattgacagctggtttgcaagattaggagggatgaaggacccaggggacaatgcgagggaaaactctgaccccggggccccaggctggatgttctttatgcctgtgaaccacagcttatcacatgtctggagttagggaccccacttaaagtgagattttggctggaggtggtggatcatacctataatcccagcactttgggagaccaaggcagaaggactgcttgaggccaggagttcaaaaccagtgtaggtaacagctagaccctatctctacaaaaaatttaaaaattagctgggtgtggtggtatgtgcctcaagttccagctactcaggaggctgaggtgggaggatcacttgagcacaggagtttgaagttacagtgagctatgatggcaccactgcacttcagcctaggcaacagagggagaccctgtctttaaagtacatagaggtttttcacaccaacacatctctgcccagtgtgccaacatctgccacctgctataatagtactataacactcaatatgtaattaatgtagtctcagggatgttatgacaatatgattacaactatcacgtgtgtgcccagccaggctcaatgccccaggctgggcgaggtggggcaggggacacagcctaaaatgccaggcctcaggaagccatttggtttagcagacattgtttattaaaggagttacctatgccagatcgaaggcctaagatgattaagacactatgagtgccttcaagtggttggggacgttcatgattgtggtacagacaaataggctttcacatcattcttttatgtaatcatacaacagatatttgcacctacatgtgcagagcactgtgataggcctcagtgacacagaataatacggcaaagaccccacccgatgagccccctcccaccacccaccagtacagtagggggtggtttaatggagtgttcctggaatatgaagtgggggcaggcattaggggtggcaaagggacaagtgtttatctgatcagttatgtactgtttataataagtaaatcagcagagggggaataatacttagaacctatagagagtaaatctgacaagatgaaatgctgatgaaaatatggaggaaatgaaactctcatgggttttgcagggaatctaagtcagtgctgtgttgtgaatgtaggtgtaccctttgaattcatatgttgaatcctaacccccaaagcaatggcattaagaggtggggcctttggggctgggtatggtggctcatgactgtaatcccagcactttgggatgctggcagggggcagatcacttgaagccaggagtctgagatcagcctggccaacatggtgaaaccccatctgtactaaaaatacaaaaattagccaggtgtgatggcgtacatctgtaatttcagccactcgggaggctgagacaggagaatagcttgaacccagtaggtggagatttcagtgagccgagatcgtgccactgcactccagcctgggtgacagagcgagactccatctcaaaaaaataataaagatgtggggcctgtgggaggtggttaggtcatgagggtggagatcatgaatggggttagcaccttataaaacaggcttgagggagcccttctgtcccttctaccatgtgtggatgcagtgagaaggcaccgtatctctgaagcagagagcccgccctggacactggatctgctggcaccttgatcttggacttcccagcctctagaactgtgagaaataattttttgttgtttacaaattacccaggctaaggtgtttcattgtaacctgaatggaccaagctggtgtgaccctgttggaaaactggcagtatctaccaaaagccgaacatacgtataaactgatccagcagttccactcctgggtatgtacaccacagaaagctatgtccaccgagacattggcaagaatgtttctaaccacacgctgactgtagccccaaacctgaaacaacccaaatgtccatccaccaacccaaatgtccatccacagttgaagctacagtgaagtcacagggtcgaatactactgcacagcaacgaatatgaatgaaaatatcgctatgcacagcaacatggataaatttcacagacatgaggtcaagcaaaagaggtcagagtcctcatcatcaagagagaattcattgtatgattctcttcctacaaaaagtacagaaataagcaaaactgatccatggtgttagaagccaggggaacagttaacaggggagggatactggggaggggcatcctggagtgctggtctacctcatctgggtgttgatttcacgagtattgtcagtttgtttccagactccctgttggagatgtggaaataaaaaccacctaaacaagagcagagaggccatttggtcaaagtttgcaaaggagtcagccatgattgcttgtatttggcaggggtcaaaggcaggcagggactgtgaaatgttatagtggaaaaaaagggaaggctctgggtgtgctgtgattggagattgttggcatggggacagagcggactaactggaggggcatctttggttggttgggggggtatatttggctttctctggttggtctggagttggaagagggggtgtggtggctggggattgggaagaagctggcagccactaagttcagactgttctgggtccgattgctgctgaggctgtggtttggcttccttggcttcccaggctggttatgggtttctggccagagtctattgtcatatgtggcctggccattgtccagttgtatgttcagtctcttggaaggaagggtattgactctgagaggggccaccatcgctggaatgggggacacacagtacttcctccagctgcctacacccccctagggtcagtggcgcctgcctgtgagggtgagcccaatggctagagggctctgctccaagtcattgcttactacacccacaaacattcttcgttctttaaggcctaacttaaagcccagatcctacaggaaaccttgattagacccctctctttattaagcttcctaagatcaaaccctgcttttgtgtaaatgctgacctccttgcctacattttaaaaacctagagctgggcatgatggccccagcctgtaatcccagtgattcaggagactgaggtgggaggattgctagaagccaggagttcgagaccagcctgggtaacatagctagaccacatctcttaaaataaaatagttaatttagccaggcatgatgatatatgcctgtagtcccaactacttggaaggctgaggtgtgaggatctttgagcccgggaggtcgaggctacagtaagctatgatctcaccactgtactccagcctgggtgacagagcgagacccagactcaaaaaataaaaataaaaaccctgaatatcttccttctgcaaaaaaaaaaaaaaaaaaaaaaaaaaaaaaaaaaaaaaatctaggagatgctctttaccctgcctggcctcaaactattaatagcttcctttgagcaacattatttattatgaactttcaaacacaaaaaagtagagatagaataacaaatccccatgactccatctacccatctggaccactat

SEQ ID NO: 437635 - DNA, 7887 bp, Homo sapiens
gcggccgccggggtcggcagcctggggctccgctgatctagggcaacgagcgggggacgcttcgagcccgcagcgagagtgaccagcatggtccctgccggcagctcggggccggagggttttgactgcaaggccagcccacgccgagggtccaagcatcgggatatgccgccagcacctggctgctgcagcaccgcgctggacatgagcgctccgcccaacccgacggcgtcagctggcgcgcgcgcccgcgaccgacgtgcgcaggcgcccacgggccgcgcagccgccattgctctcctgccacggaggggagcgcttggtggcagtccgcgggcccggacggaaggctgaggcgacgcctcgacgacagcggaccggagctgcaggggcaacacattcagggcggggtgccccatttaggcctggctgaccggacacccaccctggagccatggtccacgccttcctcattcacaccttgagggccccgaatactgaggacacgggcctttgccgagtgctgtactcctgcgtcttcggtgctgagaagtcacctgatgacccacggccgcatggtgccgagagggacaggcttctccggaaggaacagattttagctgtggccaggcaggtagagtcaatgtgtcggctgcagcagcaggcatctggccggccccccatggacctgcagccgcaatcctcagatgagcaagtgccgctgcacgaggccccacgtggggctttccgcctggcagcagagaaccctttccaggagccacggacggtggtgtggctgggcgtgctctcgttaggctttgccctggtgctggatgcccatgagaacctgctactggctgagggcacgctccggctgctgacacgcctcctccttgaccacctccggctgctggcgcccagcaccagccttctgctgcgggctgaccgcattgagggcatcctcacccgcttcctgccacatggtcagctgcttttcctcaacgaccagtttgtccaaggcctggagaaggaattcagtgccgcttggccccgctgattcctcgttgggatggtgcttctgagggcaggcagagggtagacacacagccagatgaagcttggcatctccctcctacccagcagctctgatgtgctgctataccaggacaagtgggtgacacaagcctgcagaaagggggctgggcagagggtggaggaggtcctgcctgtcctcaggttagtggaaccacagaacttcctgagcctagagctgctgtgttacttagaccgctgccgtgcggcagccacgcttgtccttgaacccaccttcctccatccctgccagccgatagtgctagggtgaggagctgcctggagctcaccccgctcttcttccaaacccacagtcaaggccaggcgcggtggctcacgcctgtaatcccagcactttgcggggctgaggtggttggaccacctcaggtcgggagttcaagaccagcctggccaacatagtgaaaccccatctctactaaaaatacaaaaattagctgggtgtatggcgcccacctgtaatcctagctgctcagggggctgagtcatgggaatcacttgaacctgggaggcagagtttgcagtgagccgagagtgcgccacttcactccagcctgggtgaccgagtgatactctgtctcaaagaaaaaaaattataattttagcacagtaaccagccatgatgggagataccctgggtaaggcatgtagaaagggttgagggaccttcccagtcccctagccccgcctcccatcctcccatctttttcttttttcttttttttagagaatcacccagcctggagcgaagtggtgcaatcataactcactgtatccttaaactcccgggcttaagcgatcctcctgcctcagccttctgagtaactaggacttcaggtacctaacctccgcctcccgggttcaagcaattctcctgcctcagcctcccgagtagctgggattacagaggcctgccaccacacccgactaattttcgtatttttagtagagacggggtttctccatgttggccaggctgttcttgaactcctgacctcaagtgctccacctgcgttggcttcccaaagtgctgggatacaggagtgagccactgcgcctggctgatcccagcacttttcaaatgatgccgctcaaagccgtgacttggcctactttgaacagcaaacttgttgctgctgttgtcaacctgaaggcctctcaaatgccagcttcaagcagggtgtgaattggccagtgtcagatctcaggagtcctgtgttgagagtgtggctttcagctgcggggagctgcacttggtggggaaagccaggcaggtcaccctcacagccagataatgtggaggtcagaacccaaggaagggagtgagacctccactcccagtgggggacctggccacccatccttggggacctgagaaagcgtacttcaccttggggtgaaggctgggtggggccagagggaccagtgccctcctcagtgcttaggggcagagccacctgcagcaatggtatctgcatattagcccctctccaccttctttctcccgctgaatcatttccctcaaagcccaagagctgtcactgcttctttctccctgggaagaatgcgtggactctgcctggtgatagactgaagccagaacagtgccacaccctcgccttaattccttgctaggtgttctcagatttatgagacttcttagtcaaatatgagggaggttggatgtggtggcttgtgcctgtaatcccagcattttgggaggccgaggtgggaggatcccttgaagccaggagtttgagacaagcctgggcaacaaagcaagaccctatctctaaaaaaaaaaaaaaaaaaaaatctaggagatgctctttaccctgcctggcctcaaactattaatagcttcctttgagcaacattatttattatgaactttcaaacacaaaaaagtagagagagtagaataacaaatccccatgagcccatcacccaacttcagtaattatcaattcatggccatcttgttcacccctgcctgcttccctgcttcccctcattctgcagaggttcttttcttttgagacagagtgttgctctgttgcccaggctggagtgcagtggtgcaacttcggctcactgcaacctccgcctcccaggttcaagtgattctcctgcttcagcctctcaagtagctgggattacagatgcccgccaccacacctggctaattttcgtatttttgttagagatggggtttcaccatgttggccaggctggtctcgaactcctgacctcaagtgatccgcccgccttggcctcccaaaatgctgggattacaggtgtgaaccacggtgcctggccactgtacaggttatttatagaagttggagagtgaagggttgagaaagccaaggggcagatgcgggtctggaggattttgtgcctaaggccctctctttgctcccagacagcatgaagtaacaatgaggcatccacctcttggttttgtggcctctgtggatgacgtctctcaccttgaaccagttcagagttggagtagcgcaggatcctgtcttcagaggaggggccgaagcgggttcctctgttgtcaagctctttggaggtgcctggctgctactactgtcccagagaggtgatgatgaatgatgggtgtgtccagtggcagtttgccccactgaggcaggggcttccactaggccctgacagagcccttccagcaggcagaaatccctgtgctaggcaagattcaaactccgtagcatgtctcctgctcccatctcttaggaatggagtccttcaggccttgagtcccacattttccatgatgctccattaagcagctgatagcacccccacctccagggaaagtgagttcagagtccttggtctaatgcatctgtgttgaaattgaggccttcccctgtgttcacctttctgctctttttcttttagcccaaggctatgaaggcctcattcggtgctgggcatggtcactcctagcattcctcactctgttgctaacagcaacagcaataataataagggttacaacttactccataccttactgtctgccaggcattaagctaagtgctttacatatattaagtcatttaatcctcataatgaccctatgaaagagataccatctcaacccaattgacagctggtttgcaagattaggagggatgaaggacccaggggacaatgcgagggaaaactctgaccccggggccccaggctggatgttctttatgcctgtgaaccacagcttatcacatgtctggagttagggaccccacttaaagtgagattttggctggaggtggtggatcatacctataatcccagcactttgggagaccaaggcagaaggactgcttgaggccaggagttcaaaaccagtgtaggtaacagctagaccctatctctacaaaaaatttaaaaattagctgggtgtggtggtatgtgcctcaagttccagctactcaggaggctgaggtgggaggatcacttgagcacaggagtttgaagttacagtgagctatgatggcaccactgcacttcagcctaggcaacagagggagaccctgtctttaaagtacatagaggtttttcacaccaacacatctctgcccagtgtgccaacatctgccacctgctataatagtactataacactcaatatgtaattaatgtagtctcagggatgttatgacaatatgattacaactatcacgtgtgtgcccagccaggctcaatgccccaggctgggcgaggtggggcaggggacacagcctaaaatgccaggcctcaggaagccatttggtttagcagacattgtttattaaaggagttacctatgccagatcgaaggcctaagatgattaagacactatgagtgccttcaagtggttggggacgttcatgattgtggtacagacaaataggctttcacatcattcttttatgtaatcatacaacagatatttgcacctacatgtgcagagcactgtgataggcctcagtgacacagaataatacggcaaagaccccacccgatgagccccctcccaccacccaccagtacagtagggggtggtttaatggagtgttcctggaatatgaagtgggggcaggcattaggggtggcaaagggacaagtgtttatctgatcagttatgtactgtttataataagtaaatcagcagagggggaataatacttagaacctatagagagtaaatctgacaagatgaaatgctgatgaaaatatggaggaaatgaaactctcatgggttttgcagggaatctaagtcagtgctgtgttgtgaatgtaggtgtaccctttgaattcatatgttgaatcctaacccccaaagcaatggcattaagaggtggggcctttggggctgggtatggtggctcatgactgtaatcccagcactttgggatgctggcagggggcagatcacttgaagccaggagtctgagatcagcctggccaacatggtgaaaccccatctgtactaaaaatacaaaaattagccaggtgtgatggcgtacatctgtaatttcagccactcgggaggctgagacaggagaatagcttgaacccagtaggtggagatttcagtgagccgagatcgtgccactgcactccagcctgggtgacagagcgagactccatctcaaaaaaataataaagatgtggggcctgtgggaggtggttaggtcatgagggtggagatcatgaatggggttagcaccttataaaacaggcttgagggagcccttctgtcccttctaccatgtgtggatgcagtgagaaggcaccgtatctctgaagcagagagcccgccctggacactggatctgctggcaccttgatcttggacttcccagcctctagaactgtgagaaataattttttgttgtttacaaattacccaggctaaggtgtttcattgtaacctgaatggaccaagctggtgtgaccctgttggaaaactggcagtatctaccaaaagccgaacatacgtataaactgatccagcagttccactcctgggtatgtacaccacagaaagctatgtccaccgagacattggcaagaatgtttctaaccacacgctgactgtagccccaaacctgaaacaacccaaatgtccatccaccaacccaaatgtccatccacagttgaagctacagtgaagtcacagggtcgaatactactgcacagcaacgaatatgaatgaaaatatcgctatgcacagcaacatggataaatttcacagacatgaggtcaagcaaaagaggtcagagtcctcatcatcaagagagaattcattgtatgattctcttcctacaaaaagtacagaaataagcaaaactgatccatggtgttagaagccaggggaacagttaacaggggagggatactggggaggggcatcctggagtgctggtctacctcatctgggtgttgatttcacgagtattgtcagtttgtttccagactccctgttggagatgtggaaataaaaaccacctaaacaagagcagagaggccatttggtcaaagtttgcaaaggagtcagccatgattgcttgtatttggcaggggtcaaaggcaggcagggactgtgaaatgttatagtggaaaaaaagggaaggctctgggtgtgctgtgattggagattgttggcatggggacagagcggactaactggaggggcatctttggttggttgggggggtatatttggctttctctggttggtctggagttggaagagggggtgtggtggctggggattgggaagaagctggcagccactaagttcagactgttctgggtccgattgctgctgaggctgtggtttggcttccttggcttcccaggctggttatgggtttctggccagagtctattgtcatatgtggcctggccattgtccagttgtatgttcagtctcttggaaggaagggtattgactctgagaggggccaccatcgctggaatgggggacacacagtacttcctccagctgcctacacccccctagggtcagtggcgcctgcctgtgagggtgagcccaatggctagagggctctgctccaagtcattgcttactacacccacaaacattcttcgttctttaaggcctaacttaaagcccagatcctacaggaaaccttgattagacccctctctttattaagcttcctaagatcaaaccctgcttttgtgtaaatgctgacctccttgcctacattttaaaaacctagagctgggcatgatggccccagcctgtaatcccagtgattcaggagactgaggtgggaggattgctagaagccaggagttcgagaccagcctgggtaacatagctagaccacatctcttaaaataaaatagttaatttagccaggcatgatgatatatgcctgtagtcccaactacttggaaggctgaggtgtgaggatctttgagcccgggaggtcgaggctacagtaagctatgatctcaccactgtactccagcctgggtgacagagcgagacccagactcaaaaaataaaaataaaaaccctgaatatcttccttctgcaaaaaaaaaaaaaaaaaaaaaaaaaaaaaaaaaaaaaaatctaggagatgctctttaccctgcctggcctcaaactattaatagcttcctttgagcaacattatttattatgaactttcaaacacaaaaaagtagagatagaataacaaatccccatgactccatctacccatctggaccactat

SEQ ID NO: 437636 - DNA, 6392 bp, Homo sapiens
acactaccagcctaggtaaaaaatacaaaaagtaactgggcatggcggcgcccatctatagtcccacctccagagtagctgggactacaggcgcctgccaccacgcctggctaatttttttgcacttttagtagagacggggtttcactgtgttagccaggatggtctcgatctcctgaccttgtgatccgcccgcctcggcctcccaaagtgctgggattacaggcgtgagccaccgcgcccagccaaattaaattttttatagagatgaggtcatgctgttatgttgcccaggttggcctcatgagatcttgccttagcctcccaaagtgctgggattacagatgtgagacactgcacccaaaccccaccacttttttttttcctttttctttttttgagacagtcttactccgttgcccaggctggagtgtagtggcatgatctcagctcactgcaacctccgcctcccgggttcaagcaattctcctgcctcagcctcccgagtagctgggattacagaggcctgccaccacacccgactaattttcgtatttttagtagagacggggtttctccatgttggccaggctgttcttgaactcctgacctcaagtgctccacctgcgttggcttcccaaagtgctgggatacaggagtgagccactgcgcctggctgatcccagcacttttcaaatgatgccgctcaaagccgtgacttggcctactttgaacagcaaacttgttgctgctgttgtcaacctgaaggcctctcaaatgccagcttcaagcagggtgtgaattggccagtgtcagatctcaggagtcctgtgttgagagtgtggctttcagctgcggggagctgcacttggtggggaaagccaggcaggtcaccctcacagccagataatgtggaggtcagaacccaaggaagggagtgagacctccactcccagtgggggacctggccacccatccttggggacctgagaaagcgtacttcaccttggggtgaaggctgggtggggccagagggaccagtgccctcctcagtgcttaggggcagagccacctgcagcaatggtatctgcatattagcccctctccaccttctttctcccgctgaatcatttccctcaaagcccaagagctgtcactgcttctttctccctgggaagaatgcgtggactctgcctggtgatagactgaagccagaacagtgccacaccctcgccttaattccttgctaggtgttctcagatttatgagacttcttagtcaaatatgagggaggttggatgtggtggcttgtgcctgtaatcccagcattttgggaggccgaggtgggaggatcccttgaagccaggagtttgagacaagcctgggcaacaaagcaagaccctatctctaaaaaaaaaaaaaaaaaaaaatctaggagatgctctttaccctgcctggcctcaaactattaatagcttcctttgagcaacattatttattatgaactttcaaacacaaaaaagtagagagagtagaataacaaatccccatgagcccatcacccaacttcagtaattatcaattcatggccatcttgttcacccctgcctgcttccctgcttcccctcattctgcagaggttcttttcttttgagacagagtgttgctctgttgcccaggctggagtgcagtggtgcaacttcggctcactgcaacctccgcctcccaggttcaagtgattctcctgcttcagcctctcaagtagctgggattacagatgcccgccaccacacctggctaattttcgtatttttgttagagatggggtttcaccatgttggccaggctggtctcgaactcctgacctcaagtgatccgcccgccttggcctcccaaaatgctgggattacaggtgtgaaccacggtgcctggccactgtacaggttatttatagaagttggagagtgaagggttgagaaagccaaggggcagatgcgggtctggaggattttgtgcctaaggccctctctttgctcccagacagcatgaagtaacaatgaggcatccacctcttggttttgtggcctctgtggatgacgtctctcaccttgaaccagttcagagttggagtagcgcaggatcctgtcttcagaggaggggccgaagcgggttcctctgttgtcaagctctttggaggtgcctggctgctactactgtcccagagaggtgatgatgaatgatgggtgtgtccagtggcagtttgccccactgaggcaggggcttccactaggccctgacagagcccttccagcaggcagaaatccctgtgctaggcaagattcaaactccgtagcatgtctcctgctcccatctcttaggaatggagtccttcaggccttgagtcccacattttccatgatgctccattaagcagctgatagcacccccacctccagggaaagtgagttcagagtccttggtctaatgcatctgtgttgaaattgaggccttcccctgtgttcacctttctgctctttttcttttagcccaaggctatgaaggcctcattcggtgctgggcatggtcactcctagcattcctcactctgttgctaacagcaacagcaataataataagggttacaacttactccataccttactgtctgccaggcattaagctaagtgctttacatatattaagtcatttaatcctcataatgaccctatgaaagagataccatctcaacccaattgacagctggtttgcaagattaggagggatgaaggacccaggggacaatgcgagggaaaactctgaccccggggccccaggctggatgttctttatgcctgtgaaccacagcttatcacatgtctggagttagggaccccacttaaagtgagattttggctggaggtggtggatcatacctataatcccagcactttgggagaccaaggcagaaggactgcttgaggccaggagttcaaaaccagtgtaggtaacagctagaccctatctctacaaaaaatttaaaaattagctgggtgtggtggtatgtgcctcaagttccagctactcaggaggctgaggtgggaggatcacttgagcacaggagtttgaagttacagtgagctatgatggcaccactgcacttcagcctaggcaacagagggagaccctgtctttaaagtacatagaggtttttcacaccaacacatctctgcccagtgtgccaacatctgccacctgctataatagtactataacactcaatatgtaattaatgtagtctcagggatgttatgacaatatgattacaactatcacgtgtgtgcccagccaggctcaatgccccaggctgggcgaggtggggcaggggacacagcctaaaatgccaggcctcaggaagccatttggtttagcagacattgtttattaaaggagttacctatgccagatcgaaggcctaagatgattaagacactatgagtgccttcaagtggttggggacgttcatgattgtggtacagacaaataggctttcacatcattcttttatgtaatcatacaacagatatttgcacctacatgtgcagagcactgtgataggcctcagtgacacagaataatacggcaaagaccccacccgatgagccccctcccaccacccaccagtacagtagggggtggtttaatggagtgttcctggaatatgaagtgggggcaggcattaggggtggcaaagggacaagtgtttatctgatcagttatgtactgtttataataagtaaatcagcagagggggaataatacttagaacctatagagagtaaatctgacaagatgaaatgctgatgaaaatatggaggaaatgaaactctcatgggttttgcagggaatctaagtcagtgctgtgttgtgaatgtaggtgtaccctttgaattcatatgttgaatcctaacccccaaagcaatggcattaagaggtggggcctttggggctgggtatggtggctcatgactgtaatcccagcactttgggatgctggcagggggcagatcacttgaagccaggagtctgagatcagcctggccaacatggtgaaaccccatctgtactaaaaatacaaaaattagccaggtgtgatggcgtacatctgtaatttcagccactcgggaggctgagacaggagaatagcttgaacccagtaggtggagatttcagtgagccgagatcgtgccactgcactccagcctgggtgacagagcgagactccatctcaaaaaaataataaagatgtggggcctgtgggaggtggttaggtcatgagggtggagatcatgaatggggttagcaccttataaaacaggcttgagggagcccttctgtcccttctaccatgtgtggatgcagtgagaaggcaccgtatctctgaagcagagagcccgccctggacactggatctgctggcaccttgatcttggacttcccagcctctagaactgtgagaaataattttttgttgtttacaaattacccaggctaaggtgtttcattgtaacctgaatggaccaagctggtgtgaccctgttggaaaactggcagtatctaccaaaagccgaacatacgtataaactgatccagcagttccactcctgggtatgtacaccacagaaagctatgtccaccgagacattggcaagaatgtttctaaccacacgctgactgtagccccaaacctgaaacaacccaaatgtccatccaccaacccaaatgtccatccacagttgaagctacagtgaagtcacagggtcgaatactactgcacagcaacgaatatgaatgaaaatatcgctatgcacagcaacatggataaatttcacagacatgaggtcaagcaaaagaggtcagagtcctcatcatcaagagagaattcattgtatgattctcttcctacaaaaagtacagaaataagcaaaactgatccatggtgttagaagccaggggaacagttaacaggggagggatactggggaggggcatcctggagtgctggtctacctcatctgggtgttgatttcacgagtattgtcagtttgtttccagactccctgttggagatgtggaaataaaaaccacctaaacaagagcagagaggccatttggtcaaagtttgcaaaggagtcagccatgattgcttgtatttggcaggggtcaaaggcaggcagggactgtgaaatgttatagtggaaaaaaagggaaggctctgggtgtgctgtgattggagattgttggcatggggacagagcggactaactggaggggcatctttggttggttgggggggtatatttggctttctctggttggtctggagttggaagagggggtgtggtggctggggattgggaagaagctggcagccactaagttcagactgttctgggtccgattgctgctgaggctgtggtttggcttccttggcttcccaggctggttatgggtttctggccagagtctattgtcatatgtggcctggccattgtccagttgtatgttcagtctcttggaaggaagggtattgactctgagaggggccaccatcgctggaatgggggacacacagtacttcctccagctgcctacacccccctagggtcagtggcgcctgcctgtgagggtgagcccaatggctagagggctctgctccaagtcattgcttactacacccacaaacattcttcgttctttaaggcctaacttaaagcccagatcctacaggaaaccttgattagacccctctctttattaagcttcctaagatcaaaccctgcttttgtgtaaatgctgacctccttgcctacattttaaaaacctagagctgggcatgatggccccagcctgtaatcccagtgattcaggagactgaggtgggaggattgctagaagccaggagttcgagaccagcctgggtaacatagctagaccacatctcttaaaataaaatagttaatttagccaggcatgatgatatatgcctgtagtcccaactacttggaaggctgaggtgtgaggatctttgagcccgggaggtcgaggctacagtaagctatgatctcaccactgtactccagcctgggtgacagagcgagacccagactcaaaaaataaaaataaaaaccctgaatatcttccttctgcaaaaaaaaaaaaaaaaaaaaaaaaaaaaaaaaaaaaaaatctaggagatgctctttaccctgcctggcctcaaactattaatagcttcctttgagcaacattatttattatgaactttcaaacacaaaaaagtagagatagaataacaaatccccatgactccatctacccatctggaccactat

SEQ ID NO: 437637 - DNA, 7209 bp, Homo sapiens
gcggccgccggggtcggcagcctggggctccgctgatctagggcaacgagcgggggacgcttcgagcccgcagcgagagtgaccagcatggtccctgccggcagctcggggccggagggttttgactgcaaggccagcccacgccgagggtccaagcatcgggatatgccgccagcacctggctgctgcagcaccgcgctggacatgagcgctccgcccaacccgacggcgtcagctggcgcgcgcgcccgcgaccgacgtgcgcaggcgcccacgggccgcgcagccgccattgctctcctgccacggaggggagcgcttggtggcagtccgcgggcccggacggaaggctgaggcgacgcctcgacgacagcggaccggagctgcaggggcaacacattcagggcggggtgccccatttaggcctggctgaccggagtaagaaactacaacccccgaagtgccttgcgcctcaaggttacggaggcagtgacgtaagctgtcttgaccgctaccatttctctagtagaggcgggacgcggcggcgcggagtgatgacgcgctctgctggcggctggagggttgcggagcacccaccctggagccatggtccacgccttcctcattcacaccttgagggccccgaatactgaggacacgggcctttccgatagtgctagggtgaggagctgcctggagctcaccccgctcttcttccaaacccacagtcaaggccaggcgcggtggctcacgcctgtaatcccagcactttgcggggctgaggtggttggaccacctcaggtcgggagttcaagaccagcctggccaacatagtgaaaccccatctctactaaaaatacaaaaattagctgggtgtatggcgcccacctgtaatcctagctgctcagggggctgagtcatgggaatcacttgaacctgggaggcagagtttgcagtgagccgagagtgcgccacttcactccagcctgggtgaccgagtgatactctgtctcaaagaaaaaaaattataattttagcacagtaaccagccatgatgggagataccctgggtaaggcatgtagaaagggttgagggaccttcccagtcccctagccccgcctcccatcctcccatctttttcttttttcttttttttagagaatcacccagcctggagcgaagtggtgcaatcataactcactgtatccttaaactcccgggcttaagcgatcctcctgcctcagccttctgagtaactaggacttcaggtacctaacctccgcctcccgggttcaagcaattctcctgcctcagcctcccgagtagctgggattacagaggcctgccaccacacccgactaattttcgtatttttagtagagacggggtttctccatgttggccaggctgttcttgaactcctgacctcaagtgctccacctgcgttggcttcccaaagtgctgggatacaggagtgagccactgcgcctggctgatcccagcacttttcaaatgatgccgctcaaagccgtgacttggcctactttgaacagcaaacttgttgctgctgttgtcaacctgaaggcctctcaaatgccagcttcaagcagggtgtgaattggccagtgtcagatctcaggagtcctgtgttgagagtgtggctttcagctgcggggagctgcacttggtggggaaagccaggcaggtcaccctcacagccagataatgtggaggtcagaacccaaggaagggagtgagacctccactcccagtgggggacctggccacccatccttggggacctgagaaagcgtacttcaccttggggtgaaggctgggtggggccagagggaccagtgccctcctcagtgcttaggggcagagccacctgcagcaatggtatctgcatattagcccctctccaccttctttctcccgctgaatcatttccctcaaagcccaagagctgtcactgcttctttctccctgggaagaatgcgtggactctgcctggtgatagactgaagccagaacagtgccacaccctcgccttaattccttgctaggtgttctcagatttatgagacttcttagtcaaatatgagggaggttggatgtggtggcttgtgcctgtaatcccagcattttgggaggccgaggtgggaggatcccttgaagccaggagtttgagacaagcctgggcaacaaagcaagaccctatctctaaaaaaaaaaaaaaaaaaaaatctaggagatgctctttaccctgcctggcctcaaactattaatagcttcctttgagcaacattatttattatgaactttcaaacacaaaaaagtagagagagtagaataacaaatccccatgagcccatcacccaacttcagtaattatcaattcatggccatcttgttcacccctgcctgcttccctgcttcccctcattctgcagaggttcttttcttttgagacagagtgttgctctgttgcccaggctggagtgcagtggtgcaacttcggctcactgcaacctccgcctcccaggttcaagtgattctcctgcttcagcctctcaagtagctgggattacagatgcccgccaccacacctggctaattttcgtatttttgttagagatggggtttcaccatgttggccaggctggtctcgaactcctgacctcaagtgatccgcccgccttggcctcccaaaatgctgggattacaggtgtgaaccacggtgcctggccactgtacaggttatttatagaagttggagagtgaagggttgagaaagccaaggggcagatgcgggtctggaggattttgtgcctaaggccctctctttgctcccagacagcatgaagtaacaatgaggcatccacctcttggttttgtggcctctgtggatgacgtctctcaccttgaaccagttcagagttggagtagcgcaggatcctgtcttcagaggaggggccgaagcgggttcctctgttgtcaagctctttggaggtgcctggctgctactactgtcccagagaggtgatgatgaatgatgggtgtgtccagtggcagtttgccccactgaggcaggggcttccactaggccctgacagagcccttccagcaggcagaaatccctgtgctaggcaagattcaaactccgtagcatgtctcctgctcccatctcttaggaatggagtccttcaggccttgagtcccacattttccatgatgctccattaagcagctgatagcacccccacctccagggaaagtgagttcagagtccttggtctaatgcatctgtgttgaaattgaggccttcccctgtgttcacctttctgctctttttcttttagcccaaggctatgaaggcctcattcggtgctgggcatggtcactcctagcattcctcactctgttgctaacagcaacagcaataataataagggttacaacttactccataccttactgtctgccaggcattaagctaagtgctttacatatattaagtcatttaatcctcataatgaccctatgaaagagataccatctcaacccaattgacagctggtttgcaagattaggagggatgaaggacccaggggacaatgcgagggaaaactctgaccccggggccccaggctggatgttctttatgcctgtgaaccacagcttatcacatgtctggagttagggaccccacttaaagtgagattttggctggaggtggtggatcatacctataatcccagcactttgggagaccaaggcagaaggactgcttgaggccaggagttcaaaaccagtgtaggtaacagctagaccctatctctacaaaaaatttaaaaattagctgggtgtggtggtatgtgcctcaagttccagctactcaggaggctgaggtgggaggatcacttgagcacaggagtttgaagttacagtgagctatgatggcaccactgcacttcagcctaggcaacagagggagaccctgtctttaaagtacatagaggtttttcacaccaacacatctctgcccagtgtgccaacatctgccacctgctataatagtactataacactcaatatgtaattaatgtagtctcagggatgttatgacaatatgattacaactatcacgtgtgtgcccagccaggctcaatgccccaggctgggcgaggtggggcaggggacacagcctaaaatgccaggcctcaggaagccatttggtttagcagacattgtttattaaaggagttacctatgccagatcgaaggcctaagatgattaagacactatgagtgccttcaagtggttggggacgttcatgattgtggtacagacaaataggctttcacatcattcttttatgtaatcatacaacagatatttgcacctacatgtgcagagcactgtgataggcctcagtgacacagaataatacggcaaagaccccacccgatgagccccctcccaccacccaccagtacagtagggggtggtttaatggagtgttcctggaatatgaagtgggggcaggcattaggggtggcaaagggacaagtgtttatctgatcagttatgtactgtttataataagtaaatcagcagagggggaataatacttagaacctatagagagtaaatctgacaagatgaaatgctgatgaaaatatggaggaaatgaaactctcatgggttttgcagggaatctaagtcagtgctgtgttgtgaatgtaggtgtaccctttgaattcatatgttgaatcctaacccccaaagcaatggcattaagaggtggggcctttggggctgggtatggtggctcatgactgtaatcccagcactttgggatgctggcagggggcagatcacttgaagccaggagtctgagatcagcctggccaacatggtgaaaccccatctgtactaaaaatacaaaaattagccaggtgtgatggcgtacatctgtaatttcagccactcgggaggctgagacaggagaatagcttgaacccagtaggtggagatttcagtgagccgagatcgtgccactgcactccagcctgggtgacagagcgagactccatctcaaaaaaataataaagatgtggggcctgtgggaggtggttaggtcatgagggtggagatcatgaatggggttagcaccttataaaacaggcttgagggagcccttctgtcccttctaccatgtgtggatgcagtgagaaggcaccgtatctctgaagcagagagcccgccctggacactggatctgctggcaccttgatcttggacttcccagcctctagaactgtgagaaataattttttgttgtttacaaattacccaggctaaggtgtttcattgtaacctgaatggaccaagctggtgtgaccctgttggaaaactggcagtatctaccaaaagccgaacatacgtataaactgatccagcagttccactcctgggtatgtacaccacagaaagctatgtccaccgagacattggcaagaatgtttctaaccacacgctgactgtagccccaaacctgaaacaacccaaatgtccatccaccaacccaaatgtccatccacagttgaagctacagtgaagtcacagggtcgaatactactgcacagcaacgaatatgaatgaaaatatcgctatgcacagcaacatggataaatttcacagacatgaggtcaagcaaaagaggtcagagtcctcatcatcaagagagaattcattgtatgattctcttcctacaaaaagtacagaaataagcaaaactgatccatggtgttagaagccaggggaacagttaacaggggagggatactggggaggggcatcctggagtgctggtctacctcatctgggtgttgatttcacgagtattgtcagtttgtttccagactccctgttggagatgtggaaataaaaaccacctaaacaagagcagagaggccatttggtcaaagtttgcaaaggagtcagccatgattgcttgtatttggcaggggtcaaaggcaggcagggactgtgaaatgttatagtggaaaaaaagggaaggctctgggtgtgctgtgattggagattgttggcatggggacagagcggactaactggaggggcatctttggttggttgggggggtatatttggctttctctggttggtctggagttggaagagggggtgtggtggctggggattgggaagaagctggcagccactaagttcagactgttctgggtccgattgctgctgaggctgtggtttggcttccttggcttcccaggctggttatgggtttctggccagagtctattgtcatatgtggcctggccattgtccagttgtatgttcagtctcttggaaggaagggtattgactctgagaggggccaccatcgctggaatgggggacacacagtacttcctccagctgcctacacccccctagggtcagtggcgcctgcctgtgagggtgagcccaatggctagagggctctgctccaagtcattgcttactacacccacaaacattcttcgttctttaaggcctaacttaaagcccagatcctacaggaaaccttgattagacccctctctttattaagcttcctaagatcaaaccctgcttttgtgtaaatgctgacctccttgcctacattttaaaaacctagagctgggcatgatggccccagcctgtaatcccagtgattcaggagactgaggtgggaggattgctagaagccaggagttcgagaccagcctgggtaacatagctagaccacatctcttaaaataaaatagttaatttagccaggcatgatgatatatgcctgtagtcccaactacttggaaggctgaggtgtgaggatctttgagcccgggaggtcgaggctacagtaagctatgatctcaccactgtactccagcctgggtgacagagcgagacccagactcaaaaaataaaaataaaaaccctgaatatcttccttctgcaaaaaaaaaaaaaaaaaaaaaaaaaaaaaaaaaaaaaaatctaggagatgctctttaccctgcctggcctcaaactattaatagcttcctttgagcaacattatttattatgaactttcaaacacaaaaaagtagagatagaataacaaatccccatgactccatctacccatctggaccactat

SEQ ID NO: 437638 - DNA, 6029 bp, Homo sapiens
  misc_feature (56)..(57): n is a, c, g, or t
ggctgacaatacagtgtaacactcagcatcggtatctttttgagacagtctactcnncgttgcccaggtgtagtggcatgatctcagctcactgcaacctccgcctcccgggttcaagcaattctcctgcctcagcctcccgagtagctgggattacagaggcctgccaccacacccgactaattttcgtatttttagtagagacggggtttctccatgttggccaggctgttcttgaactcctgacctcaagtgctccacctgcgttggcttcccaaagtgctgggatacaggagtgagccactgcgcctggctgatcccagcacttttcaaatgatgccgctcaaagccgtgacttggcctactttgaacagcaaacttgttgctgctgttgtcaacctgaaggcctctcaaatgccagcttcaagcagggtgtgaattggccagtgtcagatctcaggagtcctgtgttgagagtgtggctttcagctgcggggagctgcacttggtggggaaagccaggcaggtcaccctcacagccagataatgtggaggtcagaacccaaggaagggagtgagacctccactcccagtgggggacctggccacccatccttggggacctgagaaagcgtacttcaccttggggtgaaggctgggtggggccagagggaccagtgccctcctcagtgcttaggggcagagccacctgcagcaatggtatctgcatattagcccctctccaccttctttctcccgctgaatcatttccctcaaagcccaagagctgtcactgcttctttctccctgggaagaatgcgtggactctgcctggtgatagactgaagccagaacagtgccacaccctcgccttaattccttgctaggtgttctcagatttatgagacttcttagtcaaatatgagggaggttggatgtggtggcttgtgcctgtaatcccagcattttgggaggccgaggtgggaggatcccttgaagccaggagtttgagacaagcctgggcaacaaagcaagaccctatctctaaaaaaaaaaaaaaaaaaaaatctaggagatgctctttaccctgcctggcctcaaactattaatagcttcctttgagcaacattatttattatgaactttcaaacacaaaaaagtagagagagtagaataacaaatccccatgagcccatcacccaacttcagtaattatcaattcatggccatcttgttcacccctgcctgcttccctgcttcccctcattctgcagaggttcttttcttttgagacagagtgttgctctgttgcccaggctggagtgcagtggtgcaacttcggctcactgcaacctccgcctcccaggttcaagtgattctcctgcttcagcctctcaagtagctgggattacagatgcccgccaccacacctggctaattttcgtatttttgttagagatggggtttcaccatgttggccaggctggtctcgaactcctgacctcaagtgatccgcccgccttggcctcccaaaatgctgggattacaggtgtgaaccacggtgcctggccactgtacaggttatttatagaagttggagagtgaagggttgagaaagccaaggggcagatgcgggtctggaggattttgtgcctaaggccctctctttgctcccagacagcatgaagtaacaatgaggcatccacctcttggttttgtggcctctgtggatgacgtctctcaccttgaaccagttcagagttggagtagcgcaggatcctgtcttcagaggaggggccgaagcgggttcctctgttgtcaagctctttggaggtgcctggctgctactactgtcccagagaggtgatgatgaatgatgggtgtgtccagtggcagtttgccccactgaggcaggggcttccactaggccctgacagagcccttccagcaggcagaaatccctgtgctaggcaagattcaaactccgtagcatgtctcctgctcccatctcttaggaatggagtccttcaggccttgagtcccacattttccatgatgctccattaagcagctgatagcacccccacctccagggaaagtgagttcagagtccttggtctaatgcatctgtgttgaaattgaggccttcccctgtgttcacctttctgctctttttcttttagcccaaggctatgaaggcctcattcggtgctgggcatggtcactcctagcattcctcactctgttgctaacagcaacagcaataataataagggttacaacttactccataccttactgtctgccaggcattaagctaagtgctttacatatattaagtcatttaatcctcataatgaccctatgaaagagataccatctcaacccaattgacagctggtttgcaagattaggagggatgaaggacccaggggacaatgcgagggaaaactctgaccccggggccccaggctggatgttctttatgcctgtgaaccacagcttatcacatgtctggagttagggaccccacttaaagtgagattttggctggaggtggtggatcatacctataatcccagcactttgggagaccaaggcagaaggactgcttgaggccaggagttcaaaaccagtgtaggtaacagctagaccctatctctacaaaaaatttaaaaattagctgggtgtggtggtatgtgcctcaagttccagctactcaggaggctgaggtgggaggatcacttgagcacaggagtttgaagttacagtgagctatgatggcaccactgcacttcagcctaggcaacagagggagaccctgtctttaaagtacatagaggtttttcacaccaacacatctctgcccagtgtgccaacatctgccacctgctataatagtactataacactcaatatgtaattaatgtagtctcagggatgttatgacaatatgattacaactatcacgtgtgtgcccagccaggctcaatgccccaggctgggcgaggtggggcaggggacacagcctaaaatgccaggcctcaggaagccatttggtttagcagacattgtttattaaaggagttacctatgccagatcgaaggcctaagatgattaagacactatgagtgccttcaagtggttggggacgttcatgattgtggtacagacaaataggctttcacatcattcttttatgtaatcatacaacagatatttgcacctacatgtgcagagcactgtgataggcctcagtgacacagaataatacggcaaagaccccacccgatgagccccctcccaccacccaccagtacagtagggggtggtttaatggagtgttcctggaatatgaagtgggggcaggcattaggggtggcaaagggacaagtgtttatctgatcagttatgtactgtttataataagtaaatcagcagagggggaataatacttagaacctatagagagtaaatctgacaagatgaaatgctgatgaaaatatggaggaaatgaaactctcatgggttttgcagggaatctaagtcagtgctgtgttgtgaatgtaggtgtaccctttgaattcatatgttgaatcctaacccccaaagcaatggcattaagaggtggggcctttggggctgggtatggtggctcatgactgtaatcccagcactttgggatgctggcagggggcagatcacttgaagccaggagtctgagatcagcctggccaacatggtgaaaccccatctgtactaaaaatacaaaaattagccaggtgtgatggcgtacatctgtaatttcagccactcgggaggctgagacaggagaatagcttgaacccagtaggtggagatttcagtgagccgagatcgtgccactgcactccagcctgggtgacagagcgagactccatctcaaaaaaataataaagatgtggggcctgtgggaggtggttaggtcatgagggtggagatcatgaatggggttagcaccttataaaacaggcttgagggagcccttctgtcccttctaccatgtgtggatgcagtgagaaggcaccgtatctctgaagcagagagcccgccctggacactggatctgctggcaccttgatcttggacttcccagcctctagaactgtgagaaataattttttgttgtttacaaattacccaggctaaggtgtttcattgtaacctgaatggaccaagctggtgtgaccctgttggaaaactggcagtatctaccaaaagccgaacatacgtataaactgatccagcagttccactcctgggtatgtacaccacagaaagctatgtccaccgagacattggcaagaatgtttctaaccacacgctgactgtagccccaaacctgaaacaacccaaatgtccatccaccaacccaaatgtccatccacagttgaagctacagtgaagtcacagggtcgaatactactgcacagcaacgaatatgaatgaaaatatcgctatgcacagcaacatggataaatttcacagacatgaggtcaagcaaaagaggtcagagtcctcatcatcaagagagaattcattgtatgattctcttcctacaaaaagtacagaaataagcaaaactgatccatggtgttagaagccaggggaacagttaacaggggagggatactggggaggggcatcctggagtgctggtctacctcatctgggtgttgatttcacgagtattgtcagtttgtttccagactccctgttggagatgtggaaataaaaaccacctaaacaagagcagagaggccatttggtcaaagtttgcaaaggagtcagccatgattgcttgtatttggcaggggtcaaaggcaggcagggactgtgaaatgttatagtggaaaaaaagggaaggctctgggtgtgctgtgattggagattgttggcatggggacagagcggactaactggaggggcatctttggttggttgggggggtatatttggctttctctggttggtctggagttggaagagggggtgtggtggctggggattgggaagaagctggcagccactaagttcagactgttctgggtccgattgctgctgaggctgtggtttggcttccttggcttcccaggctggttatgggtttctggccagagtctattgtcatatgtggcctggccattgtccagttgtatgttcagtctcttggaaggaagggtattgactctgagaggggccaccatcgctggaatgggggacacacagtacttcctccagctgcctacacccccctagggtcagtggcgcctgcctgtgagggtgagcccaatggctagagggctctgctccaagtcattgcttactacacccacaaacattcttcgttctttaaggcctaacttaaagcccagatcctacaggaaaccttgattagacccctctctttattaagcttcctaagatcaaaccctgcttttgtgtaaatgctgacctccttgcctacattttaaaaacctagagctgggcatgatggccccagcctgtaatcccagtgattcaggagactgaggtgggaggattgctagaagccaggagttcgagaccagcctgggtaacatagctagaccacatctcttaaaataaaatagttaatttagccaggcatgatgatatatgcctgtagtcccaactacttggaaggctgaggtgtgaggatctttgagcccgggaggtcgaggctacagtaagctatgatctcaccactgtactccagcctgggtgacagagcgagacccagactcaaaaaataaaaataaaaaccctgaatatcttccttctgcaaaaaaaaaaaaaaaaaaaaaaaaaaaaaaaaaaaaaaatctaggagatgctctttaccctgcctggcctcaaactattaatagcttcctttgagcaacattatttattatgaactttcaaacacaaaaaagtagagatagaataacaaatccccatgactccatctacccatctggaccactat

SEQ ID NO: 437639 - DNA, 5994 bp, Homo sapiens
aatttttttttttttttttttttttgagacggagtctcactctgccgcccaggctggagtgcagtggcgtgatctcggctcactacaacctccgcctcagcctcccgagtagctgggattacagaggcctgccaccacacccgactaattttcgtatttttagtagagacggggtttctccatgttggccaggctgttcttgaactcctgacctcaagtgctccacctgcgttggcttcccaaagtgctgggatacaggagtgagccactgcgcctggctgatcccagcacttttcaaatgatgccgctcaaagccgtgacttggcctactttgaacagcaaacttgttgctgctgttgtcaacctgaaggcctctcaaatgccagcttcaagcagggtgtgaattggccagtgtcagatctcaggagtcctgtgttgagagtgtggctttcagctgcggggagctgcacttggtggggaaagccaggcaggtcaccctcacagccagataatgtggaggtcagaacccaaggaagggagtgagacctccactcccagtgggggacctggccacccatccttggggacctgagaaagcgtacttcaccttggggtgaaggctgggtggggccagagggaccagtgccctcctcagtgcttaggggcagagccacctgcagcaatggtatctgcatattagcccctctccaccttctttctcccgctgaatcatttccctcaaagcccaagagctgtcactgcttctttctccctgggaagaatgcgtggactctgcctggtgatagactgaagccagaacagtgccacaccctcgccttaattccttgctaggtgttctcagatttatgagacttcttagtcaaatatgagggaggttggatgtggtggcttgtgcctgtaatcccagcattttgggaggccgaggtgggaggatcccttgaagccaggagtttgagacaagcctgggcaacaaagcaagaccctatctctaaaaaaaaaaaaaaaaaaaaatctaggagatgctctttaccctgcctggcctcaaactattaatagcttcctttgagcaacattatttattatgaactttcaaacacaaaaaagtagagagagtagaataacaaatccccatgagcccatcacccaacttcagtaattatcaattcatggccatcttgttcacccctgcctgcttccctgcttcccctcattctgcagaggttcttttcttttgagacagagtgttgctctgttgcccaggctggagtgcagtggtgcaacttcggctcactgcaacctccgcctcccaggttcaagtgattctcctgcttcagcctctcaagtagctgggattacagatgcccgccaccacacctggctaattttcgtatttttgttagagatggggtttcaccatgttggccaggctggtctcgaactcctgacctcaagtgatccgcccgccttggcctcccaaaatgctgggattacaggtgtgaaccacggtgcctggccactgtacaggttatttatagaagttggagagtgaagggttgagaaagccaaggggcagatgcgggtctggaggattttgtgcctaaggccctctctttgctcccagacagcatgaagtaacaatgaggcatccacctcttggttttgtggcctctgtggatgacgtctctcaccttgaaccagttcagagttggagtagcgcaggatcctgtcttcagaggaggggccgaagcgggttcctctgttgtcaagctctttggaggtgcctggctgctactactgtcccagagaggtgatgatgaatgatgggtgtgtccagtggcagtttgccccactgaggcaggggcttccactaggccctgacagagcccttccagcaggcagaaatccctgtgctaggcaagattcaaactccgtagcatgtctcctgctcccatctcttaggaatggagtccttcaggccttgagtcccacattttccatgatgctccattaagcagctgatagcacccccacctccagggaaagtgagttcagagtccttggtctaatgcatctgtgttgaaattgaggccttcccctgtgttcacctttctgctctttttcttttagcccaaggctatgaaggcctcattcggtgctgggcatggtcactcctagcattcctcactctgttgctaacagcaacagcaataataataagggttacaacttactccataccttactgtctgccaggcattaagctaagtgctttacatatattaagtcatttaatcctcataatgaccctatgaaagagataccatctcaacccaattgacagctggtttgcaagattaggagggatgaaggacccaggggacaatgcgagggaaaactctgaccccggggccccaggctggatgttctttatgcctgtgaaccacagcttatcacatgtctggagttagggaccccacttaaagtgagattttggctggaggtggtggatcatacctataatcccagcactttgggagaccaaggcagaaggactgcttgaggccaggagttcaaaaccagtgtaggtaacagctagaccctatctctacaaaaaatttaaaaattagctgggtgtggtggtatgtgcctcaagttccagctactcaggaggctgaggtgggaggatcacttgagcacaggagtttgaagttacagtgagctatgatggcaccactgcacttcagcctaggcaacagagggagaccctgtctttaaagtacatagaggtttttcacaccaacacatctctgcccagtgtgccaacatctgccacctgctataatagtactataacactcaatatgtaattaatgtagtctcagggatgttatgacaatatgattacaactatcacgtgtgtgcccagccaggctcaatgccccaggctgggcgaggtggggcaggggacacagcctaaaatgccaggcctcaggaagccatttggtttagcagacattgtttattaaaggagttacctatgccagatcgaaggcctaagatgattaagacactatgagtgccttcaagtggttggggacgttcatgattgtggtacagacaaataggctttcacatcattcttttatgtaatcatacaacagatatttgcacctacatgtgcagagcactgtgataggcctcagtgacacagaataatacggcaaagaccccacccgatgagccccctcccaccacccaccagtacagtagggggtggtttaatggagtgttcctggaatatgaagtgggggcaggcattaggggtggcaaagggacaagtgtttatctgatcagttatgtactgtttataataagtaaatcagcagagggggaataatacttagaacctatagagagtaaatctgacaagatgaaatgctgatgaaaatatggaggaaatgaaactctcatgggttttgcagggaatctaagtcagtgctgtgttgtgaatgtaggtgtaccctttgaattcatatgttgaatcctaacccccaaagcaatggcattaagaggtggggcctttggggctgggtatggtggctcatgactgtaatcccagcactttgggatgctggcagggggcagatcacttgaagccaggagtctgagatcagcctggccaacatggtgaaaccccatctgtactaaaaatacaaaaattagccaggtgtgatggcgtacatctgtaatttcagccactcgggaggctgagacaggagaatagcttgaacccagtaggtggagatttcagtgagccgagatcgtgccactgcactccagcctgggtgacagagcgagactccatctcaaaaaaataataaagatgtggggcctgtgggaggtggttaggtcatgagggtggagatcatgaatggggttagcaccttataaaacaggcttgagggagcccttctgtcccttctaccatgtgtggatgcagtgagaaggcaccgtatctctgaagcagagagcccgccctggacactggatctgctggcaccttgatcttggacttcccagcctctagaactgtgagaaataattttttgttgtttacaaattacccaggctaaggtgtttcattgtaacctgaatggaccaagctggtgtgaccctgttggaaaactggcagtatctaccaaaagccgaacatacgtataaactgatccagcagttccactcctgggtatgtacaccacagaaagctatgtccaccgagacattggcaagaatgtttctaaccacacgctgactgtagccccaaacctgaaacaacccaaatgtccatccaccaacccaaatgtccatccacagttgaagctacagtgaagtcacagggtcgaatactactgcacagcaacgaatatgaatgaaaatatcgctatgcacagcaacatggataaatttcacagacatgaggtcaagcaaaagaggtcagagtcctcatcatcaagagagaattcattgtatgattctcttcctacaaaaagtacagaaataagcaaaactgatccatggtgttagaagccaggggaacagttaacaggggagggatactggggaggggcatcctggagtgctggtctacctcatctgggtgttgatttcacgagtattgtcagtttgtttccagactccctgttggagatgtggaaataaaaaccacctaaacaagagcagagaggccatttggtcaaagtttgcaaaggagtcagccatgattgcttgtatttggcaggggtcaaaggcaggcagggactgtgaaatgttatagtggaaaaaaagggaaggctctgggtgtgctgtgattggagattgttggcatggggacagagcggactaactggaggggcatctttggttggttgggggggtatatttggctttctctggttggtctggagttggaagagggggtgtggtggctggggattgggaagaagctggcagccactaagttcagactgttctgggtccgattgctgctgaggctgtggtttggcttccttggcttcccaggctggttatgggtttctggccagagtctattgtcatatgtggcctggccattgtccagttgtatgttcagtctcttggaaggaagggtattgactctgagaggggccaccatcgctggaatgggggacacacagtacttcctccagctgcctacacccccctagggtcagtggcgcctgcctgtgagggtgagcccaatggctagagggctctgctccaagtcattgcttactacacccacaaacattcttcgttctttaaggcctaacttaaagcccagatcctacaggaaaccttgattagacccctctctttattaagcttcctaagatcaaaccctgcttttgtgtaaatgctgacctccttgcctacattttaaaaacctagagctgggcatgatggccccagcctgtaatcccagtgattcaggagactgaggtgggaggattgctagaagccaggagttcgagaccagcctgggtaacatagctagaccacatctcttaaaataaaatagttaatttagccaggcatgatgatatatgcctgtagtcccaactacttggaaggctgaggtgtgaggatctttgagcccgggaggtcgaggctacagtaagctatgatctcaccactgtactccagcctgggtgacagagcgagacccagactcaaaaaataaaaataaaaaccctgaatatcttccttctgcaaaaaaaaaaaaaaaaaaaaaaaaaaaaaaaaaaaaaaatctaggagatgctctttaccctgcctggcctcaaactattaatagcttcctttgagcaacattatttattatgaactttcaaacacaaaaaagtagagatagaataacaaatccccatgactccatctacccatctggaccactat

SEQ ID NO: 437640 - DNA, 5229 bp, Homo sapiens
gcgggaagggtcctgggccccgggcggcggtcgccaggtctcagggccgggggtacccgagtctcgtttcctctcagtccatccacccttcatggggccagagccctctctccagaatctgagcagcaatgccgtttgctgaagacaagacctataagtatatctgccgcaatttcagcaatttttgcaatgtggatgttgtagagattctgccttacctgccctgcctcacagcaagagaccaggatcgactgcgggccacctgcacactctcagggaaccgggacaccctctggcatctcttcaatacccttcagcggcggcccggctgggtggagtacttcattgcggcactgaggggctgtgagctagttgatctcgcggacgaagtggcctctgtctaccagagctaccagcctcggacctcggaccgtcccccagacccactggagccaccgtcacttcctgctgagaggccagggccccccacacctgctgcggcccacagcatcccctacaacagctgcagagagaaggagccaagttaccccatgcctgtccaggagacccaggcgccagagtccccaggagagaattcagagcaagccctgcagacgctcagccccagagccatcccaaggaatccagatggtggccccctggagtcctcctctgacctggcagccctcagccctctgacctccagcgggcatcaggagcaggacacagaactgggcagtacccacacagcaggtgcgacctccagcctcacaccatcccgtgggcctgtgtctccatctgtctccttccagcccctggcccgttccacccccagggcaagccgcttgcctggacccacagggtcagttgtatctactggcacctccttctcctcctcatcccctggcttggcctctgcaggggctgcagagggtaaacagggtgcagagagtgaccaggccgagcctatcatctgctccagtggggcagaggcacctgccaactctctgccctccaaagtgcctaccaccttgatgcctgtgaacacagtggccctgaaagtgcctgccaacccagcatctgtcagcacagtgccctccaagttgccaactagctcaaagccccctggtgcagtgccttctaatgcgctcaccaatccagcaccatccaaattgcccatcaactcaacccgtgctggcatggtgccatccaaagtgcctactagcatggtgctcaccaaggtgtctgccagcacagtccccactgacgggagcagcagaaatgaggagaccccagcagctccaacacccgccggcgccactggaggcagctcagcctggctagacagcagctctgagaataggggccttgggtcggagctgagtaagcctggcgtgctggcatcccaggtagacagcccgttctcgggctgcttcgaggatcttgccatcagtgccagcacctccttgggcatggggccctgccatggcccagaggagaatgagtataagtccgagggcacctttgggatccacgtggctgagaaccccagcatccagctcctggagggcaaccctgggccacctgcggacccggatggcggccccaggccacaagccgaccggaagttccaggagagggaggtgccatgccacaggccctcacctggggctctgtggctccaggtggctgtgacaggggtgctggtagtcacactcctggtggtgctgtaccggcggcgtctgcactagtgaagccctgggctcttcccaccacccatctgttccgttcctgcagtatacctggcccctctccgaagccccttgtccctttcttggggattgtggaggctgggtcagaggggagttaagggactgcaggcctggcagcaggacatgccttggctgaaccaagtcctgagagcagcatctctgtccccacggtgccttgtgtgggtccccgtccttggctttctgggtcctgggctgcccccagtgctccagaccttccccactggcaatccaggttatcatccatgtcctccagaggagcttcctcctccaggcctcagccctgttggcccaggtggagcaggagggaccactggaacatgtggtgcttgggaatgcctctcctgttgcattggtccctgaaggcctcagggcaggtatgtggtgtgtgggcgactccacaagacctgcctcccatcctggcagcccagcctgagaccgttgcattgaggcaggcaggagcggcagggtggctgctctccaggagcccaactgccttgagttcctgccccactgggccccctcccctgctgggcaatcctgggaaggtctggaggttcctgtggacctcagggaagccaggggcagctgtcaggcctgaggaagacctgtggagctcctctccagcctcctctttccctcccctctggtctccattctcttcagctccctacatgggctggggaggagacacctggtgggcagagctcaggcagaggtttggatttcagctccctcacttccggggctgtgtggctttggcagatgtcagacttctggtcttgcttctccacgtggacagtgagtatctggctcattcttcactgggttcttctgagattgaacctacaggtgtttgccaagtgcctggcccagagcaagtggccactgcttctcccatctctctcctgcccaacctggtagagctgagggcatgagaggcagagtgcacagtggtcaagggtgcagctctgcagcacaggcagcctaggcctgcgtcccaacctgcctctcaccagctctgtgaccttgggcaagggatttatctgtctgtcccttagttttctcacctgtaaaaggaggataagtatatatatatatttcccagtgttgtgaagattaaaggagtttatcgatgtaggtcttaggatgagtcctggcatttaccaagggttggatatatgttattatcactattaagtgttgagggtccaggcatgctgggcaacagggaccccatctctacaaaaaagtttaaaaaattagccaggcgtggtggtgcacctgtcgtcttagctacttgggaggctgaggtgggaggatcacttgagcccagaagcttgaagctgcagtgagctaggatcgtgccactgcactccaacctgggtgagagagcgagaccctgtctcaagaaaaagaaaaatgcagagaaacaggagtcttggctactcctttagaggcagactcagaccctcctgcctcacagctttatctttgtatttgccccttactttatcttgtgccttgagaaattgctggggagagaggtatgtccactgggcagctgtacaggatggaggatatagggcgtttccactcccagcagccaggttccctcaccccaagctcacccactgttggggagattatctacaataacaccagaaacacattggggtggattgggggtatccttatgggttcttttcagggaaccattgctggacaaggcacaggagccacctccatttctgagctctgcaagggacaagaactagagccatcaggggctgggctcactgtggccccaccccaagccgtcagcctccagggatctacaccctgccttggctgctacagctttttcactccactgccctaggggagttcagcaacctaatgatctctatctctgaacatctcttcatcccatgctccaagtccagcaacctgcaccctggaaccaggagtggaccctacccgagctgtctgtattaatccccatcccccaccaccaatcttaaaaagccctctgtccccctaccctaaaccccagttaggtacccatgctgggcaggtcagttaacaatttatgcacaggtactagttttattgtattaccgttccagggtagctttgaaaaaagtatctcaaaaaggcaacaccaccgcgcccagccaaattaaattttttatagagatgaggtcatgctgttatgttgcccaggttggcctcatgagatcttgccttagcctcccaaagtgctgggattacagatgtgagacactgcacccaaaccccaccacttttttttttcctttttctttttttgagacagtcttactccgttgcccaggctggagtgtagtggcatgatctcagctcactgcaacctccgcctcccgggttcaagcaattctcctgcctcagcctcccgagtagctgggattacagaggcctgccaccacacccgactaattttcgtatttttagtagagacggggtttctccatgttggccaggctgttcttgaactcctgacctcaagtgctccacctgcgttggcttcccaaagtgctgggatacaggagtgagccactgcgcctggctgatcccagcacttttcaaatgatgccgctcaaagccgtgacttggcctactttgaacagcaaacttgttgctgctgttgtcaacctgaaggcctctcaaatgccagcttcaagcagggtgtgaattggccagtgtcagatctcaggagtcctgtgttgagagtgtggctttcagctgcggggagctgcacttggtggggaaagccaggcaggtcaccctcacagccagataatgtggaggtcagaacccaaggaagggagtgagacctccactcccagtgggggacctggccacccatccttggggacctgagaaagcgtacttcaccttggggtgaaggctgggtggggccagagggaccagtgccctcctcagtgcttaggggcagagccacctgcagcaatggtatctgcatattagcccctctccaccttctttctcccgctgaatcatttccctcaaagcccaagagctgtcactgcttctttctccctgggaagaatgcgtggactctgcctggtgatagactgaagccagaacagtgccacaccctcgccttaattccttgctaggtgttctcagatttatgagacttcttagtcaaatatgagggaggttggatgtggtggcttgtgcctgtaatcccagcattttgggaggccgaggtgggaggatcccttgaagccaggagtttgagacaagcctgggcaacaaagcaagaccctatctctgcaccgttgacctgtgcatcatggactttctaaatataactcccaggggcggttggttcacaaatctcccttgctttaggacgattccaaatctctgg

SEQ ID NO: 437641 - DNA, 5146 bp, Homo sapiens
gcgggaagggtcctgggccccgggcggcggtcgccaggtctcagggccgggggtacccgagtctcgtttcctctcagtccatccacccttcatggggccagagccctctctccagaatctgagcagcaatgccgtttgctgaagacaagacctataagtatatctgccgcaatttcagcaatttttgcaatgtggatgttgtagagattctgccttacctgccctgcctcacagcaagagaccaggatcgactgcgggccacctgcacactctcagggaaccgggacaccctctggcatctcttcaatacccttcagcggcggcccggctgggtggagtacttcattgcggcactgaggggctgtgagctagttgatctcgcggacgaagtggcctctgtctaccagagctaccagcctcggacctcggaccgtcccccagacccactggagccaccgtcacttcctgctgagaggccagggccccccacacctgctgcggcccacagcatcccctacaacagctgcagagagaaggagccaagttaccccatgcctgtccaggagacccaggcgccagagtccccaggagagaattcagagcaagccctgcagacgctcagccccagagccatcccaaggaatccagatggtggccccctggagtcctcctctgacctggcagccctcagccctctgacctccagcgggcatcaggagcaggacacagaactgggcagtacccacacagcaggtgcgacctccagcctcacaccatcccgtgggcctgtgtctccatctgtctccttccagcccctggcccgttccacccccagggcaagccgcttgcctggacccacagggtcagttgtatctactggcacctccttctcctcctcatcccctggcttggcctctgcaggggctgcagagggtaaacagggtgcagagagtgaccaggccgagcctatcatctgctccagtggggcagaggcacctgccaactctctgccctccaaagtgcctaccaccttgatgcctgtgaacacagtggccctgaaagtgcctgccaacccagcatctgtcagcacagtgccctccaagttgccaactagctcaaagccccctggtgcagtgccttctaatgcgctcaccaatccagcaccatccaaattgcccatcaactcaacccgtgctggcatggtgccatccaaagtgcctactagcatggtgctcaccaaggtgtctgccagcacagtccccactgacgggagcagcagaaatgaggagaccccagcagctccaacacccgccggcgccactggaggcagctcagcctggctagacagcagctctgagaataggggccttgggtcggagctgagtaagcctggcgtgctggcatcccaggtagacagcccgttctcgggctgcttcgaggatcttgccatcagtgccagcacctccttgggcatggggccctgccatggcccagaggagaatgagtataagtccgagggcacctttgggatccacgtggctgagaaccccagcatccagctcctggagggcaaccctgggccacctgcggacccggatggcggccccaggccacaagccgaccggaagttccaggagagggaggtgccatgccacaggccctcacctggggctctgtggctccaggtggctgtgacaggggtgctggtagtcacactcctggtggtgctgtaccggcggcgtctgcactagtgaagccctgggctcttcccaccacccatctgttccgttcctgcagtatacctggcccctctccgaagccccttgtccctttcttggggattgtggaggctgggtcagaggggagttaagggactgcaggcctggcagcaggacatgccttggctgaaccaagtcctgagagcagcatctctgtccccacggtgccttgtgtgggtccccgtccttggctttctgggtcctgggctgcccccagtgctccagaccttccccactggcaatccaggttatcatccatgtcctccagaggagcttcctcctccaggcctcagccctgttggcccaggtggagcaggagggaccactggaacatgtggtgcttgggaatgcctctcctgttgcattggtccctgaaggcctcagggcaggtatgtggtgtgtgggcgactccacaagacctgcctcccatcctggcagcccagcctgagaccgttgcattgaggcaggcaggagcggcagggtggctgctctccaggagcccaactgccttgagttcctgccccactgggccccctcccctgctgggcaatcctgggaaggtctggaggttcctgtggacctcagggaagccaggggcagctgtcaggcctgaggaagacctgtggagctcctctccagcctcctctttccctcccctctggtctccattctcttcagctccctacatgggctggggaggagacacctggtgggcagagctcaggcagaggtttggatttcagctccctcacttccggggctgtgtggctttggcagatgtcagacttctggtcttgcttctccacgtggacagtgagtatctggctcattcttcactgggttcttctgagattgaacctacaggtgtttgccaagtgcctggcccagagcaagtggccactgcttctcccatctctctcctgcccaacctggtagagctgagggcatgagaggcagagtgcacagtggtcaagggtgcagctctgcagcacaggcagcctaggcctgcgtcccaacctgcctctcaccagctctgtgaccttgggcaagggatttatctgtctgtcccttagttttctcacctgtaaaaggaggataagtatatatatatatttcccagtgttgtgaagattaaaggagtttatcgatgtaggtcttaggatgagtcctggcatttaccaagggttggatatatgttattatcactattaagtgttgagggtccaggcatgctgggcaacagggaccccatctctacaaaaaagtttaaaaaattagccaggcgtggtggtgcacctgtcgtcttagctacttgggaggctgaggtgggaggatcacttgagcccagaagcttgaagctgcagtgagctaggatcgtgccactgcactccaacctgggtgagagagcgagaccctgtctcaagaaaaagaaaaatgcagagaaacaggagtcttggctactcctttagaggcagactcagaccctcctgcctcacagctttatctttgtatttgccccttactttatcttgtgccttgagaaattgctggggagagaggtatgtccactgggcagctgtacaggatggaggatatagggcgtttccactcccagcagccaggttccctcaccccaagctcacccactgttggggagattatctacaataacaccagaaacacattggggtggattgggggtatccttatgggttcttttcagggaaccattgctggacaaggcacaggagccacctccatttctgagctctgcaagggacaagaactagagccatcaggggctgggctcactgtggccccaccccaagccgtcagcctccagggatctacaccctgccttggctgctacagctttttcactccactgccctaggggagttcagcaacctaatgatctctatctctgaacatctcttcatcccatgctccaagtccagcaacctgcaccctggaaccaggagtggaccctacccgagctgtctgtattaatccccatcccccaccaccaatcttaaaaagccctctgtccccctaccctaaaccccagttaggtacccatgctgggcaggtcagttaacaatttatgcacaggtactagttttattgtattaccgttccagggtagctttgaaaaaagtatctcaaaaaggcaacaccaccgcgcccagccaaattaaattttttatagagatgaggtcatgctgttatgttgcccaggttggcctcatgagatcttgccttagcctcccaaagtgctgggattacagatgtgagacactgcacccaaaccccaccacttttttttttcctttttctttttttgagacagtcttactccgttgcccaggctggagtgtagtggcatgatctcagctcactgcaacctccgcctcccgggttcaagcaattctcctgcctcagcctcccgagtagctgggattacagaggcctgccaccacacccgactaattttcgtatttttagtagagacggggtttctccatgttggccaggctgttcttgaactcctgacctcaagtgctccacctgcgttggcttcccaaagtgctgggatacaggagtgagccactgcgcctggctgatcccagcacttttcaaatgatgccgctcaaagccgtgacttggcctactttgaacagcaaacttgttgctgctgttgtcaacctgaaggcctctcaaatgccagcttcaagcagggtgtgaattggccagtgtcagatctcaggagtcctgtgttgagagtgtggctttcagctgcggggagctgcacttggtggggaaagccaggcaggtcaccctcacagccagataatgtggaggtcagaacccaaggaagggagtgagacctccactcccagtgggggacctggccacccatccttggggacctgagaaagcgtacttcaccttggggtgaaggctgggtggggccagagggaccagtgccctcctcagtgcttaggggcagagccacctgcagcaatggtatctgcatattagcccctctccaccttctttctcccgctgaatcatttccctcaaagcccaagagctgtcactgcttctttctccctgggaagaatgcgtggactctgcctggtgatagactgaagccagaacagtgccacaccctcgccttaattccttgctaggtgttctcagatttatgagacttcttagtcaaatatgagggaggttggatgtggtggcttgtgcctgtaatcccagcattttgggaggccgaggtgggaggatcccttgaagccaggagtttgagacaagcctgggcaacttgaaagccccaagcggcaactcaaagcctcagc

SEQ ID NO: 437642 - DNA, 4498 bp, Homo sapiens
ggtgagggcttaccgggaagaactatggtcagggagtggcttcccagggctggggttaacgcattggagagtgaagggttgagaaagccaaggggcagatgcgggtctggaggattttgtgcctaaggccctctctttgctcccagacagcatgaagtaacaatgaggcatccacctcttggttttgtggcctctgtggatgacgtctctcaccttgaaccagttcagagttggagtagcgcaggatcctgtcttcagaggaggggccgaagcgggttcctctgttgtcaagctctttggaggtgcctggctgctactactgtcccagagaggtgatgatgaatgatgggtgtgtccagtggcagtttgccccactgaggcaggggcttccactaggccctgacagagcccttccagcaggcagaaatccctgtgctaggcaagattcaaactccgtagcatgtctcctgctcccatctcttaggaatggagtccttcaggccttgagtcccacattttccatgatgctccattaagcagctgatagcacccccacctccagggaaagtgagttcagagtccttggtctaatgcatctgtgttgaaattgaggccttcccctgtgttcacctttctgctctttttcttttagcccaaggctatgaaggcctcattcggtgctgggcatggtcactcctagcattcctcactctgttgctaacagcaacagcaataataataagggttacaacttactccataccttactgtctgccaggcattaagctaagtgctttacatatattaagtcatttaatcctcataatgaccctatgaaagagataccatctcaacccaattgacagctggtttgcaagattaggagggatgaaggacccaggggacaatgcgagggaaaactctgaccccggggccccaggctggatgttctttatgcctgtgaaccacagcttatcacatgtctggagttagggaccccacttaaagtgagattttggctggaggtggtggatcatacctataatcccagcactttgggagaccaaggcagaaggactgcttgaggccaggagttcaaaaccagtgtaggtaacagctagaccctatctctacaaaaaatttaaaaattagctgggtgtggtggtatgtgcctcaagttccagctactcaggaggctgaggtgggaggatcacttgagcacaggagtttgaagttacagtgagctatgatggcaccactgcacttcagcctaggcaacagagggagaccctgtctttaaagtacatagaggtttttcacaccaacacatctctgcccagtgtgccaacatctgccacctgctataatagtactataacactcaatatgtaattaatgtagtctcagggatgttatgacaatatgattacaactatcacgtgtgtgcccagccaggctcaatgccccaggctgggcgaggtggggcaggggacacagcctaaaatgccaggcctcaggaagccatttggtttagcagacattgtttattaaaggagttacctatgccagatcgaaggcctaagatgattaagacactatgagtgccttcaagtggttggggacgttcatgattgtggtacagacaaataggctttcacatcattcttttatgtaatcatacaacagatatttgcacctacatgtgcagagcactgtgataggcctcagtgacacagaataatacggcaaagaccccacccgatgagccccctcccaccacccaccagtacagtagggggtggtttaatggagtgttcctggaatatgaagtgggggcaggcattaggggtggcaaagggacaagtgtttatctgatcagttatgtactgtttataataagtaaatcagcagagggggaataatacttagaacctatagagagtaaatctgacaagatgaaatgctgatgaaaatatggaggaaatgaaactctcatgggttttgcagggaatctaagtcagtgctgtgttgtgaatgtaggtgtaccctttgaattcatatgttgaatcctaacccccaaagcaatggcattaagaggtggggcctttggggctgggtatggtggctcatgactgtaatcccagcactttgggatgctggcagggggcagatcacttgaagccaggagtctgagatcagcctggccaacatggtgaaaccccatctgtactaaaaatacaaaaattagccaggtgtgatggcgtacatctgtaatttcagccactcgggaggctgagacaggagaatagcttgaacccagtaggtggagatttcagtgagccgagatcgtgccactgcactccagcctgggtgacagagcgagactccatctcaaaaaaataataaagatgtggggcctgtgggaggtggttaggtcatgagggtggagatcatgaatggggttagcaccttataaaacaggcttgagggagcccttctgtcccttctaccatgtgtggatgcagtgagaaggcaccgtatctctgaagcagagagcccgccctggacactggatctgctggcaccttgatcttggacttcccagcctctagaactgtgagaaataattttttgttgtttacaaattacccaggctaaggtgtttcattgtaacctgaatggaccaagctggtgtgaccctgttggaaaactggcagtatctaccaaaagccgaacatacgtataaactgatccagcagttccactcctgggtatgtacaccacagaaagctatgtccaccgagacattggcaagaatgtttctaaccacacgctgactgtagccccaaacctgaaacaacccaaatgtccatccaccaacccaaatgtccatccacagttgaagctacagtgaagtcacagggtcgaatactactgcacagcaacgaatatgaatgaaaatatcgctatgcacagcaacatggataaatttcacagacatgaggtcaagcaaaagaggtcagagtcctcatcatcaagagagaattcattgtatgattctcttcctacaaaaagtacagaaataagcaaaactgatccatggtgttagaagccaggggaacagttaacaggggagggatactggggaggggcatcctggagtgctggtctacctcatctgggtgttgatttcacgagtattgtcagtttgtttccagactccctgttggagatgtggaaataaaaaccacctaaacaagagcagagaggccatttggtcaaagtttgcaaaggagtcagccatgattgcttgtatttggcaggggtcaaaggcaggcagggactgtgaaatgttatagtggaaaaaaagggaaggctctgggtgtgctgtgattggagattgttggcatggggacagagcggactaactggaggggcatctttggttggttgggggggtatatttggctttctctggttggtctggagttggaagagggggtgtggtggctggggattgggaagaagctggcagccactaagttcagactgttctgggtccgattgctgctgaggctgtggtttggcttccttggcttcccaggctggttatgggtttctggccagagtctattgtcatatgtggcctggccattgtccagttgtatgttcagtctcttggaaggaagggtattgactctgagaggggccaccatcgctggaatgggggacacacagtacttcctccagctgcctacacccccctagggtcagtggcgcctgcctgtgagggtgagcccaatggctagagggctctgctccaagtcattgcttactacacccacaaacattcttcgttctttaaggcctaacttaaagcccagatcctacaggaaaccttgattagacccctctctttattaagcttcctaagatcaaaccctgcttttgtgtaaatgctgacctccttgcctacattttaaaaacctagagctgggcatgatggccccagcctgtaatcccagtgattcaggagactgaggtgggaggattgctagaagccaggagttcgagaccagcctgggtaacatagctagaccacatctcttaaaataaaatagttaatttagccaggcatgatgatatatgcctgtagtcccaactacttggaaggctgaggtgtgaggatctttgagcccgggaggtcgaggctacagtaagctatgatctcaccactgtactccagcctgggtgacagagcgagacccagactcaaaaaataaaaataaaaaccctgaatatcttccttctgcaaaaaaaaaaaaaaaaaaaaaaaaaaaaaaaaaaaaaaatctaggagatgctctttaccctgcctggcctcaaactattaatagcttcctttgagcaacattatttattatgaactttcaaacacaaaaaagtagagatagaataacaaatccccatgactccatctacccatctggaccactat
